United States Patent Application Publication US 2017/0114356 A1 - sequence listing, part 58

SEQ ID NO: 78266 - DNA, 1851 bp, Zea Mays
cctgtccccgcctctgccaacgctcctgccccgcacacccacccgccgctcccgcgttgtccgcccccgtcatgaattgccctcttccatgtgcaccacagaaatctcggcgcgagatccccccgaaacctcgccataccctactgcgaggcgtaccattcggcagcgaggccctccttggcgggaacggcgtggtagtcatggaggctaagacgctccacctcgacgtgtgcgttgaaccacacgctgtgcttgtccttgcataacctggtgaggatttggccgcatcgtcccgctgagcatcacgtgcgacggcaggccctgctgctcccaggtgtcggtgcgagataggagagcgcgaacctggccgagctccatgtgaggcagtcccagggcacacgggcctcgcggtggcccaaggacgtcgggcggaagtcgcgccgagctacttccctgtctacgccaaggacgcccaacgcagagaagaggatgcccaccagcgacgtcccgtgctgcgaccgccacgcgaagaaggctgacggcatgccccgctccgatatgcccaacagctgggaccgggaaaaagacatgggacaaatagaagacatctaaagctttccaaggcagatgcctccagaggatatctactctctggtcatatgatcgatgcatagatcacttcagacaatcaaataacagtagtatacatagaaatgcaacatgtaagtatttcctttatatgtctaacagtagtttacaaatatattccacatataaccatattagcttaattgatctatgtataaattatgattattagaataaattttaattccaaatatccaaacatggcctaaataaatactgaattggacattgtatttaaatagacaacagggaacaagagcatatcaccagacacacactagaactcataaaacagggatactatgctattagtctctcttaaatgcagtacatggaagcaaggtttatgatcagatttttgtataccagagaacactcaagtctcccaactgcccgcctgccgaggttggatgtggctccaccagctctgcctccctacttcctctactgctgcggctactgctacatcatctatcgtgcctgtttttctaggaatcttaatggcatcaggctggcattttgttcaactcattaggagcagatgcgacaggatcacaagtaggaggagcggcgacgatgctgtagcgagagacacgggtgccaaggtcgttgtgctgcggtggtggcaggacaggaaggaaacgaaaaagcaggagccagggctgttcaacaacgtgaccgagtcgctgaggcgaggaagagtaaggtgaaggcactcgtcgacgcctttgagactgacagagcgtcatctcgctgcaggaaaccagcaagcctgctgctgctccagctatgaaagtaggtgtcgtgccatgagtgcttcttgacctgcagtgtgcatgatcacctttcttggaatttttggtcttttttggttgttagtgaccgtaaaagtggcgcttgttgaggtttgctcgttcccatgtaaactgagttttctcatgggagtttccatacttttgtagtgctagaaaaaaggaaagtctgtacaggttttgtgtctatgcaaggcttgagaagttggcattgtactgataagtgataagtaaacaagttattgtaatgatttaaactagattgttttgaaaggaaatggaatgcataaagcaaattaaactttgtattatgttactaattcatgaaaaatggtactaaacttccgtcaacgtttttatgtttctcatttcactcgctctatttttcgtt

SEQ ID NO: 78267 - DNA, 2503 bp, Zea Mays
cctgtccccgcctctgccaacgctcctgccccgcacacccacccgccgctcccgcgttgtccgcccccgtcatgaattgccctcttccatgtgcaccacagaaatctcggcgcgagatccccccgaaacctcgccataccctactgcgaggcgtaccattcggcagcgaggccctccttggcgggaacggcgtggtagtcatggaggctaagacgctccacctcgacgtgtgcgttgaaccacacgctgtgcttgtccttgcataacctggtgaggatttggccgcatcgtcccgctgagcatcacgtgcgacggcaggccctgctgctcccaggtgtcggtgcgagataggagagcgcgaacctggccgagctccatgtgaggcagtcccagggcacacgggcctcgcggtggcccaaggacgtcgggcggaagtcgcgccgagctacttccctgtctacgccaaggacgcccaacgcagagaagaggatgcccaccagcgacgtcccgtgctgcgaccgccacgcgaagaaggctgacggcatgccccgctccgatatgcccaacagctgggaccgggaaaaagacatgggacaaatagaagacatctaaagctttccaaggcagatgcctccagaggatatctactctctggtcatatgatcgatgcatagatcacttcagacaatcaaataacagtagtatacatagaaatgcaacatgtaagtatttcctttatatgtctaacagtagtttacaaatatattccacatataaccatattagcttaattgatctatgtataaattatgattattagaataaattttaattccaaatatccaaacatggcctaaataaatactgaattggacattgtatttaaatagacaacagggaacaagagcatatcaccagacacacactagaactcataaaacagggatactatgctattagtctctcttaaatgcagtacatggaagcaaggtttatgatcagatttttgtataccagagaacactcaagtctcccaactgcccgcctgccgaggtgagctccgaatgcctgccctccacctctgatccgtgttgcggcttcgctcctgtgtggagcaagttaattttttttaacatgcctcaacatagatgtcgtccaattacgactgaagcaaaaaaatattgcaaggctaaacactcgggtcaattgctatgtctgggttggatgtggctccaccagctctgcctccctacttcctctactgctgcggctactgctacatcatctatcgtgcctgtttttctaggaatcttaatggcatcaggctggcattttgttcaactcattaggtgcgtcaacactgaaattcactcttacggtcatgttttgttattgcattagagtttgcagcatgaatcagggacatccaatgttgttagatctattaatgcgatgttctctgtcttatttttatcctacaagtcatttcgagatatgtggttgctgatcagatgcgggcaatgtcaattttattattggaattgtttaacttgacactcattcaccttctggactgaaaaccaagacagtactgcatctatttagttaaacatatattacttggctgctaacacaactaagagaaatactgaaaatcaatccttcagtctatccttccataggattttaatttgtgcatgatagagagttttacatgtcagaaatttatagatgtcagagagttcattgcagttcatctccttcactgcatcttgcatattttttctctctttcagctggttacagtaacaaggaaccaccattttaatgcaaaggagcagatgcgacaggatcacaagtaggaggagcggcgacgatgctgtagcgagagacacgggtgccaaggtcgttgtgctgcggtggtggcaggacaggaaggaaacgaaaaagcaggagccagggctgttcaacaacgtgaccgagtcgctgaggcgaggaagagtaaggtgaaggcactcgtcgacgcctttgagactgacagagcgtcatctcgctgcaggaaaccagcaagcctgctgctgctccagctatgaaagtaggtgtcgtgccatgagtgcttcttgacctgcagtgtgcatgatcacctttcttggaatttttggtcttttttggttgttagtgaccgtaaaagtggcgcttgttgaggtttgctcgttcccatgtaaactgagttttctcatgggagtttccatacttttgtagtgctagaaaaaaggaaagtctgtacaggttttgtgtctatgcaaggcttgagaagttggcattgtactgataagtgataagtaaacaagttattgtaatgatttaaactagattgttttgaaaggaaatggaatgcataaagcaaattaaactttgtattatgttactaattcatgaaaaatggtactaaacttccgtcaacgtttttatgtttctcatttcactcgctctatttttcgtt

SEQ ID NO: 78268 - DNA, 2056 bp, Zea Mays
cctgtccccgcctctgccaacgctcctgccccgcacacccacccgccgctcccgcgttgtccgcccccgtcatgaattgccctcttccatgtgcaccacagaaatctcggcgcgagatccccccgaaacctcgccataccctactgcgaggcgtaccattcggcagcgaggccctccttggcgggaacggcgtggtagtcatggaggctaagacgctccacctcgacgtgtgcgttgaaccacacgctgtgcttgtccttgcataacctggtgaggatttggccgcatcgtcccgctgagcatcacgtgcgacggcaggccctgctgctcccaggtgtcggtgcgagataggagagcgcgaacctggccgagctccatgtgaggcagtcccagggcacacgggcctcgcggtggcccaaggacgtcgggcggaagtcgcgccgagctacttccctgtctacgccaaggacgcccaacgcagagaagaggatgcccaccagcgacgtcccgtgctgcgaccgccacgcgaagaaggctgacggcatgccccgctccgatatgcccaacagctgggaccgggaaaaagacatgggacaaatagaagacatctaaagctttccaaggcagatgcctccagaggatatctactctctggtcatatgatcgatgcatagatcacttcagacaatcaaataacagtagtatacatagaaatgcaacatgtaagtatttcctttatatgtctaacagtagtttacaaatatattccacatataaccatattagcttaattgatctatgtataaattatgattattagaataaattttaattccaaatatccaaacatggcctaaataaatactgaattggacattgtatttaaatagacaacagggaacaagagcatatcaccagacacacactagaactcataaaacagggatactatgctattagtctctcttaaatgcagtacatggaagcaaggtttatgatcagatttttgtataccagagaacactcaagtctcccaactgcccgcctgccgaggtgagctccgaatgcctgccctccacctctgatccgtgttgcggcttcgctcctgtgtggagcaagttaattttttttaacatgcctcaacatagatgtcgtccaattacgactgaagcaaaaaaatattgcaaggctaaacactcgggtcaattgctatgtctgggttggatgtggctccaccagctctgcctccctacttcctctactgctgcggctactgctacatcatctatcgtgcctgtttttctaggaatcttaatggcatcaggctggcattttgttcaactcattagctggttacagtaacaaggaaccaccattttaatgcaaaggagcagatgcgacaggatcacaagtaggaggagcggcgacgatgctgtagcgagagacacgggtgccaaggtcgttgtgctgcggtggtggcaggacaggaaggaaacgaaaaagcaggagccagggctgttcaacaacgtgaccgagtcgctgaggcgaggaagagtaaggtgaaggcactcgtcgacgcctttgagactgacagagcgtcatctcgctgcaggaaaccagcaagcctgctgctgctccagctatgaaagtaggtgtcgtgccatgagtgcttcttgacctgcagtgtgcatgatcacctttcttggaatttttggtcttttttggttgttagtgaccgtaaaagtggcgcttgttgaggtttgctcgttcccatgtaaactgagttttctcatgggagtttccatacttttgtagtgctagaaaaaaggaaagtctgtacaggttttgtgtctatgcaaggcttgagaagttggcattgtactgataagtgataagtaaacaagttattgtaatgatttaaactagattgttttgaaaggaaatggaatgcataaagcaaattaaactttgtattatgttactaattcatgaaaaatggtactaaacttccgtcaacgtttttatgtttctcatttcactcgctctatttttcgtt

SEQ ID NO: 78269 - DNA, 1906 bp, Zea Mays
gtccacacccagaaggcccccacctgtccccgcctctgccaacgctcctgccccgcacacccacccgccgctcccgcgttgtccgcccccgtcatgaattgccctcttccatgtgcaccacagaaatctcggcgcgagatccccccgaaacctcgccataccctactgcgaggcgtaccattcggcagcgaggccctccttggcgggaacggcgtggtagtcatggaggctaagacgctccacctcgacgtgtgcgttgaaccacacgctgtgcttgtccttgcataacctggtgaggatttggccgcatcgtcccgctgagcatcacgtgcgacggcaggccctgctgctcccaggtgtcggtgcgagataggagagcgcgaacctggccgagctccatgtgaggcagtcccagggcacacgggcctcgcggtggcccaaggacgtcgggcggaagtcgcgccgagctacttccctgtctacgccaaggacgcccaacgcagagaagaggatgcccaccagcgacgtcccgtgctgcgaccgccacgcgaagaaggctgacggcatgccccgctccgatatgcccaacagctgggaccgggaaaaagacatgggacaaatagaagacatctaaagctttccaaggcagatgcctccagaggatatctactctctggtcatatgatcgatgcatagatcacttcagacaatcaaataacagtagtatacatagaaatgcaacatgtaagtatttcctttatatgtctaacagtagtttacaaatatattccacatataaccatattagcttaattgatctatgtataaattatgattattagaataaattttaattccaaatatccaaacatggcctaaataaatactgaattggacattgtatttaaatagacaacagggaacaagagcatatcaccagacacacactagaactcataaaacagggatactatgctattagtctctcttaaatgcagtacatggaagcaaggtttatgatcagatttttgtataccagagaacactcaagtctcccaactgcccgcctgccgaggttggatgtggctccaccagctctgcctccctacttcctctactgctgcggctactgctacatcatctatcgtgcctgtttttctaggaatcttaatggcatcaggctggcattttgttcaactcattagctggttacagtaacaaggaaccaccattttaatgcaaagatgcgacaggatcacaagtaggaggagcggcgacgatgctgtagcgagagacacgggtgccaaggtcgttgtgctgcggtggtggcaggacaggaaggaaacgaaaaagcaggagccagggctgttcaacaacgtgaccgagtcgctgaggcgaggaagagtaaggtgaaggcactcgtcgacgcctttgagactgacagagcgtcatctcgctgcaggaaaccagcaagcctgctgctgctccagctatgaaagtaggtgtcgtgccatgagtgcttcttgacctgcagtgtgcatgatcacctttcttggaatttttggtcttttttggttgttagtgaccgtaaaagtggcgcttgttgaggtttgctcgttcccatgtaaactgagttttctcatgggagtttccatacttttgtagtgctagaaaaaaggaaagtctgtacaggttttgtgtctatgcaaggcttgagaagttggcattgtactgataagtgataagtaaacaagttattgtaatgatttaaactagattgttttgaaaggaaatggaatgcataaagcaaattaaactttgtattatgttactaattcatgaaaaatggtactaaacttccgtcaacgtttttatgtttctcatttcactcgctctatttttcgtt

SEQ ID NO: 78270 - DNA, 1523 bp, Zea Mays
ccgtgcgtcgcgaggaaaggctcggaacgggagggcgcgggccgtcggatgctcgcagtcgcagctgccaccgccgcctacggctatttaaccccgcgctgccgacgccgcactcgcccccggcctcctccgcccgcatacccgatcccgctcgctcgccgccagttgtcccgcagctcggatcgtctcatacctcggcgaaaatgagagagatcttgcacatccagggagggcaatgtggcaaccagatcggtgccaagttctgggaggtcgtgtgtgacgaacacggcattgacactacagtgtccgcactggaccctatgggcagatcttccgccctgacaactttgtgtttgggcaatctggtgctggcaacaactgggcgaaggggcattatactgagggcgctgagctcattgactctgttctcgatgttgtgaggaaggaagccgagaactgtgactgcttgcaaggattccaagtatgccactcccttggtggcggtactggatctggtatgggtacgctgttgatctcaaagatcagggaggagtaccctgaccgcatgatgctgacattctcagttttcccctcaccgaaagtatctgatactgtggttgagccatacaacgccactctttctgtccaccagttggttgagaacgctgatgagtgtatggttcttgacaacgaggccctctacgacatttgcttcaggactcttaagttgaccacccctagctttggtgatttgaaccatttgatctctgcaaccatgagtggagtcacctgctgcctaaggttccctggtcagctgaactccgacctcaggaagctggcagtgaacctaatccccttcccccgcctccacttcttcatggttggcttcgcgccgctgacgtcccgtggctcccagcagtaccgagcactcaccgtccccgagctcacgcagcagatgtgggacgccaagaacatgatgtgcgccgctgaccctcgccacgggcgttacctcaccgcctcggccatgttccgcgggaagatgagcaccaaggaggtcgacgagcagatgatcaacgtgcagaacaagaactcgtcctacttcgtggagtggatccccaacaacgtgaagtccagcgtgtgtgacatcccgccgaggggcctgtccatggcgtccaccttcgtcggcaactcaacttccatccaggagatgttccggagggtgagcgagcagttcactgccatgttcaggaggaaggctttcttgcactggtacacgggcgagggcatggacgagatggagttcaccgaggccgagagcaatatgaatgacctcgtgtcggagtaccagcagtaccaggatgcgactgctgatgacgatgaggaggccgagtatgaggacgaggaggagccagctgatggcatcataccaccctcgtggcccattccgtcgatcgtggctgttgatgcttgtgtttccttgttctatagaaccttgcttttgtcaaaaaaaattattaaaaaaa

SEQ ID NO: 78271 - DNA, 836 bp, Zea Mays
aagaaataaaggtggttcaagatttaccactatcgttatgcaatcacaaaacaaatgaatgctcttctggggttcgagaagcttgtgaaggccaagacacaagtggttgctggcacgatgtactatctcactattgaagtgaaggatggcgaagtgaagaagctctacgaagctaaggtctgggagaagccatgggagaacttcaaggagctgcaggaattcaagcctgttgaagagggtgctagcgcctaaggatctctccttctccatgtgcgagcctgaagctcaaagcaaagttgcagaataaggagccacctcccaacatgctagaccatgctcccttgtgtaatttcataagactacaacccttttagggcttgttcgtttgtgtctgtgtctaagggaattgaaggtgattaaatttccttctatacaaatagaggggctttaatccactccaatacttttcaatccacgcctaaccgaacaagcccttaatatgatatcttagattgccgtacctgtgtaatatcatgaataaaatttgctattatggattctaaggtttatgaactaccatacatggcagaatcctcatgttactttgctgaaatctttgttggaagttggaacgtacatggcagaattctcacattacttggctcaagtcttcggcttggaagtttacatgcagattttttggtcacatgacgatcccatccaatctcagcttggtcaattcagattataccttgtaaaccaagcaagcgcctgagtgcatagtcagctcaccagatgaccagagagaatatgtttgcgatcacttcgaagctgtt

SEQ ID NO: 78272 - DNA, 819 bp, Zea Mays
gtatcaccacccaagaggtcacctgagccattgaccagcaaatgctcttctggggttcgagaagcttgtgaaggccaagacacaagtggttgctggcacgatgtactatctcactattgaagtgaaggatggcgaagtgaagaagctctacgaagctaaggtctgggagaagccatgggagaacttcaaggagctgcaggaattcaagcctgttgaagagggtgctagcgcctaaggatctctccttctccatgtgcgagcctgaagctcaaagcaaagttgcagaataaggagccacctcccaacatgctagaccatgctcccttgtgtaatttcataagactacaacccttttagggcttgttcgtttgtgtctgtgtctaagggaattgaaggtgattaaatttccttctatacaaatagaggggctttaatccactccaatacttttcaatccacgcctaaccgaacaagcccttaatatgatatcttagattgccgtacctgtgtaatatcatgaataaaatttgctattatggattctaaggtttatgaactaccatacatggcagaatcctcatgttactttgctgaaatctttgttggaagttggaacgtacatggcagaattctcacattacttggctcaagtcttcggcttggaagtttacatgcagattttttggtcacatgacgatcccatccaatctcagcttggtcaattcagattataccttgtaaaccaagcaagcgcctgagtgcatagtcagctcaccagatgaccagagagaatatgtttgcgatcacttcgaagctgtt

SEQ ID NO: 78273 - DNA, 1656 bp, Zea Mays
ctagttgcctctttttttattcttatctttaaatcgattgtaagtttactattttttctgtcttcttttctccctcttccacctaagtatttagcacgtttatagcctcctaccatcccaatccaaacggtacaaagtcaacgatcacatacatggcggtggaaaattctgtacatacgtttccttgggtgcaacagttgcgcattgatcgacgactagtacctcctccgtgatagacgcgagcaacctatatgcacatggagccatccttacacgctaaattggagcaacttcacgtattttctataaataacatgctaaattaataaatttagcaatgtaataacataagtagtaaccataatttatttctctctctaataatttattatagtacgtccttcgttttttatttgtttcaaaatcaactaaagagcgacaaatattttaaaacgtataaataaataattgggaacttggactatttttaaccgacctagcatattttaactgtttcttttctctatctcttatcattttctcacctgaaaaagttcgcagcttcaccgaacgaaaatgtcctgtcgttccctttccaaccccgtctccgtctccgcccgccacaacaatatcgcattgacagatcgttcatcgtagcctcctccagtcgtctcccgggatcttctccggctataaatttccgccccaattccccaatccagatgcgcaaacatcgaatcgtctcgctcgtggctgccctgctcatactgcttgccctcgccgtatcgtccacccgcaacgcacaggaggattccatggccgacaacaccgggacgttggcgggcggcatcaaggacgtgccggggaacgagaacgaccttcacctccaggaactcgcccgcttcgccgtcgatgagcacaacaagaaggccaatgctcttctggggttcgagaagcttgtgaaggccaagacacaagtggttgctggcacgatgtactatctcactattgaagtgaaggatggcgaagtgaagaagctctacgaagctaaggtctgggagaagccatgggagaacttcaaggagctgcaggaattcaagcctgttgaagagggtgctagcgcctaaggatctctccttctccatgtgcgagcctgaagctcaaagcaaagttgcagaataaggagccacctcccaacatgctagaccatgctcccttgtgtaatttcataagactacaacccttttagggcttgttcgtttgtgtctgtgtctaagggaattgaaggtgattaaatttccttctatacaaatagaggggctttaatccactccaatacttttcaatccacgcctaaccgaacaagcccttaatatgatatcttagattgccgtacctgtgtaatatcatgaataaaatttgctattatggattctaaggtttatgaactaccatacatggcagaattctcacattacttggctcaagtcttcggcttggaagtttacatgcagattttttggtcacatgacgatcccatccaatctcagcttggtcaattcagattataccttgtaaaccaagcaagcgcctgagtgcatagtcagctcaccagatgaccagagagaatatgtttgcgatcacttcgaagctgtt

SEQ ID NO: 78274 - DNA, 2003 bp, Zea Mays
tcaacctctcgtctttggcctccgccccaggcgccgacgcagcggagacctcgtcgcccgcctccggcgagtcttccgcgtcagcttcgcgccccacgggcttcggatctaggcccgctagctcggcttggtcccctggcgggttgaaggacccgaacttgggcgtggcctccggcgccacgaagcagcccggcgcgtgctggaacgagaacgacccgccatccccgtccccgccgcagcccgccaccgcactgtcgagcgcggcgacccacgcgcggcgccgctttggctcgggcacccgctcctcctcctcctcggccacgccgtcgaaccccgggatcgggagcccgcgcttctccggggaagcggaagagcccccgcgcgccaggggcggaggaggcgctcggggcagcgcgcgtccctcggcctgggcctctgccgccattattcggggtcgggcagcagaattgcagaacagcctaagggtcggagacggatggtgagcgggtggaatggggaggtgaattttttaatccagccgtccccgtccgcggctcgccttcggctttggcggtgattttttggcgatggcaacatgtccatatgggactcgtgacgaggatgacacgacaccgcccacgctgttctctcgctttccgtcgcggcgacattgcagccttgcaggcgccgtcggccgtgcccgtgacgaggagccacgaaatcaacagaaccgagggctcgctagtagcagaatggaccaaccatagcaatataactttaaacactggatcctgttcgtcagtgctcggtcgaattgcactaataactttagataataatgcgaacgattttgcttactgtttatgtggtagtaacagctacaactggccaaaaaatacaaaaaaaggctcatatatatttcccttttttccccacatgttcgacacaaggaatgaacaaatgttgcatcgaacttgtacgggttgtcagggttcagaccgatcgggcggtcagatccgtcacactcgctaggcctggtcgtcagtcttgcggtcgccgtgcgagtcgcgctcctgcaggcgcgacgtagtagagcgaggtgatggggttgagcgagatgcccttggaggtgaggaggatctggatgaggacgaggcgcgtggcctcgaaggcgacggcggcgagctgcagggccacgccgcgcgcgtcgaagcgggcctcgccgtacgcggcgatggcgacgccgaacgagatggagagcatgttgagcatggcggaggacctgaaggtctccttcttgaagagcaccccgatggagtagacggcgacgggcatgagcgccttgagcatctggatgaaggagacggagaggtagatgtacgcggagttggagaaccagagcgagagcgagtagagggcgccgatgggcaccacggaggagaggtagagctgcgacgtcatggcgggcgaggacgggaggtccacgacgcggaggacgcggacgagcgccacggcgagggacgagcagaaggccatgtgcaccatggtcagggagatggggaagggccagttgtacatcttggggtccaggatgtacttgttgtagacgatcacggagaaggagaggaagatccacaccgccacgtacatgtacgagaccaggaccttgcggatcaccgacgccgacatgccgccgtcgccgccgccgccgctggccccttccttgcccatggcctggcctctggccccccgcttcctcgcgctgctccggtgagggggcgcggacgcggtggatctcgactgtcgagtgggaaggagccggagatctggaaggaaagcagggaggcagaaggaggcggatctgggagggcgcaggtaggtgacggggaggtttggggtgtctgcgcagaggggttattgcagactcggacggagggggatgttggccacgtggacagttgcgttgatgcagcttctgtttagtgagggtgctttgacttgtt

SEQ ID NO: 78275 - DNA, 1442 bp, Zea Mays
caggaaccaaactgcgtatgagcacggcctttcatccacaaacagacgaccaatcacaggaacaatatgtccaatagggccacccattggtgttatgcctgtcagcgcccaattcgtcttcgcgggcaggatatcatatgtcccaactgcagtgatggttttatccaagaaatcagtgagatgggtggcgtactgaacacttatgggctaactgaaccggactttgaagagcgccaggccagaagatttggaatgatggatgccatatcttccctcatgcggcaacggctgtcagaaataggaagggatagtttgtttgatattcacggtagacaagggacaggtactgaatatggaaggaggtcaactgctattcctacgctggtatttggtggcatcccttctcctgcagttggtagcagtgatatcaatgttgtcatcagggaaggccgcagagctggcgctgcccgtccgaatttcagtagcttagttgttggtcccagtctggaagctctatttgagcagctactactccagaacaaccgtcaaggcccaccacctgctccacagtcagctattgactccatgcctgtggtaaagataaatcgcaggcatcttgacgaagatccacagtgtgcagtttgcaaagacaaattcgaggttggagcagaggcgcgggagatgccgtgcaagcacttgtaccatactgactgcatcatcccctggctggttcagcacaattcctgccctgtttgccgtcatccgctgccatcacagcgatcaggcagtagtaccagcagcgcccgtgtgccttcagcatactacaacgaaacagcttgccctcctgcggtcgccagggcagatttcgatcctgtgccttcagcatactacaacgaaacagcaactgatcctcctgcggtcaccagagcagatttcgatcctgctccaggaaactacggcagcgaaagccaggaaagtcacgtccccttctcctttctctggccatttggcccgtcgagttcttaccaatatgaagaaaatgttgatgaacctgcagtatacgatccaaaccagatagcatattctgcgtggcactatgaccactgactgaaaccctgagttaaaatcaagatatctgcaattcgtgccttgagctctcagctttggtgaggcaaagggctgcttgccgtataaaaaatggatggttattgtgttcagtgcatacccttgctacgcatgtccgttgtggagatatcagctgtgtatagaactgggcgcaataaactctgctgtaatgcccgtatatattccttttcggtatatcaagtctaaagctacataatcctgtatgtgcagtaatcggtgaactgagtgcatccagaatatcatgtcatgataaacatgattataattacatggttgtctttttagactgaacacag

SEQ ID NO: 78276 - DNA, 828 bp, Zea Mays
cgcaaatccagtcacaccaaacctgccatgtgggttgggcaccgcgccgtctcctccgcatcgccatccatgcagccgactcgcccaagacggagcccgaccgaccaaccatgctaggtcgtgcagtcgcgctgtggccggctgtacaggagctcaggcgtcccctagaccgagccgccagatttgtcaatgcagagaaccgggtgttttggatgcattaagaagtgtccgttcttacattttttcgtgcttggtctgccaatttcgtgcatgatctccgtcgccgatttggaaagcgcactgtctgcgacaccgatttggaaatcgccttgccaaacgattccaacacaaaactgttcgtgcacgccgattaaaaaggcatgaagtcgaactggcaactacggcagctcaagtgctcaaccattaccagatgacactgacgacctgatcgagtagatgttgcattatactactttatcgatctacatgtctcgccaatgcgtcttcacataagttctcgtgtcctaaactttgggatggtgaagttttttgtagctaaccgtcctgattagttgggttccaccatatttgatgaactggcttcattgcaatggttatttgcttaattgctttgattgccaaataaattgcacgttttctttgtgtttttgtatatcacaaaatagtaggcatttattggtgatagatggagatggcggttataaagtctgattcagttataaattacttcaaaaacatcatatatagtgtaactcgaattcttgtagtttgatttttcttatttaaataccgtctcgcataatgctt

SEQ ID NO: 78277 - DNA, 627 bp, Zea Mays
gtagatccagtcacaccatccctaggtccgttcttacattttttcgtgcttggtctgccaatttcgtgcatgatctccgtcgccgatttggaaagcgcactgtctgcgacaccgatttggaaatcgccttgccaaacgattccaacacaaaactgttcgtgcacgccgattaaaaaggcatgaagtcgaactggcaactacggcagctcaagtgctcaaccattaccagatgacactgacgacctgatcgagtagatgttgcattatactactttatcgatctacatgtctcgccaatgcgtcttcacataagttctcgtgtcctaaactttgggatggtgaagttttttgtagctaaccgtcctgattagttgggttccaccatatttgatgaactggcttcattgcaatggttatttgcttaattgctttgattgccaaataaattgcacgttttctttgtgtttttgtatatcacaaaatagtaggcatttattggtgatagatggagatggcggttataaagtctgattcagttataaattacttcaaaaacatcatatatagtgtaactcgaattcttgtagtttgatttttcttatttaaataccgtctcgcataatgctt

SEQ ID NO: 78278 - DNA, 1689 bp, Zea Mays
aggtaccggcaggccattggccacagcccgctttactcacgacgcgacgaaccgcgcactccttttaaagctccacgttgcggtgtcctcacgggtcacggcgaccgatgccgctgctgctgcgcggcgcctccctcctccgcctctgccagtgtaccagtgggctctcaagtgtgaaatttagttcaagagtaacggtactagtgaatctcaacgccatgagggacggaatgcgggccacatattcacgtagagctgcctctaagaacagtgaggtcaagaaagatgagcagccagtcacagagaaggttagtagagctgcctctaagaacagtgaggtcaagaaagatgagcagccactcacagagaaggaagatgctgctgaaactgatttggaggtggagcgagggaggagcagcagccctagccagctccaatcaatgactgtcaaggagctcagggagctcacgaggaggaggggtatttctgtgaaaggtaccaagaaagatttagtatcagcactgatgaattctatggccgtggaagcaaatggtgaagggggaaagtcatccgttgagctggttagccccttggaagtacctttgaaaagaaaaggtggtgcttctgttgtggttgaacaaaaactagaaagttctgagatcatttctgaaacacctaacaagaaaagtagaacaaaacaaaaatcaagcaagaacaccactcgtgaggaaatttcggtgactaatgtcaagctaagtaagactgttgtccagaaggaaacagttgccggattaagtcctgatgatgattcagagccttggactatactcgtgcataagaaaccacaagccagctggattccatacaaccctaggactatgaggcctccacctctaagcaaggatacacgggctctgaagattatgtcatggaatgtcaatggattgaaagcattgctcaaatcaagaggcttctctgtgcagcagttagcacagagggaggactttgatgtgctttgcctccaagaaacaaaaatgcaggagaaggatattgaagttattaaggacactttgcttgatggctacacaaatagtttctggacttgcagtgtgtcaaagcttggctattctggcactgcaataatttcaagagtcaaaccactgtcgatcaagtatgggcttggtatatcagaccatgatactgaagggagggttgtgactgtagagtttgatgacttctacctgttaactgcttatgtaccaaactctggtgatggtctaaaaagattgacttacagggtcacagagtgggatccatcccttggtaactacatgaaagaattagagaaatcgaagcctgtcatactaactggtgatcttaattgtgcgcatcaggagattgatatacatgaccctgctggaaatcgtagaagtgcaggcttcacaaacgaggaaagagaatcatttgggaccaattttttgtccaaagggtttgttgatacgtttcggaaacagcatcctaatgttgttgcctatagttactgggggtacaggcataatgcccggaagacaaacaaaggtccgttcttacattttttcgtgcttggtctgccaatttcgtgcatgatctccgtcgccgatttggaaagcgcactgtctgcgacaccgatttggaaatcgccttgccaaa

SEQ ID NO: 78279 - DNA, 1977 bp, Zea Mays
gacgagtccatcgattgtttggcggtgtaccagtgggctctcaagtgtgaaatttagttcaagagtaacggtactagtgaatctcaacgccatgagggacggaatgcgggccacatattcacgtagagctgcctctaagaacagtgaggtcaagaaagatgagcagccagtcacagagaaggttagtagagctgcctctaagaacagtgaggtcaagaaagatgagcagccactcacagagaaggaagatgctgctgaaactgatttggaggtggagcgagggaggagcagcagccctagccagctccaatcaatgactgtcaaggagctcagggagctcacgaggaggaggggtatttctgtgaaaggtaccaagaaagatttagtatcagcactgatgaattctatggccgtggaagcaaatggtgaagggggaaagtcatccgttgagctggttagccccttggaagtacctttgaaaagaaaaggtggtgcttctgttgtggttgaacaaaaactagaaagttctgagatcatttctgaaacacctaacaagaaaagtagaacaaaacaaaaatcaagcaagaacaccactcgtgaggaaatttcggtgactaatgtcaagctaagtaagactgttgtccagaaggaaacagttgccggattaagtcctgatgatgattcagagccttggactatactcgtgcataagaaaccacaagccagctggattccatacaaccctaggactatgaggcctccacctctaagcaaggatacacgggctctgaagattatgtcatggaatgtcaatggattgaaagcattgctcaaatcaagaggcttctctgtgcagcagttagcacagagggaggactttgatgtgctttgcctccaagaaacaaaaatgcaggagaaggatattgaagttattaaggacactttgcttgatggctacacaaatagtttctggacttgcagtgtgtcaaagcttggctattctggcactgcaataatttcaagagtcaaaccactgtcgatcaagtatgggcttggtatatcagaccatgatactgaagggagggttgtgactgtagagtttgatgacttctacctgttaactgcttatgtaccaaactctggtgatggtctaaaaagattgacttacagggtcacagagtgggatccatcccttggtaactacatgaaagaattagagaaatcgaagcctgtcatactaactggtgatcttaattgtgcgcatcaggagattgatatacatgaccctgctggaaatcgtagaagtgcaggcttcacaaacgaggaaagagaatcatttgggaccaattttttgtccaaagggtttgttgatacgtttcggaaacagcatcctaatgttgttgcctatagttactgggggtacaggcataatgcccggaagacaaacaaagaaaaagtgcatgattcatatattcttccggacatctctgccagtgatcacagtccccttggtctcgtgctgaagctgtaggctgtatcacacaggctatgccaaacattcagtctgaagcctgtgccatatttctcagacagcgatgtttattcctgatggtttctggttcgtgcagatccctggcaggaacaacgacttttgtcagactattagtgaaacaaggctttgtaacgcactgagcagatttgactattagtggacaacttactgttagcaaagctgcacctttgtagtgtaaatatgcggccatatcttgtgctgcacttgtgcagctcaatatgagcagcgggggaagctcattacctggttatggaattatgatactgaccttaacctattgaggtctttaaactatctgatcatgtgctgtgccgctgatggcgtcagaaaataactgtgccatgcaatttcacgcatagccgaaactgttcttggacgttactgtgtgcttggtaaactatttc

SEQ ID NO: 78280 - DNA, 2149 bp, Zea Mays
ggcaccgtggcacggccactcaggtaccggcaggccattggccacagcccgctttactcacgacgcgacgaaccgcgcactccttttaaagctccacgttgcggtgtcctcacgggtcacggcgaccgatgccgctgctgctgcgcggcgcctccctcctccgcctctgccagtgtaccagtgggctctcaagtgtgaaatttagttcaagagtaacggtactagtgaatctcaacgccatgagggacggaatgcgggccacatattcacgtagagctgcctctaagaacagtgaggtcaagaaagatgagcagccagtcacagagaaggttagtagagctgcctctaagaacagtgaggtcaagaaagatgagcagccactcacagagaaggaagatgctgctgaaactgatttggaggtggagcgagggaggagcagcagccctagccagctccaatcaatgactgtcaaggagctcagggagctcacgaggaggaggggtatttctgtgaaaggtaccaagaaagatttagtatcagcactgatgaattctatggccgtggaagcaaatggtgaagggggaaagtcatccgttgagctggttagccccttggaagtacctttgaaaagaaaaggtggtgcttctgttgtggttgaacaaaaactagaaagttctgagatcatttctgaaacacctaacaagaaaagtagaacaaaacaaaaatcaagcaagaacaccactcgtgaggaaatttcggtgactaatgtcaagctaagtaagactgttgtccagaaggaaacagttgccgtccaaggtcctgttcctaatgcaggattaagtcctgatgatgattcagagccttggactatactcgtgcataagaaaccacaagccagctggattccatacaaccctaggactatgaggcctccacctctaagcaaggatacacgggctctgaagattatgtcatggaatgtcaatggattgaaagcattgctcaaatcaagaggcttctctgtgcagcagttagcacagagggaggactttgatgtgctttgcctccaagaaacaaaaatgcaggagaaggatattgaagttattaaggacactttgcttgatggctacacaaatagtttctggacttgcagtgtgtcaaagcttggctattctggcactgcaataatttcaagagtcaaaccactgtcgatcaagtatgggcttggtatatcagaccatgatactgaagggagggttgtgactgtagagtttgatgacttctacctgttaactgcttatgtaccaaactctggtgatggtctaaaaagattgacttacagggtcacagagtgggatccatcccttggtaactacatgaaagaattagagaaatcgaagcctgtcatactaactggtgatcttaattgtgcgcatcaggagattgatatacatgaccctgctggaaatcgtagaagtgcaggcttcacaaacgaggaaagagaatcatttgggaccaattttttgtccaaagggtttgttgatacgtttcggaaacagcatcctaatgttgttgcctatagttactgggggtacaggcataatgcccggaagacaaacaaagaaaaagtgcatgattcatatattcttccggacatctctgccagtgatcacagtccccttggtctcgtgctgaagctgtaggctgtatcacacaggctatgccaaacattcagtctgaagcctgtgccatatttctcagacagcgatgtttattcctgatggtttctggttcgtgcagatccctggcaggaacaacgacttttgtcagactattagtgaaacaaggctttgtaacgcactgagcagatttgactattagtggacaacttactgttagcaaagctgcacctttgtagtgtaaatatgcggccatatcttgtgctgcacttgtgcagctcaatatgagcagcgggggaagctcattacctggttatggaattatgatactgaccttaacctattgaggtctttaaactatctgatcatgtgctgtgccgctgatggcgtcagaaaataactgtgccatgcaatttcacgcatagccgaaactgttcttggacgttactgtgtgcttggtaaactatttc

SEQ ID NO: 78281 - DNA, 2321 bp, Zea Mays
atgggtctctctggctccggtgccgtcgcgtcgattgtgttcctcggcctctgcgccaccgtgtcgtgctggcctgcaccgccgccaccggagatgctgcacgagagcttcgcagggaagtcggagttcaggacggtgaaccggaggaggctgtcctcgtgctccaacccgagcccgtacctgtcgatcaacgtgagcagcggcggggcgccgctccccgacgaggcgttcctcacggtcaccgtggccggcgtcctcagacccgacgccgacgactgggtcgcgatgatcacgccatgcagctccagtgtctccgggtgccctttgagtggtgttaactacgtccagaccggcgatctagcgcatctcccgcttctgtgccactaccccgtcaaggcacagtacatgaagcgcgaccctggctacctgggctgcaagaccgcggcatgccagaagcgcgacgcgtcgggcgcctgcagtgtccgcacctgcgccgccaccgtcaccttccacgtcatcaacttccgcaccgatgtcgagttcgtgctcttctccggcggcttccggacgccgtgcgtcctcaagcggtccggcgcgctccggttcgccaaccccgccagcccgctctacggccacctctccagcaccgactccacggccacatcgatgaggcttacctgggtgagcggcgacgggaggccgcagcaggttcagtacggaggaggcaagtccgctacttctcaagtggcaacgttcacgcggaatgatatgtgcagtagccccttgttaccaagccctgccaaggatttcgggtggcatgaccctggctacatccacacggccgtcatgaccgggctccagccttctcaatcctacacctaccgttacggaagtgattccgtgggttggagtgacacaaacacattcagaatgccaccagctgcaggctccgacgagacatcatttgtgatctacggtgatatggggaaggctccgctggacccatcagtggaacactacattcaggcagtggctaaagaaatccaaacaggaaaggtcaattcagtcttccacataggagacataagctatgccacaggctttctggttgaatgggatttcttcctaaacctcatagcaccactcgcttctcgagttccctacatgaccgctattggtaaccatgaaagggattatgcagagtctggttctgtatatgtgaccccagattcaggtggcgaatgtggagttgcatatgagtcatatttccgcatgccagctgttagtaaggataagccatggtattcaattgagcaagggagcgttcactttgtcgtgatgtcaactgagcataagtggtcagagatgtcggagcagtacaaatggatgaatcaagatttgtcatcagtcaatagatcgaggacaccatgggtaattttcattgggcatagaccgatgtactcatcccatgtcggaataccagttaatgtagatctagcatttgtagcctccgttgagccactcttgctcaagcaccaggtggatttggttttctttggccatgtacacaactatgagaggacttgtgcaatatacaagaatatatgcaaaggcaagccaaagaaggatgaaagtggaattgatacttatgacaacagcaaatatactgcacccgttcatgccactgttggagctggaggatttagcttggacaagttccctaggattgtgttgaacaagtggagcttatcaagagtttcagaattcgggtatgccagggtgcatgccacaagaggtgatatgctggttcagtttgtaagctcaagtacgatggaggttttggaccaatttagatttgtgaagccagatccggcaaggaggctaaggaacaagccagtttaaccgtagctgcaatgcatgcaaaagatggagctggagctacttccttatattattgttatgctatatataaaagatggcgttgaattacacatcagcgtgtttcagcgtgttgtctaggttctatacttatatgtgtagtgtatggttctttatgacatttccacatgatagttctttctccctctgaagtatattgatccacaagtgtcattttgtagttgtagctaacagcctaacaacggctcctgaacttaagttataatttacagttttgtcagttctgaaactacaggaattaaaaccagcgttccaaacagggttcctggacttaagatctagaagaatatgtttccaagtgtagtatttaacattcatcatatcgatgaacatactcaataatgttatgatcaacattcaat

SEQ ID NO: 78282 - DNA, 1199 bp, Zea Mays
caaaatacagtgtcgatgcaaaaatgctctaagactggacttcttctgcgaagactgtacactctccctggatcggtttctgtggccaaggcagtggctaaagagatccaaacaggaaacgtggactccattttccatataggagacatcagctatgccacaggattcctggtcgagtgggacttcttccttcacctcatcacgccactggcctctcaagttccctacatgacagctattggtaatcacgaaagggattacgcgagctctgcatctgtgtatgtgactcctgattcagggggtgaatgtggggttgcctacgaatcatacttccccatgcctgctgttagtaaggataagccatggtattctattgagcaagggaccgttcacttcattgtgatgtccactgagcatgagtggtcggagaagtcagagcagtacaattggatggacgaagatttgtcatcggttgatagatcaagaacaccgtgggtgatcttcattggacatagacccatgtattcctcccatggtggtatactgcccaacgtggattccaactttgttgcctctgttgagccactcctgctcaactaccaggtggatctggttttcttcggccatgtacacaactacgagaggacttgtgcggtataccaaggcaattgcaaaggcatgccaacgacggacaaaagtggaattgacgtttatgacaacagcaactacaccgcacctgttcatgtcattgttggagcaggagggttcagcttggacagcttccctaacaaaggggaggcctggagcttatcaagggtttcggagtttggctatggcaaggtgcatgctacaagaaccgatatgctggttcagtttgtaaactcaagttcgatggaggtacgagaccaatttaggattgtgaagggagctccggcaaacaagtcactgagcctgataattcaataatagctgtcgctcacaacagaaagaagattaactggacctacttctcacctttttttgaagaatactatttatttttgtactgtaaataccatattattgtatagtatagatgttgtgtatctacaacatttacattaataaacgacccttgttaaaatactttcttactagttcatcagctcatgcggaaggagacataagcattatttaatgtttaattccatctactaaag

SEQ ID NO: 78283 - DNA, 548 bp, Zea Mays
gaaccatactcataactctcattttattacgcgagcgatcagtacaatgacggagccagaaacagcattagctcattacgggcatcgaaacaacaatcaccgtcaccctagatcagccggagggccggcagcgtcgtagcagcactcggggtggtagaagcagcacgcgggaacagactccagggccgtgggtccaggcccaggcctgccctgcaccgccgtcgccaccatcgccatgacgaagcagaccttcgcgacgaggagaaccaggaacgcacggaggctgtggttcgccatggctggcctcgataggtcctccagggagcgccgccgatgtgctaaccctatataaataaggggaaatgaaccggccttgtgtgaacctgggtgggtttattgccgtgacgaacgacggatggcaaatgagctggcaatgaagcacatacgagggccaagatactacgcatcggctgtgggctgtggcagcgtggctatgcaacagcttaagctcggctgacccatgtccgggccgaaggagtagggagccg

SEQ ID NO: 78284 - DNA, 2277 bp, Zea Mays
gtttgcttgatatgaatatttttatatgtgtcttaagtttatatattgataccatttttatataacaatagtttaatggttctttattttaaatttgccccgggctcctaaaccatccggcccgccgctgttccatacttaccagaccagtctgaccctcccatagcttgccgagccccgtttagagaaacaagcgcacggacctgttagatacggcctgattttttaaccgtgatcttcactgagcccgtacactagtcctcatccggaaaaaagtatcaactcccaaactctcttcctttgccggcctcgtcgcgcgcccggctcgcctatatataaccgtctcgcctcccacctcattcatcaaacggactcacagctcgcagcacctgcaggacattgagaaccagccagctaaccaaccaaccaaccggcggagccaaagccaagaaggaaggcaacgtgcccatccagtcaggatgtgcaactccaacgtcaagtccgcgggggtggcccagatcgacggccgcccggtgctgcagccggcgggcaaccgcgtggcggcgccggagccggacgcctcccgcccgctcaagaagtccctccagaagtcgctctccatgccggtctactacgacagcaacgccaccgcgggcgcccgtcctgcgccggccgagaacaccacccgtgccgcggctaattcgtctccgctgcctcccgcgaaggcggcgacgaaggcagcgggcgctttccccgcggagaagagcggcaggtccaaggcggccaggaggccaggcgccgtgccgccgccggtggtggcgttcgcggcgctggaggcgttggagccggcggggagcatcgccgcggcgcagcgggagcacgccgcgcaggcgcaggcgcagcgcaagctgcggatcgcgcactacggccgcaccgcgtccttctcccgggtggaggggcgagtagtcggcgccgcggccgcggccgccgagcgggccgtccccgcctcccccaccgggcacgacgagaagcgctgcagcttcatcacgccctactcagaccccctgtatgtcgcgtatcacgacgaggagtggggagtgcccgtgcacgacgacgagttgctattcgagatgctcacactgtctggcgtgcaagtcggggccgactggacttccatcctcaagaaaagacacgtctacagggaggcgttctccggcttcaacgtggatgcggtcgccaagtacaccgagaagcagatggcgtcgctgagcgccgactacgggctggatttgggcaccgtcagaggaaccgtcaacaacgcctgccggattatcgaggtgcggagggacttgggctcgctggacaggtacgtgtgggcgttcgtgaacaacaggccgctgtcgccgagctacaagtacagccggaagatcccggcgaagacgtccaagtcggagtgcatcagcaaggacatggtccggcgcaggttccgcttcgtcggccccaccgtcgtccactccttcatgcaggcggtcggcctcaccaacgaccacctcgtctcgtgcccgcgccaccgcgcctgctccgccgccgccgttaactgattctgctgaccaccgtccaccgatcgagagccagacgtaaggaagaagagagacctttatatataaggacacgtacaatacaaccgagaaaaaagagaaaggtagtagcctctagtagcactagaagtagtacgtagtatacggaagggagagtgctggtttgcaattgtgtgtacgtacgagtacgatgatcgagtgtgcttgtgtagattgattacgcccccacccctaattagtcaatgaatgagcttgcttgctgcgacttccgcctgcacactgcagtgtgcagtcattgttcgcgtgaggcggttagctgcaggcgtgcgctctcctcctctcaacaagctaggctgcgcagatagtgatgtgatggatggggagatgatgatgatgatgattatagagagaagcccggccgtgtgggctacctgcatgtggccaagctctgattaaaagcgcgataacagcactctcacggcaggcaggcaggccatgtggtgtggtgtcgcaggcaaacgcatgtgcgacgaagacagagagggagagacggaaacgcagggagaagagcgggaaggaaagggggactagctaggaaaggcccgctttgccggccgcgcatgtgaccctgcagctcgcgtaccttttccaatcctcaaagtgggaggacggatcggac

SEQ ID NO: 78285 - DNA, 1680 bp, Zea Mays
ctgtccttattccgtccggacaccgacgaatgaactcgcggtgccgcggcgggaacgggtgcaaggtcggcgacgacaacggcagcctgatgctgatgtgggaggacggcttctgccggccgcgggtggcggagtgcctggaggacatggacggcgaggacccggtgcgcaaggccttcatcaagatgtccatccagctctacaactacggagaagggctgatgggaaaggtggcctctgataaatgtcacaaatgggtcttcaaggaaccttctgaatgcgagcccaacatctccaactactggcagagctctttcgacgcacttcctccggaatggaccgaccagttcgcatcaggcatccagaccatagctgtgatccaagccgggcatggcctcctgcagctgggctcctgcaagattatacccgaggacctgcacttcgtgctgcggatgcgacacatgttcgagtcactcggctaccagtcgggcttcttcctctcccagctcttctcgtcctcgcggggcgcctcgccgacgccgacgccgccattcccgctcaagcagccgccagcagctccggccgcgcgcgccccgccgcagctcttcagctggccgggccaccaccagccgcagcagctcccgtcgcccgcgggagcgtcgccgctcttcccgcccggcccgggcgcgttccacccgtcctccgcgcgcccaatgccgccgttcccaggcggcaaggacgagggccacatgttccacctcccgccagcggcgcaccacggcaccaacaagcagccgccgcagcacatggacgagcaccaccaccaccagcagcagccgatggtgggggccggcggcgacgcgcccgacggcgacctccgctggcccaacgggctgtccttcttcaccgcgctcaccgggcgcgcggacgacgcgaagctgcttttcggcggccccggcgctggcgctggcgctgcggacgacgacgacaaggcggcgccggacgcgcacggcggggccgagaacgtggaggagtacctcagcctggagagccactccaacaaggccaggaaggtggagagccccgcggcccagagcaccaacaagttcaagaggagcttcacgttgcccgcgcggatgagctcgtcctcgtccacgtcagcgttcccgtccgtgtcggcctccacggcgccgccgcagcagcagcaagcagggatggagtatcgagggccgcacgagggcggcgtctactcggacctcatggagacgttcttggagtagctatagctagctagatcccgtagcatgcatgatcgatcggttcagggtcacacactacgacaagcgtacgctgctttttgtttctcaccgccctccgtcccaagctttgtttcaggtttggagttttaatcgcataatatgtttaattagatttgtgtgtgtatttttttaattttcatcgtgtttcccccctattccagtagttgtcgtagctgctagctagatcgtaatgcacaaaaaaaatggtggagtacatgcatgcatgcatgcaagaagagcatgagttgcttccattatcatgactggctggcaactctgtggtgcaaccgccatggcgccatgatgaggaggtacaatgatatgcaacacccaataatatgggctttttgtcgcgaaaagc

SEQ ID NO: 78286 - DNA, 2654 bp, Zea Mays
aggccgcaaacggagaagagacacgggagagagggagggctcgctagctaaacaataaccctcactctctactctctagctagctagcctctcagctcagctgtggtggggagaaagaccggaccggaggagagggcgatcaagaaaggttaccggccggcctagaggtagctgctagagccgccgagctcgatcgtccgactccgagagctagcttccgcttccgcttccgcccagggcagtagaagcgtttttacggcaacgctagctatagctagcgctgagagagagagaggtggaagtaacaaggccggtagagcaggcggaagcgagggagcggcagctgcaggcaggggtgggggcagcaaaatggtgggctccggcgcggctgggggcggagcggatcacgcgcggagcaaagaggccgcggggatgatggcgctccacgaggccctccgcaacgtctgcctcagctcggactggacgtactccgtcttctggaccatccgtcctcgcccgcggtgccgcggcgggaacgggtgcaaggtcggcgacgacaacggcagcctgatgctgatgtgggaggacggcttctgccggccgcgggtggcggagtgcctggaggacatggacggcgaggacccggtgcgcaaggccttcatcaagatgtccatccagctctacaactacggagaagggctgatgggaaaggtggcctctgataaatgtcacaaatgggtcttcaaggaaccttctgaatgcgagcccaacatctccaactactggcagagctctttcgacgcagtacgtaacgtacccccatgcatcttcgtcgtcatcatcagctgtgccccctctgcactgcatctttctctttctgcagtctctctgccacccctgctgctttgggttaagcttccatgcacgccacagtagagtagatgatactacggaacgaacgagcagctcctccatccctgctcatcgaatgtacttgcatctcttgtggcacagtgctgccagccatgccctgccctgccctgccctgccctgccgggtgcgtgttggcatggcccgccaggtttacaggacagcaccgtggtggttttttttggagtttttacttgcattttgcacccatctatatccttgaaaaagaagagaagaattggatgctacatctgtgtaccaatcaatcgcctgtcaccaagaatcaaacgccacgaaacaacgcagtaataacctttattcctgcgccgctcttacccaattcccctgtcggcttttgctgttgcagcttcctccggaatggaccgaccagttcgcatcaggcatccagaccatagctgtgatccaagccgggcatggcctcctgcagctgggctcctgcaagattatacccgaggacctgcacttcgtgctgcggatgcgacacatgttcgagtcactcggctaccagtcgggcttcttcctctcccagctcttctcgtcctcgcggggcgcctcgccgacgccgacgccgccattcccgctcaagcagccgccagcagctccggccgcgcgcgccccgccgcagctcttcagctggccgggccaccaccagccgcagcagctcccgtcgcccgcgggagcgtcgccgctcttcccgcccggcccgggcgcgttccacccgtcctccgcgcgcccaatgccgccgttcccaggcggcaaggacgagggccacatgttccacctcccgccagcggcgcaccacggcaccaacaagcagccgccgcagcacatggacgagcaccaccaccaccagcagcagccgatggtgggggccggcggcgacgcgcccgacggcgacctccgctggcccaacgggctgtccttcttcaccgcgctcaccgggcgcgcggacgacgcgaagctgcttttcggcggccccggcgctggcgctggcgctgcggacgacgacgacaaggcggcgccggacgcgcacggcggggccgagaacgtggaggagtacctcagcctggagagccactccaacaaggccaggaaggtggagagccccgcggcccagagcaccaacaagttcaagaggagcttcacgttgcccgcgcggatgagctcgtcctcgtccacgtcagcgttcccgtccgtgtcggcctccacggcgccgccgcagcagcagcaagcagggatggagtatcgagggccgcacgagggcggcgtctactcggacctcatggagacgttcttggagtagctatagctagctagatcccgtagcatgcatgatcgatcggttcagggtcacacactacgacaagcgtacgctgctttttgtttctcaccgccctccgtcccaagctttgtttcaggtttggagttttaatcgcataatatgtttaattagatttgtgtgtgtatttttttaattttcatcgtgtttcccccctattccagtagttgtcgtagctgctagctagatcgtaatgcacaaaaaaaatggtggagtacatgcatgcatgcatgcaagaagagcatgagttgcttccattatcatgactggctggcaactctgtggtgcaaccgccatggcgccatgatgaggaggtacaatgatatgcaacacccaataatatgggctttttgtcgcgaaaagc

SEQ ID NO: 78287 - DNA, 2260 bp, Zea Mays
aaagctggccgtagaaggggatgggggacccgggcgggccgcttttacttttggcgctgccaacttctgggccgcccgccaattcacagagaggagaaaaaaaaaaccaagaaaacatgcatggggtgccgtgactcttctccgccctccctcgcctttcggtttaccctccccttgcccaagttaaaaacagcaatcagagagagagagagagagagagagagagacaggccgcaaacggagaagagacacgggagagagggagggctcgctagctaaacaataaccctcactctctactctctagctagctagcctctcagctcagctgtggtggggagaaagaccggaccggaggagagggcgatcaagaaaggttaccggccggcctagaggtagctgctagagccgccgagctcgatcgtccgactccgagagctagcttccgcttccgcttccgcccagggcagtagaagcgtttttacggcaacgctagctatagctagcgctgagagagagagaggtggaagtaacaaggccggtagagcaggcggaagcgagggagcggcagctgcaggcaggggtgggggcagcaaaatggtgggctccggcgcggctgggggcggagcggatcacgcgcggagcaaagaggccgcggggatgatggcgctccacgaggccctccgcaacgtctgcctcagctcggactggacgtactccgtcttctggaccatccgtcctcgcccgcggtgccgcggcgggaacgggtgcaaggtcggcgacgacaacggcagcctgctgatgggaaaggtggcctctgataaatgtcacaaatgggtcttcaaggaaccttctgaatgcgagcccaacatctccaactactggcagagctctttcgacgcacttcctccggaatggaccgaccagttcgcatcaggcatccagaccatagctgtgatccaagccgggcatggcctcctgcagctgggctcctgcaagattatacccgaggacctgcacttcgtgctgcggatgcgacacatgttcgagtcactcggctaccagtcgggcttcttcctctcccagctcttctcgtcctcgcggggcgcctcgccgacgccgacgccgccattcccgctcaagcagccgccagcagctccggccgcgcgcgccccgccgcagctcttcagctggccgggccaccaccagccgcagcagctcccgtcgcccgcgggagcgtcgccgctcttcccgcccggcccgggcgcgttccacccgtcctccgcgcgcccaatgccgccgttcccaggcggcaaggacgagggccacatgttccacctcccgccagcggcgcaccacggcaccaacaagcagccgccgcagcacatggacgagcaccaccaccaccagcagcagccgatggtgggggccggcggcgacgcgcccgacggcgacctccgctggcccaacgggctgtccttcttcaccgcgctcaccgggcgcgcggacgacgcgaagctgcttttcggcggccccggcgctggcgctggcgctgcggacgacgacgacaaggcggcgccggacgcgcacggcggggccgagaacgtggaggagtacctcagcctggagagccactccaacaaggccaggaaggtggagagccccgcggcccagagcaccaacaagttcaagaggagcttcacgttgcccgcgcggatgagctcgtcctcgtccacgtcagcgttcccgtccgtgtcggcctccacggcgccgccgcagcagcagcaagcagggatggagtatcgagggccgcacgagggcggcgtctactcggacctcatggagacgttcttggagtagctatagctagctagatcccgtagcatgcatgatcgatcggttcagggtcacacactacgacaagcgtacgctgctttttgtttctcaccgccctccgtcccaagctttgtttcaggtttggagttttaatcgcataatatgtttaattagatttgtgtgtgtatttttttaattttcatcgtgtttcccccctattccagtagttgtcgtagctgctagctagatcgtaatgcacaaaaaaaatggtggagtacatgcatgcatgcatgcaagaagagcatgagttgcttccattatcatgactggctggcaactctgtggtgcaaccgccatggcgccatgatgaggaggtacaatgatatgcaacacccaataatatgggctttttgtcgcgaaaagc

SEQ ID NO: 78288 - DNA, 1565 bp, Zea Mays
gcagaagctgtctgtttggcagaacttcagcttaaatttgtgaagaagctgaaaataagctgtgccaaacaggacctataaacaatagaccatgaaaaatagccaccgatgaagctagcggcagcctgcggactgtagaggcagaggagggctcccaagtccaaggtggataagttttctagacacgcccttttccggtttccccattcccacccagaccccactaccattaccaaccagagcgacaagcccgaccgcccgcttccttgcaaacgaaacaaaacaaaacaatggcgacagcgagtgagatcgcggcggtgggcgtaataggcgcggggcagatgggctcgggcatcgcccagctcgccgccgccggaggctgtgccgtacttctcctcgacgccgaccccactgccctctcccgtgccgtcatctccatctccgcctccctacggcgcctcgccgccaagggccagctctcccaggccgcgtgcgaggactcaataaagcggataaggtgcgtctccgccgtgcaggatctcagggacgcggatcttgtgatcgaggccgtcgtggagaacgaagctgtcaagaagaagctattcgtggagctggataaggtcacgaagccctcggccatcctcgcctccaacacgagctccatctccataacccgcctggcttcagctaccaaacgcccctctcaggactgcaggtgataggcatgcacttcttcaaccctcctccggtaatgaaactgatcgagattatccgaggagccgatacgtcagatgaggtgtttgctgcggtcagatctttctccgaaagactcgggaagtccgttatatgctcgcaagattacccaggattcatcgtgaaccgcatcctcatgccgatgatcaacgaggccttctgggctctgtacaccggagtggcaaccaaagaggacatcgacgcagggatgaagctgggcacgaaccacccgatgggccctctgcagctcgccgacttcatcggcctggacgtctgcctctcagtacttcgggtactccacagcggcctgggagatagcaagtacagcccctgccctctcctcgttcagtacgtcgatgctggccggcttgggaagaagcgtggagtaggcgtgtattcgtatgggcacaggccttcgtccgtcaggccgaagtcgtctctgtaggcgtgagagcaaactgttgggcgaataaaaccaggtgcgtgttgcaattgcacgtcagagaaaaagggagcacagcctagttcagaggtactcagtcggacgcttcaggtcgtgtagattcgtaatggcagggtttgctgctctatgtagaaaagatggttcagtgtttttaatctgataagtggaagtcatgaaacatttccgcagtttgcgttctgctcgagagggtgggagaaacagaaaagctatacttcttttgtattgtaatcctctgtaaactacaaacagacagatctcactctctgaaccggtaaaggaaaccaatgagtttctattgtgaaaaggtgcaacgtagatggtgagtcca

SEQ ID NO: 78289 - DNA, 540 bp, Zea Mays
aaaaaaggcctattatgttatgacgtgaccctcatgacatctctgcttcggccgagttccatgttcgtggaggacctggtgctccagcaaccctacaccaaggaaaggtacggctcggcgcgcaaggtctacgtcgtgtgcacggaggaccacgccatcgcggaggggttccagcgctggatggtggagaacagccccgtggacgaggtcagggagatcgtggcggaccacctcgtgatgctctccaggcccagcgacctggtgcgctgcctcgctgacatcgccgacaagtacgcttgacgacgctacgctcttcagcgcaattcgcccgcgtgctgttctcattttgccgcatttcagtttaatatttccccgctgtttccgaatcgagattggccagaattctcgacgcacggtgtgaaatcgtgtataataataataataatgctattgatgttttctaatatatagcaggtattttgtaacacttggttttaaggataaaactgaatccattagtacgtgtgctcaaaatgctta

SEQ ID NO: 78290 - DNA, 725 bp, Zea Mays
cttggcgtgtgtgtcattttcttgatgtgcggccgatgggtcgatgacgtaccgatgcctgctagcttcttttcgtggaggggaagtggctggagtggatggacacagagttgaaaccccaggacggcgaaggcaagctccccacctctatgctgttcgggccccggatcatccgagagaagttcacccagctctgctcgcccgaggacgtgaccctcatgacatctctgcttcggccgagttccatgttcgtggaggacctggtgctccagcaaccctacaccaaggaaaggtacggctcggcgcgcaaggtctacgtcgtgtgcacggaggaccacgccatcgcggaggggttccagcgctggatggtggagaacagccccgtggacgaggtcagggagatcgtggcggaccacctcgtgatgctctccaggcccagcgacctggtgcgctgcctcgctgacatcgccgacaagtacgcttgacgacgctacgctcttcagcgcaattcgcccgcgtgctgttctcattttgccgcatttcagtttaatatttccccgctgtttccgaatcgagattggccagaattctcgacgcacggtgtgaaatcgtgtataataataataataatgctattgatgttttctaatatatagcaggtattttgtaacacttggttttaaggataaaactgaatccattagtacgtgtgctcaaaatgctta

SEQ ID NO: 78291 - DNA, 835 bp, Zea Mays
gagagctcgtctggaacgaccgaccactcgcaaaagctagtagcagaggacaatactgatggctggccaagagaagaagagatctcgaggaagcgcgccaccaaccactgtcgtagctgtagcctcgatcacttgccgccgcagccccgaagctcgacgtcgtcgcctcgggataaaaatgttcgtggaggggaagtggctggagtggatggacacagagttgaaaccccaggacggcgaaggcaagctccccacctctatgctgttcgggccccggatcatccgagagaagttcacccagctctgctcgcccgaggacgtgaccctcatgacatctctgcttcggccgagttccatgttcgtggaggacctggtgctccagcaaccctacaccaaggaaaggtacggctcggcgcgcaaggtctacgtcgtgtgcacggaggaccacgccatcgcggaggggttccagcgctggatggtggagaacagccccgtggacgaggtcagggagatcgtggcggaccacctcgtgatgctctccaggcccagcgacctggtgcgctgcctcgctgacatcgccgacaagtacgcttgacgacgctacgctcttcagcgcaattcgcccgcgtgctgttctcattttgccgcatttcagtttaatatttccccgctgtttccgaatcgagattggccagaattctcgacgcacggtgtgaaatcgtgtataataataataataatgctattgatgttttctaatatatagcaggtattttgtaacacttggttttaaggataaaactgaatccattagtacgtgtgctcaaaatgctta

SEQ ID NO: 78292 - DNA, 1493 bp, Zea Mays
agcccgccgcgacgtgtctcccgctcccgcgcgcccctttccggtgagcggccgccctcggctttccgctttccctcctctccctccctgccctgctgtgcactgctcggttgttcggtggccattaatttgcacgctgccaaaaatcacgcagccctcacgctttctggctcctcctcccctcctccgccgtcaggctcgccgcacagcggttttacactgtttcgacttcgcctcttcctccgcgtccgcgaccgcgaccgcgcgcgatagaccaaacagcacgggtcaagggccgaccggttcaagtctcggcggcgactcggattccactcgaccacgcggacgccatccgtgacattcaagtcccttgccgcgttttacttggccgctgagacctgagtctatcgggacacgagcagagttgcagagcggcagggaggttgctggtcgcgcggcttccaaccaactccatccatggacctcgcccggcgggaggcggacagggccgccgcagcggagttcgtggctctcgacatccggggcgagggggagtcgcctgcgaacgacccggaattgctgatggaatcctcatttgtcgccgctaaggagttcgagcgggatcggagaggagacgtcatttcttcctcctccggtgcgtatgagaagcagacagtgcctgtgcatgttgatgactgcccgagggaacacttacagccctccacgccaactgcaggtggtggtgcaaagcgtcgtcgttccagccgtcgtgttctgggatggcgtgatcccaggaaaatactcttcgcctttgcagcattcgtgggcactttgattctgctctactttacactctctatggggaagatgacaggaggtcaagctgatggccagtgatagccttgctctgtcttgcttgcaatagcattactaatatttatttgtacagaagaaactgaataactggctgctttctaatgtagtagccaccacatccctgcgtatatcttcatgatttcctgattttagatgtttgtacataggcacaggaaagttgtattacagatacagttttaagtgaaaagcttcttctcatgaggagcgttgaacagtccattttgagatgctagttaccggctgaaacaatgtttcttatttccaatatcgaagtctgtataagtggctgttgtttgagaaatttcagagatactatccaaagttccagacaccttggttcgattttttattttttttgtttcgaaaagttacagacacttttttttttttttttgctgtggcggtgccggtgctagtcacattttttttaaaaaaaaatggggaccacttctggacaaacttatggtgaaaatatgttttgattaatctgaattgtaaactcgtcaatcctcggataatgtttgtgtaattgctgtggtgttttaaaagtaaaacaaagtctgctggagtggcacgggagctgaaaaaaaaaagaa

SEQ ID NO: 78293 - DNA, 887 bp, Zea Mays
agcccgccgcgacgtgtctcccgctcccgcgcgcccctttccggtgcgtatgagaagcagacagtgcctgtgcatgttgatgactgcccgagggaacacttacagccctccacgccaactgcaggtggtggtgcaaagcgtcgtcgttccagccgtcgtgttctgggatggcgtgatcccaggaaaatactcttcgcctttgcagcattgtccagcgtgggcactttgattctgctctactttacactctctatggggaagatgacaggaggtcaagctgatggccagtgatagccttgctctgtcttgcttgcaatagcattactaatatttatttgtacagaagaaactgaataactggctgctttctaatgtagtagccaccacatccctgcgtatatcttcatgatttcctgattttagatgtttgtacataggcacaggaaagttgtattacagatacagttttaagtgaaaagcttcttctcatgaggagcgttgaacagtccattttgagatgctagttaccggctgaaacaatgtttcttatttccaatatcgaagtctgtataagtggctgttgtttgagaaatttcagagatactatccaaagttccagacaccttggttcgattttttattttttttgtttcgaaaagttacagacacttttttttttttttttgctgtggcggtgccggtgctagtcacattttttttaaaaaaaaatggggaccacttctggacaaacttatggtgaaaatatgttttgattaatctgaattgtaaactcgtcaatcctcggataatgtttgtgtaattgctgtggtgttttaaaagtaaaacaaagtctgctggagtggcacgggagctgaaaaaaaaaagaa

SEQ ID NO: 78294 - DNA, 1712 bp, Zea Mays
atggcgctgcagcctgcgggcgtaggaaaacgcaacgcggggtcaggttcatttggcgtggcgtcggcgtcgccaccgttgtcgcagacgccgagacaagagaaaaagcgcaatgaatgtacggttcaggccgatgtgacaaggacatggcgtcggcgcatcgcttgcccggacccggtgggcgcagcgcagggaggaggaccagcacttgtggcttgcgtctgcctccgccacgacaagtttcttgttgagttctctgttgtgttatatccaatgtgtgttttttcttcccaatttatagcatccaagatactttcgatgcttcttgccttcttccgcggtgtttatttgacacaagtctgtcaaggcaggacaaaatctgaaacgggagctggacgacggggctatagctatacgcagcaagtcagcattcaagggaccagtggatgcctgactggtaacttcgtggtagagtttaaacaccagacgagacgactgtacatactagagagtgatgagctagctactctttgtgtgctacctacatcgacacatctttctccgatgtcgtctgctcagctggtccgaagcccgacggtgaatgagacacccacccaaggcacgcacgcatctctgcacagaaacatggacggacaaatacatccgacccaacgtgtagctcactcacacaaacagagcagcagcagtcgaaaggagagaagaatggttggttggttaatttaccagcactaacaatgagacggtgtgtttaattaagcaagtactagtaggctagggtttgcagatgaccacgaagcacgggagcagcgccctcgggttcagcaggtacagctcctcgatgttggagtaggggccgaccttgccggcgagcgagtcgaagcccatcgtctgccccgcgaactccttgaggttgtccagcggcttgtgcacgcggccggcgatcaccctgcacaccagcagcgccctgcgcgtggtgccactgacactgccagcgccagccccgtcggcgccggcagcctcgatggactcgaaagcgcggccgctggtggacgtggtgaacacgcccacgccggtcttgccctccttcctgccggagaagccgtgccggatgatgcggcacacggcgcacttgtcggaggcgcagaggcgggacgaaccgccgccgccgccgccgccgccgccgagcgcgcacgagagcgtggtgccgtggaagcgcagcagctcgttgccgtcggcgaggcagcgcgggtgcttcttgggcagcttgctcgccctcagcttcacggcctcgcggtactcctcgaagcgggacagcgtccgctgcgtgttgtgcaccttgaacacccgctcgatccggacgcagctgctctccgactttagcaggctcgtccggcagatgatctccacgatcttccgcgacgagtccccttccaccagctccgtcactgcacgcacgcacgcatacagttattgaaattgttctgaaaatctagactcctggttgctgctctgcaaagcatggagttattgagcacgcagacgcagtacatgtacatcacaataaaaaagcatggagttattgagtgtcagcaacaatacaagaaagacgtcagaagctcaccagcactgaagatggagcactgaagatgaaaaagctgaccaacgatactgacgttgccacaacgacggag

SEQ ID NO: 78295 - DNA, 1538 bp, Zea Mays
aacccttcgcctcgcctgtctcaccacagtgtccactgtccagtcgcctagtcgcaaatctcaccccgccgccatggcctcccccgccgccgcctcccccgcgcgccgcctttccgtcattttctcctcgaccaagccacgcgcccgaccacccaaaccggcgccggctccgaaagcgccggccggccaggcggttgcgaaacctgacgagcgctgcgagtcccggaatctcacgaaaatcctgcaggtcatcttccgggagcgcgatccggacaagctggtttcccagttcatcgccgaatcgaccgcgtctgaacgcttccgcaacaagcaccgcgtgtacgacgtggccgtggcccgcctcgcctccttcggccgacacgatggcattgctgccatcatcgactcacagaagccgttcatcgcggcctccagcgtgggcttcgccgcacgcctcatccgcctctgcggccgcgcctccatgccgtcccacgccgccgcgatcttccatgacctcccaccgaagcacaagtcctccatgactttcaatgccctcctcgccgcctacctcgacgccagcgacttcgacgcactcgccaccgcgttgcaggaaatcccggccacacaccccactattgctcccaccatatactctcacaatatactcatcagtgcgctgtgcaagaagccggacctctcggccgccgtggatgtcatcacgctcatggagaagcgcggtattacccctgatatcatctctttcaacattctgctcaatgggttttacagcaatgatcgctttgatgacgtcgagaaagtttgggagatgatgaaggagaggaatgttgagccggatgcgaggagctataatgcaaaactgcggggtttggtttcccaagggagggttgaggatgcagctgcattgattgagaggatgcaaaaggagggaccaaagcctgattcagtgtcctacaacgaactgattcgagggtattgcaatgaagggaggttgaatgaagccaagaaggtatatgataatatgataaagaatggatatgcaccaaataggggcacatttcatacccttgtgccaccacgtactagaaaagacgagggtttgaagatgccgcaacctggtggagaaggcaatgatgtagaagctggaactgattcagaagattctgtatcatatgaagatgggtgcgagcaagaagaggagtcgaaaaatggtcagtgaggatgtacctttgtaatttaagcattgatgtggcatggcgatgcaagctgaatttgctctacttctttgatggcctgatacaacagaattgcctgtgcaattggaattctctcgtactttagtaatatgatggtttattttgcttctctaggttgattggtaaaaactcctccactcattatatacatgatattagaatcaacccctcttccctagaatggcttgttttggcattttttgtcacacgtcttcaatattgttaaatatgtttgtttcaatgtgttttccctatgtatctatt

SEQ ID NO: 78296 - DNA, 960 bp, Zea Mays
aaacacttttctgtgaagtatgaaacataaattagttacatatggattgtgatggtaaagtcgagaacaatattaataattggaagttggaactcagaagaaaaggtactattccatgtatggacatgttggcaaactagctgaagagatccagaaaggtgcctcgtctgttgaaggtgttgaagctaaaacatggcaggtccctgaaaccctccctgaggaagtgcttggaaagatgggcgcaccccctaagcctgacgtgccagtcatcacgccgcaagaactcgcagaggccgacggaatcctcttcgggttcccaacgaggttcggaatgatggcagcgcagatgaaggcgttcttcgatgccactggtgggctctggagggagcagagccttgccggcaagcctgccggcgtcttcttctgcactggatcccagggtggtggccaggagacgacagcgttgacagcgatcacccagttgacgcaccacggcatggtgttcgtgcctgtgggctacaccttcggcgccaagctgttcggcatggaccaggttcagggcggcagcccctacggcgccggcacgttcgccgccgacggctcgaggtggccgagcgaggtggagctggagcacgccttccaccaggggaagtacttcgcaggcatcgccaagaagctcaagggttcagcctgatctacacatatacccttgtcggatatcataaaaaacacttattacagattcgtcttacccatcaatagatcggtctgttctctcgtggtgtctggatgttgtgtggctcagtggaactttcatgctacggtgactttgttgtaatctggagttggaatatcgttgtttcgcataaatttcgatgatttgctcaagtaaacggtttgtttggttcagagcttgttaatccatttgcgttaagaagtcatgtgtttagccaacttgag

SEQ ID NO: 78297 - DNA, 1190 bp, Zea Mays
ccaagatctactgagcatgttgtgctcaagaggagttgtaagcaagaacttaatagaagagtagcactgagcagtgagtggatcgatagcctcgtctccttcaagctgcagtgcttcatgtaggtggttgtttgagggcccataacctcctatgaaggaatcttgacaatgaacctcatttagaagagtcaagaccaacgagacggatctggagtaaagcacaagaagaaaagctcggtgctcctagatttcatactgtcgcagtaacgaatacaatcaacattttttacctgacacttttgagtttcgctaacacaatgacctgttaaactgcaagcattgtgcgtacaatgatttcgggttttcctttcatgtgcaatggacatttgtgcggttgctttttcgttcatttaagaatccagatacaacattcctcactgaatcttgtttttgcccaggtttctgtctcttaaaattggcttgtcaaagaatactatagtttataatttaatattgtatggacgcctttttttgactttataaacaggctggtgtgctttatcatcttcatcaccaagaatttgtatgctgtaagatttttagcttcttttttgtagttgtaggtttatgccattatattttaggcctcctgaaacctcagaatctagcacacatggtcacatgctatatcctgattagtcaattctggtatcggatttctaacgttattctatgtttcaatggttgattatcgactttggtggagacgtgagaagtgcgatactaatcaacgatccaagcacttaaattggttggtaaaccattgaactacataagatgctgagcagaagaaacatcattcctcagatgctcagaaagtcagaatcaaatgtctgatataggaggtgttgggggcatgggtatcaatggcttaatcctcagataagctgggttctggtccctctggatgtacaccggctttgacgaagttttcagtactgtctcaagaagagttacaagcatggcatggcgctggagacgggtggtaagggtgtctggaatggtatttgttggttttgtacagaacttggtggctacagattttgtctagtgcaccagtggaatgaaaattcactttcatttacattcgttttagaaaatagtcaaaccattatatatcgttacttccg

SEQ ID NO: 78298 - DNA, 2983 bp, Zea Mays
tccggtcccgcgcccaatccgccctacccaccatcggatcaccgagcagaaacgatgctccacacaccacacgcggacacgcccgccccgccgcgagcactcccgccccggtcacccccgcccggtcgtcaccatggccgcgctccttcagtcgtctttcctcttccctcacgccaccttccccaaccccaagccccaccacctcgccgccgccgccgccacgagacccgagtcacccaacgtggcccccaatcccgccagcgcccgcctccgccgcctcattgcccgcgaggacctcgccggtgccgcgcgcctcgtcgagctctccgcctcccgcgacggggaggcccccgacgtctacctctgcaccaagctcatccggaacctctgccgccggggccgcacctccgacgccgcccgcgtgctccgcgccgccgagggctccggctcccccgtcgacgtcttcgcctacaacaccctcgtagcggggtactgccgctacggccacctcgacgccgcgcgcaggctcatcggctccatgcccgtcgcgcctgacgcctacacgtacacgccactgatccgcgtgctctgcgaccgcggcagggtcgccgacgcgctcagcctgctcgacgatatgctccgccgcgggtgccaaccaaacgtcgtcacctacactgtgctcctggaggccatgtgcaagaacagtgggttcgagcaggccatggcagtcctcgacgagatgcgcgccaagggatgcacacccaacattgtcacgtacaatgtcatcatcaatggcatgtgcagggaaggccgtgttgatgacgcaagggatctcttgaacaggttgttctcttacgggtgccagcctgacactgtcagctataccaccctcctcaagggtttgtgcgcttccaagcggtgggatgacgttgaggaactatttgctgagatgatggagaagaactgcatgccaaacgaggtgacgtttgacatgctaatcagattcttttgccgaggaggtatggtggagcgggctattcaagttcttcaacaaatgacggagcatgagtgcgccaccaacaccaccttgtgcaatattgtcataaactcaatttgcaaacaaggccgggttgacgatgcctttaagttcttaaacaacatgggttcctacgggtgcaatccagataccattagctataccacagtcctaaagggcttgtgtcgtgccgaacgatggaatgatgccaaggaacttttgaaagagatggtccggaataattgccccccaaacgagcatgccctgcaaaccaaataccatcacatacactactttgctgacaggcttgtgcaacgctgaacggatttctggacgaagcaattgaactcgttgagcaaatgatggaacatggttgcacacccaacctgatcacatataatacattatttgatgggattaccaaggattgcagttcagaagatgccctggagttgttgcatggcttggtcagcaagggagtatcgccagatgtcattacattttcttcaatcattggtatcctctcaaaggaagatagagttgaagaggccattcaaatgtttcacttagcgcaagatatcggaatgagacccaaagctttggtgtacaacaagatactgcttgggctatgtaaaagacatgaaatagataatgctatcgactttcttgcctatatggtatccaacggatgcatgcccaatgagtcaacctacattatacttatcgaaggccttgctcgtgaaggtttgttgaaggaggcccaagatctactgagcatgttgtgctcaagaggagttgtaagcaagaacttaatagaagagtagcactgagtgagtggatcgatagcctcgtctccttcaagctgcagtgcttcatgtaggtggttgtttgagggcccataacctcctatgaaggaatcttgacaatgaacctcatttagaagagtcaagaccaacgagacggatctggagtaaagcacaagaagaaaagctcggtgctcctagatttcatactgtcgcagtaacgaatacaatcaacattttttacctgacacttttgagtttcgctaacacaatgacctgttaaactgcaagcattgtgcgtacaatgatttcgggttttcctttcatgtgcaatggacatttgtgcggttgctttttcgttcatttaagaatccagatacaacattcctcactgaatcttgtttttgcccaggtttctgtctcttaaaattggcttgtcaaagaatactatagtttataatttaatattgtatggacgcctttttttgactttataaacaggctggtgtgctttatcatcttcatcaccaagaatttgtatgctgtaagatttttagcttcttttttgtagttgtaggtttatgccattatattttaggcctcctgaaacctcagaatctagcacacatggtcacatgctatatcctgattagtcaattctggtatcggatttctaacgttattctatgtttcaatggttgattatcgactttggtggagacgtgagaagtgcgatactaatcaacgatccaagcacttaaattggttggtaaaccattgaactacataagatgctgagcagaagaaacatcattcctcagatgctcagaaagtcagaatcaaatgtctgatataggaggtgttgggggcatgggtatcaatggcttaatcctcagataagctgggttctggtccctctggatgtacaccggctttgacgaagttttcagtactgtctcaagaagagttacaagcatggcatggcgctggagacgggtggtaagggtgtctggaatggtatttgttggttttgtacagaacttggtggctacagattttgtctagtgcaccagtggaatgaaaattcactttcatttacattcgttttagaaaatagtcaaaccattatatatcgttacttccg

SEQ ID NO: 78299 - DNA, 3241 bp, Zea Mays
tccggtcccgcgcccaatccgccctacccaccatcggatcaccgagcagaaacgatgctccacacaccacacgcggacacgcccgccccgccgcgagcactcccgccccggtcacccccgcccggtcgtcaccatggccgcgctccttcagtcgtctttcctcttccctcacgccaccttccccaaccccaagccccaccacctcgccgccgccgccgccacgagacccgagtcacccaacgtggcccccaatcccgccagcgcccgcctccgccgcctcattgcccgcgaggacctcgccggtgccgcgcgcctcgtcgagctctccgcctcccgcgacggggaggcccccgacgtctacctctgcaccaagctcatccggaacctctgccgccggggccgcacctccgacgccgcccgcgtgctccgcgccgccgagggctccggctcccccgtcgacgtcttcgcctacaacaccctcgtagcggggtactgccgctacggccacctcgacgccgcgcgcaggctcatcggctccatgcccgtcgcgcctgacgcctacacgtacacgccactgatccgcgtgctctgcgaccgcggcagggtcgccgacgcgctcagcctgctcgacgatatgctccgccgcgggtgccaaccaaacgtcgtcacctacactgtgctcctggaggccatgtgcaagaacagtgggttcgagcaggccatggcagtcctcgacgagatgcgcgccaagggatgcacacccaacattgtcacgtacaatgtcatcatcaatggcatgtgcagggaaggccgtgttgatgacgcaagggatctcttgaacaggttgttctcttacgggtgccagcctgacactgtcagctataccaccctcctcaagggtttgtgcgcttccaagcggtgggatgacgttgaggaactatttgctgagatgatggagaagaactgcatgccaaacgaggtgacgtttgacatgctaatcagattcttttgccgaggaggtatggtggagcgggctattcaagttcttcaacaaatgacggagcatgagtgcgccaccaacaccaccttgtgcaatattgtcataaactcaatttgcaaacaaggccgggttgacgatgcctttaagttcttaaacaacatgggttcctacgggtgcaatccagataccattagctataccacagtcctaaagggcttgtgtcgtgccgaacgatggaatgatgccaaggaacttttgaaagagatggtccggaataattgccccccaaacgaggtaacattcaatacatttatctgcatcttgtgccaaaaggggttgatcgagcaagctattatgcttattgaacaaatgcaagagcatgggtgtacagtgggtgttgtcacatacaatgctcttgtcaatggattctgtgtgcagggccatattgacagtgccttagaattgtttcgcagcatgccctgcaaaccaaataccatcacatacactactttgctgacaggcttgtgcaacgctgaacggatttctggacgaagcaattgaactcgttgagcaaatgatggaacatggttgcacacccaacctgatcacatataatacattatttgatgggattaccaaggattgcagttcagaagatgccctggagttgttgcatggcttggtcagcaagggagtatcgccagatgtcattacattttcttcaatcattggtatcctctcaaaggaagatagagttgaagaggccattcaaatgtttcacttagcgcaagatatcggaatgagacccaaagctttggtgtacaacaagatactgcttgggctatgtaaaagacatgaaatagataatgctatcgactttcttgcctatatggtatccaacggatgcatgcccaatgagtcaacctacattatacttatcgaaggccttgctcgtgaaggtttgttgaaggaggcccaagatctactgagcatgttgtgctcaagaggagttgtaagcaagaacttaatagaagagtagcactgaggttgaagaccaaactgtgcataccctttggctcatgatgaatcctgggattaaatgcttattcattattcacagtgagtggatcgatagcctcgtctccttcaagctgcagtgcttcatgtaggtggttgtttgagggcccataacctcctatgaaggaatcttgacaatgaacctcatttagaagagtcaagaccaacgagacggatctggagtaaagcacaagaagaaaagctcggtgctcctagatttcatactgtcgcagtaacgaatacaatcaacattttttacctgacacttttgagtttcgctaacacaatgacctgttaaactgcaagcattgtgcgtacaatgatttcgggttttcctttcatgtgcaatggacatttgtgcggttgctttttcgttcatttaagaatccagatacaacattcctcactgaatcttgtttttgcccaggtttctgtctcttaaaattggcttgtcaaagaatactatagtttataatttaatattgtatggacgcctttttttgactttataaacaggctggtgtgctttatcatcttcatcaccaagaatttgtatgctgtaagatttttagcttcttttttgtagttgtaggtttatgccattatattttaggcctcctgaaacctcagaatctagcacacatggtcacatgctatatcctgattagtcaattctggtatcggatttctaacgttattctatgtttcaatggttgattatcgactttggtggagacgtgagaagtgcgatactaatcaacgatccaagcgcagcacttaaattggttggtaaaccattgaactacataagatgctgagcagaagaaacatcattcctcagatgctcagaaagtcagaatcaaatgtctgatataggaggtgttgggggcatgggtatcaatggcttaatcctcagataagctgggttctggtccctctggatgtacaccggctttgacgaagttttcagtactgtctcaagaagagttacaagcatggcatggcgctggagacgggtggtaagggtgtctggaatggtatttgttggttttgtacagaacttggtggctacagattttgtctagtgcaccagtggaatgaaaattcactttcatttacattcgttttagaaaatagtcaaaccattatatatcgttacttccg

SEQ ID NO: 78300 - DNA, 2208 bp, Zea Mays
ctctccaccgccggcgtcgtcgatgccctccacctcgggcgctcctcctgcaacagctgtgacagtgttacttgatgaacacagttgtacctctagtgctagaagaaagaccactacacctactagtgcctgggtggcatcaaaggctgtccatctgttaaagaattcaaccatgggaactaaagatttgaggattaggttggaagaaaaatacaagtgtgaaataccttatgacactgtttggaagggaagacaattggcactgaaagagttgcatggtagttgggaagaaagctttcagatgctattcaattggagagcagaggttttgagtcggtctccagggagtatcattgaggtagacattaaagaggtggatggcaaggtatattttcataggtttttttgtgcattgggtccttgcattgaaggttttttagagggttgtaggccatatctaagtatagactctacagcacttaatggtaggtggaatgggcatatggctgcggcaactgctatagatggccacaattggatgtacccagtagcctttggaatcatagacggtgaaactgaagacaattgggtatggttcatgagccaaatgaaaagggctatatgagatctccctttgcttgctgtgtgcacagatgcatgtaaaggactagaaaaggcagttaagcatgttttccctcatgctgaacaaagagaatgctttagacatctcatgcaaaattttgtaaaaaggtttggtggtgacatcttctccaatatgtaccctgcagctagagcttataggccaggagtcagccaatacttttaacaaagtggaaaaggagtgagtttaaccccgccattaagtgtgattatatcaccaacaacctagctgaagttttcaacaactgggttaaagattggaaggaccttccagttgttgagcttgcagacaagtgtagagagctgataatgattttgtggcagaaaagaagaaggattgcagacaagttgaatggaaaagtcttacctgcagttatacaacagttgaaggtaaagactagaggactaggtcacttgacagttacaaaggctagttatttctctgcacaagtggatgacagcacaaatactcataataggcatgtcgttaaatcctatttacatgaatgtacatgtcttgaatggcagcacactggcaagccttgccagcatgcactggcgttgattacagcacaagatagtgtggatgtggagttggaggattttgtgcatgatttttattcggttcagaggttcaagaatgcatacaagagaattattgagccactgccagataagacccagtggccacatgtggacctaccatttgttgttggcgccccactggacaagagaggtagaggaaggtacaaaaaactcagaatcaagagttgccttgaaggtgggaatagcaagggcaaaaaggttgctgcagaaaaaggaaaagaggctgacagagaggcagctaatgaagttgacgtgcaggctgaaaaccaatctgaaaaaagcaagaagaagatgataagagggaagagaaggtgcaaaaaatgtggagaattaggccatggtgaaaccagctacaagtgcccattaaatggaacgaagaaaaggaagagaaagcctcgaaaaaacacaactaagtatggggagaatgccaaagtgccaacacaaaagaagtcaaaaggaggtgagggaggtactactgcccatggaagggaggaatgtgttgttgtccaagaaatggagattgttgctgttgttcaagtcatggagcaaggtgatgctgctgttgttcaaaacccaactaagcctacaatggaaacaattataaatgacaacccaattagggtcaccagaagtcgacttgcaatgctattggcagatggtacaacttcacaggaaggtctgccatcagcatcattctcaaacaagatgacacctcctaagaagttgacacctaggaaactgagatgctgatttgtgaaatcagctagtatttgttagtagcatgtatctgagaagtgaactcagcctttatgtatctgtgaaaatttgatatggctgctagcctttatgtacctgagaactccgcctttatgaacatcaacgttgtgctcaaattgagatggatgcttgccttgatgtgaattcagcctttatgtatctgag

SEQ ID NO: 78301 - DNA, 798 bp, Zea Mays
ctcgctcttcttcagacttccatactgccccgttctcctctcctcttcccccaaatctgcgtgcgccgcggcaaccctagcccccgcgatccgctcgccggaggggagggagccccgccggcgtccatggaggtgaagctgtggaacgacaagcgcgagcgggagctcctggagagctacgcggacctgtacgcgatcatcaaggtcacggagaagctggaacgggcctacgtccgcgacctcgtctcagccgccgactacgaggcggagtgcctcaagctcatctcccagttcaactccctctcctcctcgctcgccggcaccgtcgccgtcccgcgcttcgtccaggcgtaccgtctcgattgccccgccgcgctcaaccgcctcctccagtcgggcgtcccggccaccgtcgagctccgcgccgcgtccgcctcatccgcgcccgccgccacctccgcctccgccgcagccatcgcgcactgcgtgcagaccttcatcaccgccatggacgcggtcaagctcaacatgcttgccaacgaccaggtccgccccctgctgcaggacgtcgctacatccatggccaggctcggctccctactgccgcccgactttgaggggaaggtcaaggttaacgagtggcttggcaagctgcataagatgggggccgcggatgagctcaccgagcagcaggccaggcagctcaacttcgacctcgattcggcctacagtgccttcttggctgcgctgcccgctgctggtctgtaacggggaaacgatcggacaggtttgccctcg

SEQ ID NO: 78302 - DNA, 2745 bp, Zea Mays
cctcgctcttcttcagacttccatactgccccgttctcctctcctcttcccccaaatctgcgtgcgccgcggcaaccctagcccccgcgatccgctcgccggaggggagggagccccgccggcgtccatggaggtgaagctgtggaacgacaagcgcgagcgggagctcctggagagctacgcggacctgtacgcgatcatcaaggtcacggagaagctggaacgggcctacgtccgcgacctcgtctcagccgccgactacgaggcggagtgcctcaagctcatctcccagttcaactccctctcctcctcgctcgccggcaccgtcgccgtcccgcgcttcgtccaggcgtaccgtctcgattgccccgccgcgctcaaccgcctcctccagtcgggcgtcccggccaccgtcgagctccgcgccgcgtccgcctcatccgcgcccgccgccacctccgcctccgccgcagccatcgcgcactgcgtgcagaccttcatcaccgccatggacgcggtcaagctcaacatgcttgccaacgaccaggtccgccccctgctgcaggacgtcgctacatccatggccaggctcggctccctactgccgcccgactttgaggggaaggtcaaggttaacgagtggcttggcaagctgcataagatgggggccgcggatgagctcaccgagcagcaggccaggcagctcaacttcgacctcgattcggcctacagtgccttcttggctgcgctgcccgctgctggtctgtaacgggatcagtaacgctctgctctaggtgtgcatttttttattctgctattttgtctgctgatgacaaaagtgctgagtttatactgacctgattcttgtcaatgagttctgcaatatttgtatgttatatgcattaccgcatgatttatgcatgatgccatgtatggtaggaatgtaggatgtttgcatatggcctgttcatttggatatatttcttaccgttgggttatataaatcagtaagtggaaaatatatagttgtttcctgttgcctcatgatctttctatttgtaagaatgatgcagttagtattgttgatatgtgctattggttttgtcgattccttttttgttctccagatcagttgtaatgaaaacagagaacctatacctgtgcactcaattttagtatggctgtcatctttgaatgttctttgcaatagctgacctgcctgcttttatcagaaaaatcatattcaatgtctgctattgggattgttaacccttgcagtttgcaaggccagtatgttccaacattgataccaccctaacagatgcccccttttactgattatatgttgtgagctactggcagttagccaacttattttattttaggatgttatggaaccactaggaactgttccatgatttttttggtagacttgcatgtaagaatatgaagtaggcactgttgcctatcagtttactttgaatctttatgtttaatattatttggacaacgacaactatgcaaatagtcattaggtgcaaacatgcaaacatgagtcttggtccgttagatctaaacatgactattggtttgttagatctagatctaatcgtatgtcatatttagcacttagactctgccaccaccaccttgtgtaggtttataaaaaaccctaacaaaccacgattacatatgtggttggatctagatctaatggatcatgactcttggtccgttagatctagctagggcgggctcggtcggcttgctggccgggcgcgagcgagccgcacagagcgcatgcgttggggcgggcgagcaagcaagcacgccagagtggttaaggtgatggaccgttgagtccatcacctagggtgataaatagatctaccatatatatatatatatattatcatttatttgaatatagacataaaatttaagggctagaacgtctattaatttgggatagagtatttgctagtgttctctattgtttctcttggcacaattggaaacttgagcaaaacaattggttttgggaatggatcaggtgcaaaccatgcaagccgtcatgatgattttacaaaacaaccctcccaccgtgtatccgttttcaaaacgaccattccatttcccctgttacatttttaaatttaccttgcaccttcaccaacatgttggtttgcatctggtccgttcctattggtttaaggctttgtttgacattagaatggctcgagtttattttttgtgttattactttgatttttgttgaagcaccaattttcttggaaccatattgtcaaaatctgatattttcatgtactctttgctgttcaacttttgaagctgttcttaaaataattttattttcgagatggcttttcttatcgtcttgcttgaaaggctttagttctgcaacccatcgttgaagatgatggctgcttgtactttcatctgaactcagcaacatcattcatgaatatgggaggagtatatttttagaattattgggaagactttgttgtgaccctcgtctcactttcagtctcaccgcattcggtcatgctctccagaattgttgcagtttaagaaatagctgtatcttgaccatgtaatatgtgagcctaggtggaaaatcattttacctaattgcaattctttattgtcatgggcttgctgtacaacgaagaccgtgtgggtcatattctattcttggtcacaacattccgatatgaaagg

SEQ ID NO: 78303 - DNA, 3411 bp, Zea Mays
ccagtttccacgtaacccctcgctcttcttcagacttccatactgccccgttctcctctcctcttcccccaaatctgcgtgcgccgcggcaaccctagcccccgcgatccgctcgccggaggggagggagccccgccggcgtccatggaggtgaagctgtggaacgacaagcgcgagcgggagctcctggagagctacgcggacctgtacgcgatcatcaaggtcacggagaagctggaacgggcctacgtccgcgacctcgtctcagccgccgactacgaggcggagtgcctcaagctcatctcccagttcaactccctctcctcctcgctcgccggcaccgtcgccgtcccgcgcttcgtccaggcgtaccgtctcgattgccccgccgcgctcaaccgcctcctccagtcgggcgtcccggccaccgtcgagctccgcgccgcgtccgcctcatccgcgcccgccgccacctccgcctccgccgcagccatcgcgcactgcgtgcagaccttcatcaccgccatggacgcggtcaagctcaacatgcttgccaacgaccaggtccgccccctgctgcaggacgtcgctacatccatggccaggctcggctccctactgccgcccgactttgaggggaaggtcaaggttaacgagtggcttggcaagctgcataagatgggggccgcggatgagctcaccgagcagcaggccaggcagctcaacttcgacctcgattcggcctacagtgccttcttggctgcgctgcccgctgctggtctgtaacggggtaaggatctaccagcttgatttttatttggttggttcggtctattatgcttttgacactggagcactactctccactactatagtactatagatatctgtaatttcggtactgctatttgttgtcaataagaaagttttgttttcctttgtatacagtaaatatgtttattgcatggcatacattcacattacaatgcttgcaaatgacctgtttatttggatacatttattctattctctgtggaacatatggacttatgaagtgataactgtataatatattgttctctcccattatatgtcattatctttctacttgatggagtcatgaatgatctattttcttctttgggttacaaacaatataaatgaagaagaatgacatagttgacaacttggggtgttctttgagtggttgaagctcatttgatttgggaattagctgttcataaacagtgggcacattatgctcactaccttgtacttcacttgctaataatcatgtgcaacagctaccaccttatctattattcaattgtattgatcttgttgataataaacagaaaatataatttaaattactattatttcagttcctgacacaacttcataatagcaaaatcttgtgtttgagtttttgactgcagatcagtaacgctctgctctaggtgtgcatttttttattctgctattttgtctgctgatgacaaaagtgctgagtttatactgacctgattcttgtcaatgagttctgcaatatttgtatgttatatgcattaccgcatgatttatgcatgatgccatgtatggtaggaatgtaggatgtttgcatatggcctgttcatttggatatatttcttaccgttgggttatataaatcagtaagtggaaaatatatagttgtttcctgttgcctcatgatctttctatttgtaagaatgatgcagttagtattgttgatatgtgctattggttttgtcgattccttttttgttctccagatcagttgtaatgaaaacagagaacctatacctgtgcactcaattttagtatggctgtcatctttgaatgttctttgcaatagctgacctgcctgcttttatcagaaaaatcatattcaatgtctgctattgggattgttaacccttgcagtttgcaaggccagtatgttccaacattgataccaccctaacagatgcccccttttactgattatatgttgtgagctactggcagttagccaacttattttattttaggatgttatggaaccactaggaactgttccatgatttttttggtagacttgcatgtaagaatatgaagtaggcactgttgcctatcagtttactttgaatctttatgtttaatattatttggacaacgacaactatgcaaatagtcattaggtgcaaacatgcaaacatgagtcttggtccgttagatctaaacatgactattggtttgttagatctagatctaatcgtatgtcatatttagcacttagactctgccaccaccaccttgtgtaggtttataaaaaaccctaacaaaccacgattacatatgtggttggatctagatctaatggatcatgactcttggtccgttagatctagctagggcgggctcggtcggcttgctggccgggcgcgagcgagccgcacagagcgcatgcgttggggcgggcgagcaagcaagcacgccagagtggttaaggtgatggaccgttgagtccatcacctagggtgataaatagatctaccatatatatatatatatattatcatttatttgaatatagacataaaatttaagggctagaacgtctattaatttgggatagagtatttgctagtgttctctattgtttctcttggcacaattggaaacttgagcaaaacaattggttttgggaatggatcaggtgcaaaccatgcaagccgtcatgatgattttacaaaacaaccctcccaccgtgtatccgttttcaaaacgaccattccatttcccctgttacatttttaaatttaccttgcaccttcaccaacatgttggtttgcatctggtccgttcctattggtttaaggctttgtttgacattagaatggctcgagtttattttttgtgttattactttgatttttgttgaagcaccaattttcttggaaccatattgtcaaaatctgatattttcatgtactctttgctgttcaacttttgaagctgttcttaaaataattttattttcgagatggcttttcttatcgtcttgcttgaaaggctttagttctgcaacccatcgttgaagatgatggctgcttgtactttcatctgaactcagcaacatcattcatgaatatgggaggagtatatttttagaattattgggaagactttgttgtgaccctcgtctcactttcagtctcaccgcattcggtcatgctctccagaattgttgcagtttaagaaatagctgtatcttgaccatgtaatatgtgagcctaggtggaaaatcattttacctaattgcaattctttattgtcatgggcttgctgtacaacgaagaccgtgtgggtcatattctattcttggtcacaacattccgatatgaaagg

SEQ ID NO: 78304 - DNA, 1178 bp, Zea Mays
caaaatctcaccggtccggtagtccagtttccacgtaacccctcgctcttcttcagacttccatactgccccgttctcctctcctcttcccccaaatctgcgtgcgccgcggcaaccctagcccccgcgatccgctcgccggaggggagggagccccgccggcgtccatggaggtgaagctgtggaacgacaagcgcgagcgggagctcctggagagctacgcggacctgtacgcgatcatcaaggtcacggagaagctggaacgggcctacgtccgcgacctcgtctcagccgccgactacgaggcggagtgcctcaagctcatctcccagttcaactccctctcctcctcgctcgccggcaccgtcgccgtcccgcgcttcgtccaggcgtaccgtctcgattgccccgccgcgctcaaccgcctcctccagtcgggcgtcccggccaccgtcgagctccgcgccgcgtccgcctcatccgcgcccgccgccacctccgcctccgccgcagccatcgcgcactgcgtgcagaccttcatcaccgccatggacgcggtcaagctcaacatgcttgccaacgaccaggtccgccccctgctgcaggacgtcgctacatccatggccaggctcggctccctactgccgcccgactttgaggggaaggtcaaggttaacgagtggcttggcaagctgcataagatgggggccgcggatgagctcaccgagcagcaggccaggcagctcaacttcgacctcgattcggcctacagtgccttcttggctgcgctgcccgctgctggtctgtaacgggatggcttttcttatcgtcttgcttgaaaggctttagttctgcaacccatcgttgaagatgatggctgcttgtactttcatctgaactcagcaacatcattcatgaatatgggaggagtatatttttagaattattgggaagactttgttgtgaccctcgtctcactttcagtctcaccgcattcggtcatgctctccagaattgttgcagtttaagaaatagctgtatcttgaccatgtaatatgtgagcctaggtggaaaatcattttacctaattgcaattctttattgtcatgggcttgctgtacaacgaagaccgtgtgggtcatattctattcttggtcacaacattccgatatgaaagg

SEQ ID NO: 78305 - DNA, 2320 bp, Zea Mays
gtttttttcttaaatcaagctggatctggttatgaaatcgataatttgaagaccacaaactatggcttctcaaattctttagcatgcatgttctataggcatggtattctcttgggaaccagtaaggtgccatgatgttgttgacatgggttggagtaatttggctgaccttagtatttatgaagggaaactcttgggatgctcctaccatgagtgccgtgttggtctatgggctgctgatatatcactcattggaccctatgctcttggtgtattgcccaaagcgaatttttttgctgagcttgtgcagtctatggaagataatcctgtgaaaccagttgatagcactgcaaattctcgtcctgcttcagcaatggcacattcaagaagttcatacaaaatcaaggagtctgggattgctcaaagcagggttcgtggctcacatttgactccagcaagtacagataagaccaagaaagataggagcagcactattccacgaagacctgattcgtctttaaagtcatctgttcagagtactaccctgatgaggcgtatgaagcttgttgatagtccttccaccaacacaaaaaatgtggaacgtaatgttgggcagagagacatttcattagcgtctcgtgcagtgatggctaataattctgcaactgctaagaaaagcaatcttacagaatcagctttagtgaaagatatttacactacatctcaggctgtttcagcacctattgttgtgcccagagacattttagaggacaaaacagtaagcaatgttcgtcgagggactggagagacagctgcagtcccagatgattttcggatccctgttcacagaagaaaaccctcacttagtggcagtgctgctgatagtgatagctcatcaagatcagtgttcactgaacctgatgtttgctcagagggtttgtctagcttaaaattctcctttgggctaactccatatcacaagaaagaagaatttggcgatgtggataatgaaggtattgcacaaatagcagaaaagatggaaagaacagtgtcgctggaccattctcagcagttaaatgatgataaatcctttgaatcaccatgctcaacaacagagactgccaaggtcaaatatgttagaggagttgctgtgccactggggaaaacaaagtctcttgttgagagatgggaaaaaagagagacttctagcactgattattcaccacaaactggttcttgtggtgatcgggcatcgagaaatgacaaccatccattccatctggcggaaccaagtacaacatttgaaaaggacctgtcaactgtagatgaagcgatggctcctgtcaatttagtgcggaaccatgatgaattcctaaatgctgtaaaacttcggctgacaaaactagagatgatgcggcatgtctttgaacaaagtggtattaaaggagcaattgctgcagtggcaaagctacctgacaatgctgttcaagcagatgttgttagtgctctcaaaggaaagcttgatcttttcaacctggaatttttctcaaattttctgcctgttcttgctgggttactgtgtagcaagactgaaaggcatgctatggtctctttggaaatgttgttggatcttataaagatttttggaccagtaattcattcagcattatcagcaaatttaggcgttggagttgacattcaggctgagcagaggttgcaacgttgttcacggtgctttaaccatttgcaaaagatccaacagagtctgaatccattgattctgcggggtggtcaaacagcacaacttgcacaagaactaagtctttcattgcaagatttggtggtgatctaggcaagatgatgtacaatgtatacgacagagtagataccattggttttggcgaaaagtgcccacagttgtgtagcttgtaattttgtcatagctttgcaagtgggttttgcaactgtgttttaacattgggctggcattcagcctggtcccctgttgtaaatgtgagcctagccgtgaatgagtctgtaattagccagccacatctgctgtgtgagcagccctgaacaaaaagactagttgaaaggaaacaaccgcaaaggggatcattttggttacaccccaggtggtaggatggctcatgtagcatgcggtgattggcaattccattctttgaaagcatctgtgtttaacgtatattttgtagaagtaaattgagttatgccatagtaacgatgactgattgggctaatatgccttttgtttcttcaactgaccaagaatactaagagtcggctagttttaagtgtc

SEQ ID NO: 78306 - DNA, 2657 bp, Zea Mays
tgccaatgttgtcttaacaagttctgttaagcgttctcggatttatttgtgcggtctctcactgggcacaggtcaagttgcactgctgttgaattccatccatttggcgagttttttgcatctggttcgtcagatacagacctgaagatatgggacataaagaaaaaaggatacatacacacatataagggtcacagaggagcaattaaaacaatcaggtttacgcctgatggacgatgggttgtcactggtggggaagataacattgtgaaggtgtgggatttgacagctggaaagcttctacatgatttcaagttccatagtggacaaatcaactgtattgattttcaccctcaagaatttttgcttgcaacaggctctgctgataggacagtgaaattttgggatcttgaaacttttgaattgataggttcttctggacctgagggtaccggtgtacgttctatggtctttcacccagatggtaaaacccttttctgtggattagaccaaagcttaaagggaaactcttgggatgctcctaccatgagtgccgtgttggtctatgggctgctgatatatcactcattggaccctatgctcttggtgtattgcccaaagcgaatttttttgctgagcttgtgcagtctatggaagataatcctgtgaaaccagttgatagcactgcaaattctcgtcctgcttcagcaatggcacattcaagaagttcatacaaaatcaaggagtctgggattgctcaaagcagggttcgtggctcacatttgactccagcaagtacagataagaccaagaaagataggagcagcactattccacgaagacctgattcgtctttaaagtcatctgttcagagtactaccctgatgaggcgtatgaagcttgttgatagtccttccaccaacacaaaaaatgtggaacgtaatgttgggcagagagacatttcattagcgtctcgtgcagtgatggctaataattctgcaactgctaagaaaagcaatcttacagaatcagctttagtgaaagatatttacactacatctcaggctgtttcagcacctattgttgtgcccagagacattttagaggacaaaacagtaagcaatgttcgtcgagggactggagagacagctgcagtcccagatgattttcggatccctgttcacagaagaaaaccctcacttagtggcagtgctgctgatagtgatagctcatcaagatcagtgttcactgaacctgatgtttgctcagagggtttgtctagcttaaaattctcctttgggctaactccatatcacaagaaagaagaatttggcgatgtggataatgaaggtattgcacaaatagcagaaaagatggaaagaacagtgtcgctggaccattctcagcagttaaatgatgataaatcctttgaatcaccatgctcaacaacagagactgccaaggtcaaatatgttagaggagttgctgtgccactggggaaaacaaagtctcttgttgagagatgggaaaaaagagagacttctagcactgattattcaccacaaactggttcttgtggtgatcgggcatcgagaaatgacaaccatccattccatctggcggaaccaagtacaacatttgaaaaggacctgtcaactgtagatgaagcgatggctcctgtcaatttagtgcggaaccatgatgaattcctaaatgctgtaaaacttcggctgacaaaactagagatgatgcggcatgtctttgaacaaagtggtattaaaggagcaattgctgcagtggcaaagctacctgacaatgctgttcaagcagatgttgttagtgctctcaaaggaaagcttgatcttttcaacctggaatttttctcaaattttctgcctgttcttgctgggttactgtgtagcaagactgaaaggcatgctatggtctctttggaaatgttgttggatcttataaagatttttggaccagtaattcattcagcattatcagcaaatttaggcgttggagttgacattcaggctgagcagaggttgcaacgttgttcacggtgctttaaccatttgcaaaagatccaacagagtctgaatccattgattctgcggggtggtcaaacagcacaacttgcacaagaactaagtctttcattgcaagatttggtggtgatctaggcaagatgatgtacaatgtatacgacagagtagataccattggttttggcgaaaagtgcccacagttgtgtagcttgtaattttgtcatagctttgcaagtgggttttgcaactgtgttttaacattgggctggcattcagcctggtcccctgttgtaaatgtgagcctagccgtgaatgagtctgtaattagccagccacatctgctgtgtgagcagccctgaacaaaaagactagttgaaaggaaacaaccgcaaaggggatcattttggttacaccccaggtggtaggatggctcatgtagcatgcggtgattggcaattccattctttgaaagcatctgtgtttaacgtatattttgtagaagtaaattgagttatgccatagtaacgatgactgattgggctaatatgccttttgtttcttcaactgaccaagaatactaagagtcggctagttttaagtgtc

SEQ ID NO: 78307 - DNA, 2690 bp, Zea Mays
cagatactattgcctgccaatgttgtcttaacaagttctgttaagcgttctcggatttatttgtgcggtctctcactgggcacaggtcaagttgcactgctgttgaattccatccatttggcgagttttttgcatctggttcgtcagatacagacctgaagatatgggacataaagaaaaaaggatacatacacacatataagggtcacagaggagcaattaaaacaatcaggtttacgcctgatggacgatgggttgtcactggtggggaagataacattgtgaaggtgtgggatttgacagctggaaagcttctacatgatttcaagttccatagtggacaaatcaactgtattgattttcaccctcaagaatttttgcttgcaacaggctctgctgataggacagtgaaattttgggatcttgaaacttttgaattgataggttcttctggacctgagggtaccggtgtacgttctatggtctttcacccagatggtaaaacccttttctgtggattagaccaaagcttaaaggtattctcttgggaaccagtaaggtgccatgatgttgttgacatgggttggagtaatttggctgaccttagtatttatgaagggaaactcttgggatgctcctaccatgagtgccgtgttggtctatgggctgctgatatatcatctatggaagataatcctgtgaaaccagttgatagcactgcaaattctcgtcctgcttcagcaatggcacattcaagaagttcatacaaaatcaaggagtctgggattgctcaaagcagggttcgtggctcacatttgactccagcaagtacagataagaccaagaaagataggagcagcactattccacgaagacctgattcgtctttaaagtcatctgttcagagtactaccctgatgaggcgtatgaagcttgttgatagtccttccaccaacacaaaaaatgtggaacgtaatgttgggcagagagacatttcattagcgtctcgtgcagtgatggctaataattctgcaactgctaagaaaagcaatcttacagaatcagctttagtgaaagatatttacactacatctcaggctgtttcagcacctattgttgtgcccagagacattttagaggacaaaacagtaagcaatgttcgtcgagggactggagagacagctgcagtcccagatgattttcggatccctgttcacagaagaaaaccctcacttagtggcagtgctgctgatagtgatagctcatcaagatcagtgttcactgaacctgatgtttgctcagagggtttgtctagcttaaaattctcctttgggctaactccatatcacaagaaagaagaatttggcgatgtggataatgaaggtattgcacaaatagcagaaaagatggaaagaacagtgtcgctggaccattctcagcagttaaatgatgataaatcctttgaatcaccatgctcaacaacagagactgccaaggtcaaatatgttagaggagttgctgtgccactggggaaaacaaagtctcttgttgagagatgggaaaaaagagagacttctagcactgattattcaccacaaactggttcttgtggtgatcgggcatcgagaaatgacaaccatccattccatctggcggaaccaagtacaacatttgaaaaggacctgtcaactgtagatgaagcgatggctcctgtcaatttagtgcggaaccatgatgaattcctaaatgctgtaaaacttcggctgacaaaactagagatgatgcggcatgtctttgaacaaagtggtattaaaggagcaattgctgcagtggcaaagctacctgacaatgctgttcaagcagatgttgttagtgctctcaaaggaaagcttgatcttttcaacctggaatttttctcaaattttctgcctgttcttgctgggttactgtgtagcaagactgaaaggcatgctatggtctctttggaaatgttgttggatcttataaagatttttggaccagtaattcattcagcattatcagcaaatttaggcgttggagttgacattcaggctgagcagaggttgcaacgttgttcacggtgctttaaccatttgcaaaagatccaacagagtctgaatccattgattctgcggggtggtcaaacagcacaacttgcacaagaactaagtctttcattgcaagatttggtggtgatctaggcaagatgatgtacaatgtatacgacagagtagataccattggttttggcgaaaagtgcccacagttgtgtagcttgtaattttgtcatagctttgcaagtgggttttgcaactgtgttttaacattgggctggcattcagcctggtcccctgttgtaaatgtgagcctagccgtgaatgagtctgtaattagccagccacatctgctgtgtgagcagccctgaacaaaaagactagttgaaaggaaacaaccgcaaaggggatcattttggttacaccccaggtggtaggatggctcatgtagcatgcggtgattggcaattccattctttgaaagcatctgtgtttaacgtatattttgtagaagtaaattgagttatgccatagtaacgatgactgattgggctaatatgccttttgtttcttcaactgaccaagaatactaagagtcggctagttttaagtgtc

SEQ ID NO: 78308 - DNA, 2889 bp, Zea Mays
ggactgtggtctgctgagctaaggcagatactattgcctgccaatgttgtcttaacaagttctgttaagcgttctcggatttatttgtgcggtctctcactgggcacaggtcaagttgcactgctgttgaattccatccatttggcgagttttttgcatctggttcgtcagatacagacctgaagatatgggacataaagaaaaaaggatacatacacacatataagggtcacagaggagcaattaaaacaatcaggtttacgcctgatggacgatgggttgtcactggtggggaagataacattgtgaaggtgtgggatttgacagctggaaagcttctacatgatttcaagttccatagtggacaaatcaactgtattgattttcaccctcaagaatttttgcttgcaacaggctctgctgataggacagtgaaattttgggatcttgaaacttttgaattgataggttcttctggacctgaggtattgcaagtttttttcttaaatcaagctggatctggttatgaaatcgataatttgaagaccacaaactatggcttctcaaattctttagcatgcatgttctataggcatgggtaccggtgtacgttctatggtctttcacccagatggtaaaacccttttctgtggattagaccaaagcttaaaggtattctcttgggaaccagtaaggtgccatgatgttgttgacatgggttggagtaatttggctgaccttagtatttatgaagggaaactcttgggatgctcctaccatgagtgccgtgttggtctatgggctgctgatatatcactcattggaccctatgctcttggtgtattgcccaaagcgaatttttttgctgagcttgtgcagtctatggaagataatcctgtgaaaccagttgatagcactgcaaattctcgtcctgcttcagcaatggcacattcaagaagttcatacaaaatcaaggagtctgggattgctcaaagcagggttcgtggctcacatttgactccagcaagtacagataagaccaagaaagataggagcagcactattccacgaagacctgattcgtctttaaagtcatctgttcagagtactaccctgatgaggcgtatgaagcttgttgatagtccttccaccaacacaaaaaatgtggaacgtaatgttgggcagagagacatttcattagcgtctcgtgcagtgatggctaataattctgcaactgctaagaaaagcaatcttacagaatcagctttagtgaaagatatttacactacatctcaggctgtttcagcacctattgttgtgcccagagacattttagaggacaaaacagtaagcaatgttcgtcgagggactggagagacagctgcagtcccagatgattttcggatccctgttcacagaagaaaaccctcacttagtggcagtgctgctgatagtgatagctcatcaagatcagtgttcactgaacctgatgtttgctcagagggtttgtctagcttaaaattctcctttgggctaactccatatcacaagaaagaagaatttggcgatgtggataatgaaggtattgcacaaatagcagaaaagatggaaagaacagtgtcgctggaccattctcagcagttaaatgatgataaatcctttgaatcaccatgctcaacaacagagactgccaaggtcaaatatgttagaggagttgctgtgccactggggaaaacaaagtctcttgttgagagatgggaaaaaagagagacttctagcactgattattcaccacaaactggttcttgtggtgatcgggcatcgagaaatgacaaccatccattccatctggcggaaccaagtacaacatttgaaaaggacctgtcaactgtagatgaagcgatggctcctgtcaatttagtgcggaaccatgatgaattcctaaatgctgtaaaacttcggctgacaaaactagagatgatgcggcatgtctttgaacaaagtggtattaaaggagcaattgctgcagtggcaaagctacctgacaatgctgttcaagcagatgttgttagtgctctcaaaggaaagcttgatcttttcaacctggaatttttctcaaattttctgcctgttcttgctgggttactgtgtagcaagactgaaaggcatgctatggtctctttggaaatgttgttggatcttataaagatttttggaccagtaattcattcagcattatcagcaaatttaggcgttggagttgacattcaggctgagcagaggttgcaacgttgttcacggtgctttaaccatttgcaaaagatccaacagagtctgaatccattgattctgcggggtggtcaaacagcacaacttgcacaagaactaagtctttcattgcaagatttggtggtgatctaggcaagatgatgtacaatgtatacgacagagtagataccattggttttggcgaaaagtgcccacagttgtgtagcttgtaattttgtcatagctttgcaagtgggttttgcaactgtgttttaacattgggctggcattcagcctggtcccctgttgtaaatgtgagcctagccgtgaatgagtctgtaattagccagccacatctgctgtgtgagcagccctgaacaaaaagactagttgaaaggaaacaaccgcaaaggggatcattttggttacaccccaggtggtaggatggctcatgtagcatgcggtgattggcaattccattctttgaaagcatctgtgtttaacgtatattttgtagaagtaaattgagttatgccatagtaacgatgactgattgggctaatatgccttttgtttcttcaactgaccaagaatactaagagtcggctagttttaagtgtc

SEQ ID NO: 78309 - DNA, 3004 bp, Zea Mays
gagaccaccaaaggaaaaaaaggggactcgctctcgccaactcccctgctccacagccacaagcccactcggatcccaatccgagccctactcgtcgtcgacgacgcgacggccccgcgtgcgaagccagccagccagccagccagccatcgccgtggaccggggagcccggagggatggaccccgagaagcgcggctacgagctccaaaattttgtggcgcatgatgcggaagttaggtccctgtctattggcaaaaagtctaggcgtgtgttcatcaccggtggcaatgatcgcaaggtcaaactgtgggccattggcaagcaaactccacttctgaccttgtccggccacacaagtgcggtggaggctgtgcagtttgattcagcagaggtgcttgtgcttgctggctcgtcaaatggttccatcaagctctgggacttggaagaagctaaagttgtgcggtctctcactgggcacaggtcaagttgcactgctgttgaattccatccatttggcgagttttttgcatctggttcgtcagatacagacctgaagatatgggacataaagaaaaaaggatacatacacacatataagggtcacagaggagcaattaaaacaatcaggtttacgcctgatggacgatgggttgtcactggtggggaagataacattgtgaaggtgtgggatttgacagctggaaagcttctacatgatttcaagttccatagtggacaaatcaactgtattgattttcaccctcaagaatttttgcttgcaacaggctctgctgataggacagtgaaattttgggatcttgaaacttttgaattgataggttcttctggacctgagggtaccggtgtacgttctatggtctttcacccagatggtaaaacccttttctgtggattagaccaaagcttaaagggaaactcttgggatgctcctaccatgagtgccgtgttggtctatgggctgctgatatatcatctatggaagataatcctgtgaaaccagttgatagcactgcaaattctcgtcctgcttcagcaatggcacattcaagaagttcatacaaaatcaaggagtctgggattgctcaaagcagggttcgtggctcacatttgactccagcaagtacagataagaccaagaaagataggagcagcactattccacgaagacctgattcgtctttaaagtcatctgttcagagtactaccctgatgaggcgtatgaagcttgttgatagtccttccaccaacacaaaaaatgtggaacgtaatgttgggcagagagacatttcattagcgtctcgtgcagtgatggctaataattctgcaactgctaagaaaagcaatcttacagaatcagctttagtgaaagatatttacactacatctcaggctgtttcagcacctattgttgtgcccagagacattttagaggacaaaacagtaagcaatgttcgtcgagggactggagagacagctgcagtcccagatgattttcggatccctgttcacagaagaaaaccctcacttagtggcagtgctgctgatagtgatagctcatcaagatcagtgttcactgaacctgatgtttgctcagagggtttgtctagcttaaaattctcctttgggctaactccatatcacaagaaagaagaatttggcgatgtggataatgaaggtattgcacaaatagcagaaaagatggaaagaacagtgtcgctggaccattctcagcagttaaatgatgataaatcctttgaatcaccatgctcaacaacagagactgccaaggtcaaatatgttagaggagttgctgtgccactggggaaaacaaagtctcttgttgagagatgggaaaaaagagagacttctagcactgattattcaccacaaactggttcttgtggtgatcgggcatcgagaaatgacaaccatccattccatctggcggaaccaagtacaacatttgaaaaggacctgtcaactgtagatgaagcgatggctcctgtcaatttagtgcggaaccatgatgaattcctaaatgctgtaaaacttcggctgacaaaactagagatgatgcggcatgtctttgaacaaagtggtattaaaggagcaattgctgcagtggcaaagctacctgacaatgctgttcaagcagatgttgttagtgctctcaaaggaaagcttgatcttttcaacctggaatttttctcaaattttctgcctgttcttgctgggttactgtgtagcaagactgaaaggcatgctatggtctctttggaaatgttgttggatcttataaagatttttggaccagtaattcattcagcattatcagcaaatttaggcgttggagttgacattcaggctgagcagaggttgcaacgttgttcacggtgctttaaccatttgcaaaagatccaacagagtctgaatccattgattctgcggggtggtcaaacagcacaacttgcacaagaactaagtctttcattgcaagatttggtggtgatctaggcaagatgatgtacaatgtatacgacagagtagataccattggttttggcgaaaagtgcccacagttgtgtagcttgtaattttgtcatagctttgcaagtgggttttgcaactgtgttttaacattgggctggcattcagcctggtcccctgttgtaaatgtgagcctagccgtgaatgagtctgtaattagccagccacatctgctgtgtgagcagccctgaacaaaaagactagttgaaaggaaacaaccgcaaaggggatcattttggttacaccccaggtggtaggatggctcatgtagcatgcggtgattggcaattccattctttgaaagcatctgtgtttaacgtatattttgtagaagtaaattgagttatgccatagtaacgatgactgattgggctaatatgccttttgtttcttcaactgaccaagaatactaagagtcggctagttttaagtgtc

SEQ ID NO: 78310 - DNA, 3319 bp, Zea Mays
cagagaccaccaaaggaaaaaaaggggactcgctctcgccaactcccctgctccacagccacaagcccactcggatcccaatccgagccctactcgtcgtcgacgacgcgacggccccgcgtgcgaagccagccagccagccagccagccatcgccgtggaccggggagcccggagggatggaccccgagaagcgcggctacgagctccaaaattttgtggcgcatgatgcggaagttaggtccctgtctattggcaaaaagtctaggcgtgtgttcatcaccggtggcaatgatcgcaaggtcaaactgtgggccattggcaagcaaactccacttctgaccttgtccggccacacaagtgcggtggaggctgtgcagtttgattcagcagaggtgcttgtgcttgctggctcgtcaaatggttccatcaagctctgggacttggaagaagctaaagttgtgcggtctctcactgggcacaggtcaagttgcactgctgttgaattccatccatttggcgagttttttgcatctggttcgtcagatacagacctgaagatatgggacataaagaaaaaaggatacatacacacatataagggtcacagaggagcaattaaaacaatcaggtttacgcctgatggacgatgggttgtcactggtggggaagataacattgtgaaggctctgctgataggacagtgaaattttgggatcttgaaacttttgaattgataggttcttctggacctgaggtattgcaagtttttttcttaaatcaagctggatctggttatgaaatcgataatttgaagaccacaaactatggcttctcaaattctttagcatgcatgttctataggcatggtaactacagtacattcttgctgtggccttgtattaatatctttgtctttcttataaatcgtaactgtaagaactttctcagaggaatttagctcgcatttccctacagctgattcagttttataagagttatggtctgacatctagcctgagcttcacggtaccggtgtacgttctatggtctttcacccagatggtaaaacccttttctgtggattagaccaaagcttaaaggtattctcttgggaaccagtaaggtgccatgatgttgttgacatgggttggagtaatttggctgaccttagtatttatgaagggaaactcttgggatgctcctaccatgagtgccgtgttggtctatgggctgctgatatatcactcattggaccctatgctcttggtgtattgcccaaagcgaatttttttgctgagcttgtgcagtctatggaagataatcctgtgaaaccagttgatagcactgcaaattctcgtcctgcttcagcaatggcacattcaagaagttcatacaaaatcaaggagtctgggattgctcaaagcagggttcgtggctcacatttgactccagcaagtacagataagaccaagaaagataggagcagcactattccacgaagacctgattcgtctttaaagtcatctgttcagagtactaccctgatgaggcgtatgaagcttgttgatagtccttccaccaacacaaaaaatgtggaacgtaatgttgggcagagagacatttcattagcgtctcgtgcagtgatggctaataattctgcaactgctaagaaaagcaatcttacagaatcagctttagtgaaagatatttacactacatctcaggctgtttcagcacctattgttgtgcccagagacattttagaggacaaaacagtaagcaatgttcgtcgagggactggagagacagctgcagtcccagatgattttcggatccctgttcacagaagaaaaccctcacttagtggcagtgctgctgatagtgatagctcatcaagatcagtgttcactgaacctgatgtttgctcagagggtttgtctagcttaaaattctcctttgggctaactccatatcacaagaaagaagaatttggcgatgtggataatgaaggtattgcacaaatagcagaaaagatggaaagaacagtgtcgctggaccattctcagcagttaaatgatgataaatcctttgaatcaccatgctcaacaacagagactgccaaggtcaaatatgttagaggagttgctgtgccactggggaaaacaaagtctcttgttgagagatgggaaaaaagagagacttctagcactgattattcaccacaaactggttcttgtggtgatcgggcatcgagaaatgacaaccatccattccatctggcggaaccaagtacaacatttgaaaaggacctgtcaactgtagatgaagcgatggctcctgtcaatttagtgcggaaccatgatgaattcctaaatgctgtaaaacttcggctgacaaaactagagatgatgcggcatgtctttgaacaaagtggtattaaaggagcaattgctgcagtggcaaagctacctgacaatgctgttcaagcagatgttgttagtgctctcaaaggaaagcttgatcttttcaacctggaatttttctcaaattttctgcctgttcttgctgggttactgtgtagcaagactgaaaggcatgctatggtctctttggaaatgttgttggatcttataaagatttttggaccagtaattcattcagcattatcagcaaatttaggcgttggagttgacattcaggctgagcagaggttgcaacgttgttcacggtgctttaaccatttgcaaaagatccaacagagtctgaatccattgattctgcggggtggtcaaacagcacaacttgcacaagaactaagtctttcattgcaagatttggtggtgatctaggcaagatgatgtacaatgtatacgacagagtagataccattggttttggcgaaaagtgcccacagttgtgtagcttgtaattttgtcatagctttgcaagtgggttttgcaactgtgttttaacattgggctggcattcagcctggtcccctgttgtaaatgtgagcctagccgtgaatgagtctgtaattagccagccacatctgctgtgtgagcagccctgaacaaaaagactagttgaaaggaaacaaccgcaaaggggatcattttggttacaccccaggtggtaggatggctcatgtagcatgcggtgattggcaattccattctttgaaagcatctgtgtttaacgtatattttgtagaagtaaattgagttatgccatagtaacgatgactgattgggctaatatgccttttgtttcttcaactgaccaagaatactaagagtcggctagttttaagtgtc

SEQ ID NO: 78311 - DNA, 3494 bp, Zea Mays
tttcactgcccagagaccaccaaaggaaaaaaaggggactcgctctcgccaactcccctgctccacagccacaagcccactcggatcccaatccgagccctactcgtcgtcgacgacgcgacggccccgcgtgcgaagccagccagccagccagccagccatcgccgtggaccggggagcccggagggatggaccccgagaagcgcggctacgagctccaaaattttgtggcgcatgatgcggaagttaggtccctgtctattggcaaaaagtctaggcgtgtgttcatcaccggtggcaatgatcgcaaggtcaaactgtgggccattggcaagcaaactccacttctgaccttgtccggccacacaagtgcggtggaggctgtgcagtttgattcagcagaggtgcttgtgcttgctggctcgtcaaatggttccatcaagctctgggacttggaagaagctaaagttgtgcggtctctcactgggcacaggtcaagttgcactgctgttgaattccatccatttggcgagttttttgcatctggttcgtcagatacagacctgaagatatgggacataaagaaaaaaggatacatacacacatataagggtcacagaggagcaattaaaacaatcaggtttacgcctgatggacgatgggttgtcactggtggggaagataacattgtgaaggtgtgggatttgacagctggaaagcttctacatgatttcaagttccatagtggacaaatcaactgtattgattttcaccctcaagaatttttgcttgcaacaggctctgctgataggacagtgaaattttgggatcttgaaacttttgaattgataggttcttctggacctgaggtattgcaagtttttttcttaaatcaagctggatctggttatgaaatcgataatttgaagaccacaaactatggcttctcaaattctttagcatgcatgttctataggcatggtaactacagtacattcttgctgtggccttgtattaatatctttgtctttcttataaatcgtaactgtaagaactttctcagaggaatttagctcgcatttccctacagctgattcagttttataagagttatggtctgacatctagcctgagcttcacgtatgtgttgttccctgttttttaaccgttgctctaaaagcacatgaggagaacatccatcttcctcttctgtgatagcttacatgactcctctctccagggtaccggtgtacgttctatggtctttcacccagatggtattctcttgggaaccagtaaggtgccatgatgttgttgacatgggttggagtaatttggctgaccttagtatttatgaagggaaactcttgggatgctcctaccatgagtgccgtgttggtctatgggctgctgatatatcactcattggaccctatgctcttggtgtattgcccaaagcgaatttttttgctgagcttgtgcagtctatggaagataatcctgtgaaaccagttgatagcactgcaaattctcgtcctgcttcagcaatggcacattcaagaagttcatacaaaatcaaggagtctgggattgctcaaagcagggttcgtggctcacatttgactccagcaagtacagataagaccaagaaagataggagcagcactattccacgaagacctgattcgtctttaaagtcatctgttcagagtactaccctgatgaggcgtatgaagcttgttgatagtccttccaccaacacaaaaaatgtggaacgtaatgttgggcagagagacatttcattagcgtctcgtgcagtgatggctaataattctgcaactgctaagaaaagcaatcttacagaatcagctttagtgaaagatatttacactacatctcaggctgtttcagcacctattgttgtgcccagagacattttagaggacaaaacagtaagcaatgttcgtcgagggactggagagacagctgcagtcccagatgattttcggatccctgttcacagaagaaaaccctcacttagtggcagtgctgctgatagtgatagctcatcaagatcagtgttcactgaacctgatgtttgctcagagggtttgtctagcttaaaattctcctttgggctaactccatatcacaagaaagaagaatttggcgatgtggataatgaaggtattgcacaaatagcagaaaagatggaaagaacagtgtcgctggaccattctcagcagttaaatgatgataaatcctttgaatcaccatgctcaacaacagagactgccaaggtcaaatatgttagaggagttgctgtgccactggggaaaacaaagtctcttgttgagagatgggaaaaaagagagacttctagcactgattattcaccacaaactggttcttgtggtgatcgggcatcgagaaatgacaaccatccattccatctggcggaaccaagtacaacatttgaaaaggacctgtcaactgtagatgaagcgatggctcctgtcaatttagtgcggaaccatgatgaattcctaaatgctgtaaaacttcggctgacaaaactagagatgatgcggcatgtctttgaacaaagtggtattaaaggagcaattgctgcagtggcaaagctacctgacaatgctgttcaagcagatgttgttagtgctctcaaaggaaagcttgatcttttcaacctggaatttttctcaaattttctgcctgttcttgctgggttactgtgtagcaagactgaaaggcatgctatggtctctttggaaatgttgttggatcttataaagatttttggaccagtaattcattcagcattatcagcaaatttaggcgttggagttgacattcaggctgagcagaggttgcaacgttgttcacggtgctttaaccatttgcaaaagatccaacagagtctgaatccattgattctgcggggtggtcaaacagcacaacttgcacaagaactaagtctttcattgcaagatttggtggtgatctaggcaagatgatgtacaatgtatacgacagagtagataccattggttttggcgaaaagtgcccacagttgtgtagcttgtaattttgtcatagctttgcaagtgggttttgcaactgtgttttaacattgggctggcattcagcctggtcccctgttgtaaatgtgagcctagccgtgaatgagtctgtaattagccagccacatctgctgtgtgagcagccctgaacaaaaagactagttgaaaggaaacaaccgcaaaggggatcattttggttacaccccaggtggtaggatggctcatgtagcatgcggtgattggcaattccattctttgaaagcatctgtgtttaacgtatattttgtagaagtaaattgagttatgccatagtaacgatgactgattgggctaatatgccttttgtttcttcaactgaccaagaatactaagagtcggctagttttaagtgtc

SEQ ID NO: 78312 - DNA, 4448 bp, Zea Mays
gttttcactgcccagagaccaccaaaggaaaaaaaggggactcgctctcgccaactcccctgctccacagccacaagcccactcggatcccaatccgagccctactcgtcgtcgacgacgcgacggccccgcgtgcgaagccagccagccagccagccagccatcgccgtggaccggggagcccggagggatggaccccgagaagcgcggctacgagctccaaaattttgtggcgcatgatgcggaagttaggtccctgtctattggcaaaaagtctaggcgtgtgttcatcaccggtggcaatgatcgcaaggtcaaactgtgggccattggcaagcaaactccacttctgaccttgtccggccacacaagtgcggtggaggctgtgcagtttgattcagcagaggtgcttgtgcttgctggctcgtcaaatggttccatcaagctctgggacttggaagaagctaaagttgtgcggtctctcactgggcacaggtcaagttgcactgctgttgaattccatccatttggcgagttttttgcatctggttcgtcagatacagacctgaagatatgggacataaagaaaaaaggatacatacacacatataagggtcacagaggagcaattaaaacaatcaggtttacgcctgatggacgatgggttgtcactggtggggaagataacattgtgaaggtgtgggatttgacagctggaaagcttctacatgatttcaagttccatagtggacaaatcaactgtattgattttcaccctcaagaatttttgcttgcaacaggctctgctgataggacagtgaaattttgggatcttgaaacttttgaattgataggttcttctggacctgaggtattgcaagtttttttcttaaatcaagctggatctggttatgaaatcgataatttgaagaccacaaactatggcttctcaaattctttagcatgcatgttctataggcatggtaactacagtacattcttgctgtggccttgtattaatatctttgtctttcttataaatcgtaactgtaagaactttctcagaggaatttagctcgcatttccctacagctgattcagttttataagagttatggtctgacatctagcctgagcttcacgtatgtgttgttccctgttttttaaccgttgctctaaaagcacatgaggagaacatccatcttcctcttctgtgatagcttacatgactcctctctccagggtaccggtgtacgttctatggtctttcacccagatggtaaaacccttttctgtggattagaccaaagcttaaaggtaggtcgtattctgatcaatgatttcaagtcgcctggtcgcctggtcgatccctgggaccgaccaggcgactagtcgcgattaggcgactagtcgcgattaggcgacgactagggcgattagtcgactcctagtcgttccctggtcgtcctagtctagtagttatacttatatagctatatatataaatgtacatgtatgcaactacattatataaattagaaagtcactacttagcacaggcttaggattagggcagccagcaaccatccactaatttggcagaactgcagagaagggggagatggggcagagcatgaggaaccttgagatgacgagctcatctcctcaatggtgcaggtctgctggagcttgggaaggggcagggtggagactgcagctggtgaaccttaagacagtctccgcatgtggagactgtagcaggcgagcatgggaaggggcagggtggtgtagccgctgatgatgtagccgtcggtgagctgtaggtctgaaggggcagccaccggcgaccaagtgtgaataagggctggaacagtcgagctagcaagagaggagagtaggagacgtagtgcactgtttggcggctaggtattacagaggagaggagagggtagtctaaagtatactgtagatgggttgaaaatggcccaataacaaaaccctagccaggacgaccaggaaacagtaatcgggcgattagtcgccctaatcggcgattagtcggccgaccagcctatctagtcgagtcgtccagctaatcgagcccaaatagccgaccagcccgactaatcgcgacttaatcgcgattagtcggacgacttgaaatcattgattctgataggttcttgattgatatttatttgcttggtacttgagaacatgaatatttccaggtattctcttgggaaccagtaaggtgccatgatgttgttgacatgggttggagtaatttggctgaccttagtatttatgaagggaaactcttgggatgctcctaccatgagtgccgtgttggtctatgggctgctgatatatcactcattggaccctatgctcttggtgtattgcccaaagcgaatttttttgctgagcttgtgcagtctatggaagataatcctgtgaaaccagttgatagcactgcaaattctcgtcctgcttcagcaatggcacattcaagaagttcatacaaaatcaaggagtctgggattgctcaaagcagggttcgtggctcacatttgactccagcaagtacagataagaccaagaaagataggagcagcactattccacgaagacctgattcgtctttaaagtcatctgttcagagtactaccctgatgaggcgtatgaagcttgttgatagtccttccaccaacacaaaaaatgtggaacgtaatgttgggcagagagacatttcattagcgtctcgtgcagtgatggctaataattctgcaactgctaagaaaagcaatcttacagaatcagctttagtgaaagatatttacactacatctcaggctgtttcagcacctattgttgtgcccagagacattttagaggacaaaacagtaagcaatgttcgtcgagggactggagagacagctgcagtcccagatgattttcggatccctgttcacagaagaaaaccctcacttagtggcagtgctgctgatagtgatagctcatcaagatcagtgttcactgaacctgatgtttgctcagagggtttgtctagcttaaaattctcctttgggctaactccatatcacaagaaagaagaatttggcgatgtggataatgaaggtattgcacaaatagcagaaaagatggaaagaacagtgtcgctggaccattctcagcagttaaatgatgataaatcctttgaatcaccatgctcaacaacagagactgccaaggtcaaatatgttagaggagttgctgtgccactggggaaaacaaagtctcttgttgagagatgggaaaaaagagagacttctagcactgattattcaccacaaactggttcttgtggtgatcgggcatcgagaaatgacaaccatccattccatctggcggaaccaagtacaacatttgaaaaggacctgtcaactgtagatgaagcgatggctcctgtcaatttagtgcggaaccatgatgaattcctaaatgctgtaaaacttcggctgacaaaactagagatgatgcggcatgtctttgaacaaagtggtattaaaggagcaattgctgcagtggcaaagctacctgacaatgctgttcaagcagatgttgttagtgctctcaaaggaaagcttgatcttttcaacctggaatttttctcaaattttctgcctgttcttgctgggttactgtgtagcaagactgaaaggcatgctatggtctctttggaaatgttgttggatcttataaagatttttggaccagtaattcattcagcattatcagcaaatttaggcgttggagttgacattcaggctgagcagaggttgcaacgttgttcacggtgctttaaccatttgcaaaagatccaacagagtctgaatccattgattctgcggggtggtcaaacagcacaacttgcacaagaactaagtctttcattgcaagatttggtggtgatctaggcaagatgatgtacaatgtatacgacagagtagataccattggttttggcgaaaagtgcccacagttgtgtagcttgtaattttgtcatagctttgcaagtgggttttgcaactgtgttttaacattgggctggcattcagcctggtcccctgttgtaaatgtgagcctagccgtgaatgagtctgtaattagccagccacatctgctgtgtgagcagccctgaacaaaaagactagttgaaaggaaacaaccgcaaaggggatcattttggttacaccccaggtggtaggatggctcatgtagcatgcggtgattggcaattccattctttgaaagcatctgtgtttaacgtatattttgtagaagtaaattgagttatgccatagtaacgatgactgattgggctaatatgccttttgtttcttcaactgaccaagaatactaagagtcggctagttttaagtgtc

SEQ ID NO: 78313 - DNA, 3505 bp, Zea Mays
gttttcactgcccagagaccaccaaaggaaaaaaaggggactcgctctcgccaactcccctgctccacagccacaagcccactcggatcccaatccgagccctactcgtcgtcgacgacgcgacggccccgcgtgcgaagccagccagccagccagccagccatcgccgtggaccggggagcccggagggatggaccccgagaagcgcggctacgagctccaaaattttgtggcgcatgatgcggaagttaggtccctgtctattggcaaaaagtctaggcgtgtgttcatcaccggtggcaatgatcgcaaggtcaaactgtgggccattggcaagcaaactccacttctgaccttgtccggccacacaagtgcggtggaggctgtgcagtttgattcagcagaggtgcttgtgcttgctggctcgtcaaatggttccatcaagctctgggacttggaagaagctaaagttgtgcggtctctcactgggcacaggtcaagttgcactgctgttgaattccatccatttggcgagttttttgcatctggttcgtcagatacagacctgaagatatgggacataaagaaaaaaggatacatacacacatataagggtcacagaggagcaattaaaacaatcaggtttacgcctgatggacgatgggttgtcactggtggggaagataacattgtgaaggtgtgggatttgacagctggaaagcttctacatgatttcaagttccatagtggacaaatcaactgtattgattttcaccctcaagaatttttgcttgcaacaggctctgctgataggacagtgaaattttgggatcttgaaacttttgaattgataggttcttctggacctgaggtattgcaagtttttttcttaaatcaagctggatctggttatgaaatcgataatttgaagaccacaaactatggcttctcaaattctttagcatgcatgttctataggcatggtaactacagtacattcttgctgtggccttgtattaatatctttgtctttcttataaatcgtaactgtaagaactttctcagaggaatttagctcgcatttccctacagctgattcagttttataagagttatggtctgacatctagcctgagcttcacggtaccggtgtacgttctatggtctttcacccagatggtaaaacccttttctgtggattagaccaaagcttaaaggtagtattctcttgggaaccagtaaggtgccatgatgttgttgacatgggttggagtaatttggctgaccttagtatttatgaagggaaactcttgggatgctcctaccatgagtgccgtgttggtctatgggctgctgatatatcagtgagtgtcattttttctatgccatgtgtttttttcctgcctcttctaacttccattcatggatccagctcattggaccctatgctcttggtgtattgcccaaagcgaatttttttgctgagcttgtgcagtctatggaagataatcctgtgaaaccagttgatagcactgcaaattctcgtcctgcttcagcaatggcacattcaagaagttcatacaaaatcaaggagtctgggattgctcaaagcagggttcgtggctcacatttgactccagcaagtacagataagaccaagaaagataggagcagcactattccacgaagacctgattcgtctttaaagtcatctgttcagagtactaccctgatgaggcgtatgaagcttgttgatagtccttccaccaacacaaaaaatgtggaacgtaatgttgggcagagagacatttcattagcgtctcgtgcagtgatggctaataattctgcaactgctaagaaaagcaatcttacagaatcagctttagtgaaagatatttacactacatctcaggctgtttcagcacctattgttgtgcccagagacattttagaggacaaaacagtaagcaatgttcgtcgagggactggagagacagctgcagtcccagatgattttcggatccctgttcacagaagaaaaccctcacttagtggcagtgctgctgatagtgatagctcatcaagatcagtgttcactgaacctgatgtttgctcagagggtttgtctagcttaaaattctcctttgggctaactccatatcacaagaaagaagaatttggcgatgtggataatgaaggtattgcacaaatagcagaaaagatggaaagaacagtgtcgctggaccattctcagcagttaaatgatgataaatcctttgaatcaccatgctcaacaacagagactgccaaggtcaaatatgttagaggagttgctgtgccactggggaaaacaaagtctcttgttgagagatgggaaaaaagagagacttctagcactgattattcaccacaaactggttcttgtggtgatcgggcatcgagaaatgacaaccatccattccatctggcggaaccaagtacaacatttgaaaaggacctgtcaactgtagatgaagcgatggctcctgtcaatttagtgcggaaccatgatgaattcctaaatgctgtaaaacttcggctgacaaaactagagatgatgcggcatgtctttgaacaaagtggtattaaaggagcaattgctgcagtggcaaagctacctgacaatgctgttcaagcagatgttgttagtgctctcaaaggaaagcttgatcttttcaacctggaatttttctcaaattttctgcctgttcttgctgggttactgtgtagcaagactgaaaggcatgctatggtctctttggaaatgttgttggatcttataaagatttttggaccagtaattcattcagcattatcagcaaatttaggcgttggagttgacattcaggctgagcagaggttgcaacgttgttcacggtgctttaaccatttgcaaaagatccaacagagtctgaatccattgattctgcggggtggtcaaacagcacaacttgcacaagaactaagtctttcattgcaagatttggtggtgatctaggcaagatgatgtacaatgtatacgacagagtagataccattggttttggcgaaaagtgcccacagttgtgtagcttgtaattttgtcatagctttgcaagtgggttttgcaactgtgttttaacattgggctggcattcagcctggtcccctgttgtaaatgtgagcctagccgtgaatgagtctgtaattagccagccacatctgctgtgtgagcagccctgaacaaaaagactagttgaaaggaaacaaccgcaaaggggatcattttggttacaccccaggtggtaggatggctcatgtagcatgcggtgattggcaattccattctttgaaagcatctgtgtttaacgtatattttgtagaagtaaattgagttatgccatagtaacgatgactgattgggctaatatgccttttgtttcttcaactgaccaagaatactaagagtcggctagttttaagtgtc

SEQ ID NO: 78314 - DNA, 4189 bp, Zea Mays
ctcgttttcactgcccagagaccaccaaaggaaaaaaaggggactcgctctcgccaactcccctgctccacagccacaagcccactcggatcccaatccgagccctactcgtcgtcgacgacgcgacggccccgcgtgcgaagccagccagccagccagccagccatcgccgtggaccggggagcccggagggatggaccccgagaagcgcggctacgagctccgtatccttccactccttcgtcttcgagtcgccgctccgtttcttgattcgatttggctcgcaggcggaaggagccgccgtcccgcgaagcaacgcgggcgggcatttgctcccaccaggcaccagtagagtgctggtactatatacgccctccccagattcttgtgttcccttagtcttgggctgtttctcgtagtagattctcgaaatttcctgccgcctccgtacttcgttggcaatcgtcgtcaagaaaggaccgttcgaagcgtccgagctaaacctgaagaggttggaactggttcagcgaacagttcccccggccccctctgttcccgatttagggtatagtgccaattccgaaatctgttttgctttaactggatgcctatgtctttatgacgacccagctatttctggctctgaatttttcttttcttttttaaacgaggatttacccccccccccccccccccccccacatttacattagtgttaacggaaatgcatgtgccagtcctgtttcacttaggccccgtttcaatctcacgggataaactttagcttcctgctaaactttagctatataaattgaagtgctaaagtttagcttcaattaccaccattagctctcctgtttagattacaaatagctaaaagtagctaaaaaaaagctgctaaagtttatctcgcgagattggaacatggccttaatccctcagtcactctcgtcgaatgcaaaagatagtacctaggaggagactgtggccactagttaaatgcgcggaagtatgccttgcgcaacttgatatctccttaactccgtgtcccgaattagaaaattttgtggcgcatgatgcggaagttaggtccctgtctattggcaaaaagtctaggcgtgtgttcatcaccggtggcaatgatcgcaaggtcaaactgtgggccattggcaagcaaactccacttctgaccttgtccggccacacaagtgcggtggaggctgtgcagtttgattcagcagaggtgcttgtgcttgctggctcgtcaaatggttccatcaagctctgggacttggaagaagctaaagttgtgcggtctctcactgggcacaggtcaagttgcactgctgttgaattccatccatttggcgagttttttgcatctggttcgtcagatacagacctgaagatatgggacataaagaaaaaaggatacatacacacatataagggtcacagaggagcaattaaaacaatcaggtttacgcctgatggacgatgggttgtcactggtggggaagataacattgtgaaggtgtgggatttgacagctggaaagcttctacatgatttcaagttccatagtggacaaatcaactgtattgattttcaccctcaagaatttttgcttgcaacaggctctgctgataggacagtgaaattttgggatcttgaaacttttgaattgataggttcttctggacctgaggtattgcaagtttttttcttaaatcaagctggatctggttatgaaatcgataatttgaagaccacaaactatggcttctcaaattctttagcatgcatgttctataggcatgaggaatttagctcgcatttccctacagctgattcagttttataagagttatggtctgacatctagcctgagcttcacggtaccggtgtacgttctatggtctttcacccagatggtaaaacccttttctgtggattagaccaaagcttaaaggtattctcttgggaaccagtaaggtgccatgatgttgttgacatgggttggagtaatttggctgaccttagtatttatgaagggaaactcttgggatgctcctaccatgagtgccgtgttggtctatgggctgctgatatatcactcattggaccctatgctcttggtgtattgcccaaagcgaatttttttgctgagcttgtgcagtctatggaagataatcctgtgaaaccagttgatagcactgcaaattctcgtcctgcttcagcaatggcacattcaagaagttcatacaaaatcaaggagtctgggattgctcaaagcagggttcgtggctcacatttgactccagcaagtacagataagaccaagaaagataggagcagcactattccacgaagacctgattcgtctttaaagtcatctgttcagagtactaccctgatgaggcgtatgaagcttgttgatagtccttccaccaacacaaaaaatgtggaacgtaatgttgggcagagagacatttcattagcgtctcgtgcagtgatggctaataattctgcaactgctaagaaaagcaatcttacagaatcagctttagtgaaagatatttacactacatctcaggctgtttcagcacctattgttgtgcccagagacattttagaggacaaaacagtaagcaatgttcgtcgagggactggagagacagctgcagtcccagatgattttcggatccctgttcacagaagaaaaccctcacttagtggcagtgctgctgatagtgatagctcatcaagatcagtgttcactgaacctgatgtttgctcagagggtttgtctagcttaaaattctcctttgggctaactccatatcacaagaaagaagaatttggcgatgtggataatgaaggtattgcacaaatagcagaaaagatggaaagaacagtgtcgctggaccattctcagcagttaaatgatgataaatcctttgaatcaccatgctcaacaacagagactgccaaggtcaaatatgttagaggagttgctgtgccactggggaaaacaaagtctcttgttgagagatgggaaaaaagagagacttctagcactgattattcaccacaaactggttcttgtggtgatcgggcatcgagaaatgacaaccatccattccatctggcggaaccaagtacaacatttgaaaaggacctgtcaactgtagatgaagcgatggctcctgtcaatttagtgcggaaccatgatgaattcctaaatgctgtaaaacttcggctgacaaaactagagatgatgcggcatgtctttgaacaaagtggtattaaaggagcaattgctgcagtggcaaagctacctgacaatgctgttcaagcagatgttgttagtgctctcaaaggaaagcttgatcttttcaacctggaatttttctcaaattttctgcctgttcttgctgggttactgtgtagcaagactgaaaggcatgctatggtctctttggaaatgttgttggatcttataaagatttttggaccagtaattcattcagcattatcagcaaatttaggcgttggagttgacattcaggctgagcagaggttgcaacgttgttcacggtgctttaaccatttgcaaaagatccaacagagtctgaatccattgattctgcggggtggtcaaacagcacaacttgcacaagaactaagtctttcattgcaagatttggtggtgatctaggcaagatgatgtacaatgtatacgacagagtagataccattggttttggcgaaaagtgcccacagttgtgtagcttgtaattttgtcatagctttgcaagtgggttttgcaactgtgttttaacattgggctggcattcagcctggtcccctgttgtaaatgtgagcctagccgtgaatgagtctgtaattagccagccacatctgctgtgtgagcagccctgaacaaaaagactagttgaaaggaaacaaccgcaaaggggatcattttggttacaccccaggtggtaggatggctcatgtagcatgcggtgattggcaattccattctttgaaagcatctgtgtttaacgtatattttgtagaagtaaattgagttatgccatagtaacgatgactgattgggctaatatgccttttgtttcttcaactgaccaagaatactaagagtcggctagttttaagtgtc

SEQ ID NO: 78315 - DNA, 3474 bp, Zea Mays
ctcgttttcactgcccagagaccaccaaaggaaaaaaaggggactcgctctcgccaactcccctgctccacagccacaagcccactcggatcccaatccgagccctactcgtcgtcgacgacgcgacggccccgcgtgcgaagccagccagccagccagccagccatcgccgtggaccggggagcccggagggatggaccccgagaagcgcggctacgagctccaaaattttgtggcgcatgatgcggaagttaggtccctgtctattggcaaaaagtctaggcgtgtgttcatcaccggtggcaatgatcgcaaggtcaaactgtgggccattggcaagcaaactccacttctgaccttgtccggccacacaagtgcggtggaggctgtgcagtttgattcagcagaggtgcttgtgcttgctggctcgtcaaatggttccatcaagctctgggacttggaagaagctaaagttgtgcggtctctcactgggcacaggtcaagttgcactgctgttgaattccatccatttggcgagttttttgcatctggttcgtcagatacagacctgaagatatgggacataaagaaaaaaggatacatacacacatataagggtcacagaggagcaattaaaacaatcaggtttacgcctgatggacgatgggttgtcactggtggggaagataacattgtgaaggtgtgggatttgacagctggaaagcttctacatgatttcaagttccatagtggacaaatcaactgtattgattttcaccctcaagaatttttgcttgcaacaggctctgctgataggacagtgaaattttgggatcttgaaacttttgaattgataggttcttctggacctgaggtattgcaagtttttttcttaaatcaagctggatctggttatgaaatcgataatttgaagaccacaaactatggcttctcaaattctttagcatgcatgttctataggcatggtaactacagtacattcttgctgtggccttgtattaatatctttgtctttcttataaatcgtaactgtaagaactttctcagaggaatttagctcgcatttccctacagctgattcagttttataagagttatggtctgacatctagcctgagcttcacgtatgtgttgttccctgttttttaaccgttgctctaaaagcacatgaggagaacatccatcttcctcttctgtgatagcttacatgactcctctctccagggtaccggtgtacgttctatggtctttcacccagatggtaaaacccttttctgtggattagaccaaagcttaaaggtattctcttgggaaccagtaaggtgccatgatgttgttgacatgggttggagtaatttggctgaccttagtatttatgaagggaaactcttgggatgctcctaccatgagtgccgtgttggtctatgggctgctgatatatcatctatggaagataatcctgtgaaaccagttgatagcactgcaaattctcgtcctgcttcagcaatggcacattcaagaagttcatacaaaatcaaggagtctgggattgctcaaagcagggttcgtggctcacatttgactccagcaagtacagataagaccaagaaagataggagcagcactattccacgaagacctgattcgtctttaaagtcatctgttcagagtactaccctgatgaggcgtatgaagcttgttgatagtccttccaccaacacaaaaaatgtggaacgtaatgttgggcagagagacatttcattagcgtctcgtgcagtgatggctaataattctgcaactgctaagaaaagcaatcttacagaatcagctttagtgaaagatatttacactacatctcaggctgtttcagcacctattgttgtgcccagagacattttagaggacaaaacagtaagcaatgttcgtcgagggactggagagacagctgcagtcccagatgattttcggatccctgttcacagaagaaaaccctcacttagtggcagtgctgctgatagtgatagctcatcaagatcagtgttcactgaacctgatgtttgctcagagggtttgtctagcttaaaattctcctttgggctaactccatatcacaagaaagaagaatttggcgatgtggataatgaaggtattgcacaaatagcagaaaagatggaaagaacagtgtcgctggaccattctcagcagttaaatgatgataaatcctttgaatcaccatgctcaacaacagagactgccaaggtcaaatatgttagaggagttgctgtgccactggggaaaacaaagtctcttgttgagagatgggaaaaaagagagacttctagcactgattattcaccacaaactggttcttgtggtgatcgggcatcgagaaatgacaaccatccattccatctggcggaaccaagtacaacatttgaaaaggacctgtcaactgtagatgaagcgatggctcctgtcaatttagtgcggaaccatgatgaattcctaaatgctgtaaaacttcggctgacaaaactagagatgatgcggcatgtctttgaacaaagtggtattaaaggagcaattgctgcagtggcaaagctacctgacaatgctgttcaagcagatgttgttagtgctctcaaaggaaagcttgatcttttcaacctggaatttttctcaaattttctgcctgttcttgctgggttactgtgtagcaagactgaaaggcatgctatggtctctttggaaatgttgttggatcttataaagatttttggaccagtaattcattcagcattatcagcaaatttaggcgttggagttgacattcaggctgagcagaggttgcaacgttgttcacggtgctttaaccatttgcaaaagatccaacagagtctgaatccattgattctgcggggtggtcaaacagcacaacttgcacaagaactaagtctttcattgcaagatttggtggtgatctaggcaagatgatgtacaatgtatacgacagagtagataccattggttttggcgaaaagtgcccacagttgtgtagcttgtaattttgtcatagctttgcaagtgggttttgcaactgtgttttaacattgggctggcattcagcctggtcccctgttgtaaatgtgagcctagccgtgaatgagtctgtaattagccagccacatctgctgtgtgagcagccctgaacaaaaagactagttgaaaggaaacaaccgcaaaggggatcattttggttacaccccaggtggtaggatggctcatgtagcatgcggtgattggcaattccattctttgaaagcatctgtgtttaacgtatattttgtagaagtaaattgagttatgccatagtaacgatgactgattgggctaatatgccttttgtttcttcaactgaccaagaatactaagagtcggctagttttaagtgtc

SEQ ID NO: 78316 - DNA, 3116 bp, Zea Mays
ccgctccacccctctcgttttcactgcccagagaccaccaaaggaaaaaaaggggactcgctctcgccaactcccctgctccacagccacaagcccactcggatcccaatccgagccctactcgtcgtcgacgacgcgacggccccgcgtgcgaagccagccagccagccagccagccatcgccgtggaccggggagcccggagggatggaccccgagaagcgcggctacgagctccaaaattttgtggcgcatgatgcggaagttaggtccctgtctattggcaaaaagtctaggcgtgtgttcatcaccggtggcaatgatcgcaaggtcaaactgtgggccattggcaagcaaactccacttctgaccttgtccggccacacaagtgcggtggaggctgtgcagtttgattcagcagaggtgcttgtgcttgctggctcgtcaaatggttccatcaagctctgggacttggaagaagctaaagttgtgcggtctctcactgggcacaggtcaagttgcactgctgttgaattccatccatttggcgagttttttgcatctggttcgtcagatacagacctgaagatatgggacataaagaaaaaaggatacatacacacatataagggtcacagaggagcaattaaaacaatcaggtttacgcctgatggacgatgggttgtcactggtggggaagataacattgtgaaggtgtgggatttgacagctggaaagcttctacatgatttcaagttccatagtggacaaatcaactgtattgattttcaccctcaagaatttttgcttgcaacaggctctgctgataggacagtgaaattttgggatcttgaaacttttgaattgataggttcttctggacctgagggtaccggtgtacgttctatggtctttcacccagatggtaaaacccttttctgtggattagaccaaagcttaaaggtattctcttgggaaccagtaaggtgccatgatgttgttgacatgggttggagtaatttggctgaccttagtatttatgaagggaaactcttgggatgctcctaccatgagtgccgtgttggtctatgggctgctgatatatcatctatggaagataatcctgtgaaaccagttgatagcactgcaaattctcgtcctgcttcagcaatggcacattcaagaagttcatacaaaatcaaggagtctgggattgctcaaagcagggttcgtggctcacatttgactccagcaagtacagataagaccaagaaagataggagcagcactattccacgaagacctgattcgtctttaaagtcatctgttcagagtactaccctgatgaggcgtatgaagcttgttgatagtccttccaccaacacaaaaaatgtggaacgtaatgttgggcagagagacatttcattagcgtctcgtgcagtgatggctaataattctgcaactgctaagaaaagcaatcttacagaatcagctttagtgaaagatatttacactacatctcaggctgtttcagcacctattgttgtgcccagagacattttagaggacaaaacagtaagcaatgttcgtcgagggactggagagacagctgcagtcccagatgattttcggatccctgttcacagaagaaaaccctcacttagtggcagtgctgctgatagtgatagctcatcaagatcagtgttcactgaacctgatgtttgctcagagggtttgtctagcttaaaattctcctttgggctaactccatatcacaagaaagaagaatttggcgatgtggataatgaaggtattgcacaaatagcagaaaagatggaaagaacagtgtcgctggaccattctcagcagttaaatgatgataaatcctttgaatcaccatgctcaacaacagagactgccaaggtcaaatatgttagaggagttgctgtgccactggggaaaacaaagtctcttgttgagagatgggaaaaaagagagacttctagcactgattattcaccacaaactggttcttgtggtgatcgggcatcgagaaatgacaaccatccattccatctggcggaaccaagtacaacatttgaaaaggacctgtcaactgtagatgaagcgatggctcctgtcaatttagtgcggaaccatgatgaattcctaaatgctgtaaaacttcggctgacaaaactagagatgatgcggcatgtctttgaacaaagtggtattaaaggagcaattgctgcagtggcaaagctacctgacaatgctgttcaagcagatgttgttagtgctctcaaaggaaagcttgatcttttcaacctggaatttttctcaaattttctgcctgttcttgctgggttactgtgtagcaagactgaaaggcatgctatggtctctttggaaatgttgttggatcttataaagatttttggaccagtaattcattcagcattatcagcaaatttaggcgttggagttgacattcaggctgagcagaggttgcaacgttgttcacggtgctttaaccatttgcaaaagatccaacagagtctgaatccattgattctgcggggtggtcaaacagcacaacttgcacaagaactaagtctttcattgcaagatttggtggtgatctaggcaagatgatgtacaatgtatacgacagagtagataccattggttttggcgaaaagtgcccacagttgtgtagcttgtaattttgtcatagctttgcaagtgggttttgcaactgtgttttaacattgggctggcattcagcctggtcccctgttgtaaatgtgagcctagccgtgaatgagtctgtaattagccagccacatctgctgtgtgagcagccctgaacaaaaagactagttgaaaggaaacaaccgcaaaggggatcattttggttacaccccaggtggtaggatggctcatgtagcatgcggtgattggcaattccattctttgaaagcatctgtgtttaacgtatattttgtagaagtaaattgagttatgccatagtaacgatgactgattgggctaatatgccttttgtttcttcaactgaccaagaatactaagagtcggctagttttaagtgtc

SEQ ID NO: 78317 - DNA, 4098 bp, Zea Mays
ccacgccgctccacccctctcgttttcactgcccagagaccaccaaaggaaaaaaaggggactcgctctcgccaactcccctgctccacagccacaagcccactcggatcccaatccgagccctactcgtcgtcgacgacgcgacggccccgcgtgcgaagccagccagccagccagccagccatcgccgtggaccggggagcccggagggatggaccccgagaagcgcggctacgagctccaaaattttgtggcgcatgatgcggaagttaggtccctgtctattggcaaaaagtctaggcgtgtgttcatcaccggtggcaatgatcgcaaggtcaaactgtgggccattggcaagcaaactccacttctgaccttgtccggccacacaagtgcggtggaggctgtgcagtttgattcagcagaggtgcttgtgcttgctggctcgtcaaatggttccatcaagctctgggacttggaagaagctaaagttgtgcggtctctcactgggcacaggtcaagttgcactgctgttgaattccatccatttggcgagttttttgcatctggttcgtcagatacagacctgaagatatgggacataaagaaaaaaggatacatacacacatataagggtcacagaggagcaattaaaacaatcaggtttacgcctgatggacgatgggttgtcactggtggggaagataacattgtgaaggtgtgggatttgacagctggaaagcttctacatgatttcaagttccatagtggacaaatcaactgtattgattttcaccctcaagaatttttgcttgcaacaggctctgctgataggacagtgaaattttgggatcttgaaacttttgaattgataggttcttctggacctgagggtaccggtgtacgttctatggtctttcacccagatggtaaaacccttttctgtggattagaccaaagcttaaaggtaggtcgtattctgatcaatgatttcaagtcgcctggtcgcctggtcgatccctgggaccgaccaggcgactagtcgcgattaggcgactagtcgcgattaggcgacgactagggcgattagtcgactcctagtcgttccctggtcgtcctagtctagtagttatacttatatagctatatatataaatgtacatgtatgcaactacattatataaattagaaagtcactacttagcacaggcttaggattagggcagccagcaaccatccactaatttggcagaactgcagagaagggggagatggggcagagcatgaggaaccttgagatgacgagctcatctcctcaatggtgcaggtctgctggagcttgggaaggggcagggtggagactgcagctggtgaaccttaagacagtctccgcatgtggagactgtagcaggcgagcatgggaaggggcagggtggtgtagccgctgatgatgtagccgtcggtgagctgtaggtctgaaggggcagccaccggcgaccaagtgtgaataagggctggaacagtcgagctagcaagagaggagagtaggagacgtagtgcactgtttggcggctaggtattacagaggagaggagagggtagtctaaagtatactgtagatgggttgaaaatggcccaataacaaaaccctagccaggacgaccaggaaacagtaatcgggcgattagtcgccctaatcggcgattagtcggccgaccagcctatctagtcgagtcgtccagctaatcgagcccaaatagccgaccagcccgactaatcgcgacttaatcgcgattagtcggacgacttgaaatcattgattctgataggttcttgattgatatttatttgcttggtacttgagaacatgaatatttccaggtattctcttgggaaccagtaaggtgccatgatgttgttgacatgggttggagtaatttggctgaccttagtatttatgaagggaaactcttgggatgctcctaccatgagtgccgtgttggtctatgggctgctgatatatcactcattggaccctatgctcttggtgtattgcccaaagcgaatttttttgctgagcttgtgcagtctatggaagataatcctgtgaaaccagttgatagcactgcaaattctcgtcctgcttcagcaatggcacattcaagaagttcatacaaaatcaaggagtctgggattgctcaaagcagggttcgtggctcacatttgactccagcaagtacagataagaccaagaaagataggagcagcactattccacgaagacctgattcgtctttaaagtcatctgttcagagtactaccctgatgaggcgtatgaagcttgttgatagtccttccaccaacacaaaaaatgtggaacgtaatgttgggcagagagacatttcattagcgtctcgtgcagtgatggctaataattctgcaactgctaagaaaagcaatcttacagaatcagctttagtgaaagatatttacactacatctcaggctgtttcagcacctattgttgtgcccagagacattttagaggacaaaacagtaagcaatgttcgtcgagggactggagagacagctgcagtcccagatgattttcggatccctgttcacagaagaaaaccctcacttagtggcagtgctgctgatagtgatagctcatcaagatcagtgttcactgaacctgatgtttgctcagagggtttgtctagcttaaaattctcctttgggctaactccatatcacaagaaagaagaatttggcgatgtggataatgaaggtattgcacaaatagcagaaaagatggaaagaacagtgtcgctggaccattctcagcagttaaatgatgataaatcctttgaatcaccatgctcaacaacagagactgccaaggtcaaatatgttagaggagttgctgtgccactggggaaaacaaagtctcttgttgagagatgggaaaaaagagagacttctagcactgattattcaccacaaactggttcttgtggtgatcgggcatcgagaaatgacaaccatccattccatctggcggaaccaagtacaacatttgaaaaggacctgtcaactgtagatgaagcgatggctcctgtcaatttagtgcggaaccatgatgaattcctaaatgctgtaaaacttcggctgacaaaactagagatgatgcggcatgtctttgaacaaagtggtattaaaggagcaattgctgcagtggcaaagctacctgacaatgctgttcaagcagatgttgttagtgctctcaaaggaaagcttgatcttttcaacctggaatttttctcaaattttctgcctgttcttgctgggttactgtgtagcaagactgaaaggcatgctatggtctctttggaaatgttgttggatcttataaagatttttggaccagtaattcattcagcattatcagcaaatttaggcgttggagttgacattcaggctgagcagaggttgcaacgttgttcacggtgctttaaccatttgcaaaagatccaacagagtctgaatccattgattctgcggggtggtcaaacagcacaacttgcacaagaactaagtctttcattgcaagatttggtggtgatctaggcaagatgatgtacaatgtatacgacagagtagataccattggttttggcgaaaagtgcccacagttgtgtagcttgtaattttgtcatagctttgcaagtgggttttgcaactgtgttttaacattgggctggcattcagcctggtcccctgttgtaaatgtgagcctagccgtgaatgagtctgtaattagccagccacatctgctgtgtgagcagccctgaacaaaaagactagttgaaaggaaacaaccgcaaaggggatcattttggttacaccccaggtggtaggatggctcatgtagcatgcggtgattggcaattccattctttgaaagcatctgtgtttaacgtatattttgtagaagtaaattgagttatgccatagtaacgatgactgattgggctaatatgccttttgtttcttcaactgaccaagaatactaagagtcggctagttttaagtgtc

SEQ ID NO: 78318 - DNA, 3494 bp, Zea Mays
ccacgccgctccacccctctcgttttcactgcccagagaccaccaaaggaaaaaaaggggactcgctctcgccaactcccctgctccacagccacaagcccactcggatcccaatccgagccctactcgtcgtcgacgacgcgacggccccgcgtgcgaagccagccagccagccagccagccatcgccgtggaccggggagcccggagggatggaccccgagaagcgcggctacgagctccaaaattttgtggcgcatgatgcggaagttaggtccctgtctattggcaaaaagtctaggcgtgtgttcatcaccggtggcaatgatcgcaaggtcaaactgtgggccattggcaagcaaactccacttctgaccttgtccggccacacaagtgcggtggaggctgtgcagtttgattcagcagaggtgcttgtgcttgctggctcgtcaaatggttccatcaagctctgggacttggaagaagctaaagttgtgcggtctctcactgggcacaggtcaagttgcactgctgttgaattccatccatttggcgagttttttgcatctggttcgtcagatacagacctgaagatatgggacataaagaaaaaaggatacatacacacatataagggtcacagaggagcaattaaaacaatcaggtttacgcctgatggacgatgggttgtcactggtggggaagataacattgtgaaggtgtgggatttgacagctggaaagcttctacatgatttcaagttccatagtggacaaatcaactgtattgattttcaccctcaagaatttttgcttgcaacaggctctgctgataggacagtgaaattttgggatcttgaaacttttgaattgataggttcttctggacctgaggtattgcaagtttttttcttaaatcaagctggatctggttatgaaatcgataatttgaagaccacaaactatggcttctcaaattctttagcatgcatgttctataggcatggtaactacagtacattcttgctgtggccttgtattaatatctttgtctttcttataaatcgtaactgtaagaactttctcagaggaatttagctcgcatttccctacagctgattcagttttataagagttatggtctgacatctagcctgagcttcacgtatgtgttgttccctgttttttaaccgttgctctaaaagcacatgaggagaacatccatcttcctcttctgtgatagcttacatgactcctctctccagggtaccggtgtacgttctatggtctttcacccagatggtaaaacccttttctgtggattagaccaaagcttaaagggaaactcttgggatgctcctaccatgagtgccgtgttggtctatgggctgctgatatatcatctatggaagataatcctgtgaaaccagttgatagcactgcaaattctcgtcctgcttcagcaatggcacattcaagaagttcatacaaaatcaaggagtctgggattgctcaaagcagggttcgtggctcacatttgactccagcaagtacagataagaccaagaaagataggagcagcactattccacgaagacctgattcgtctttaaagtcatctgttcagagtactaccctgatgaggcgtatgaagcttgttgatagtccttccaccaacacaaaaaatgtggaacgtaatgttgggcagagagacatttcattagcgtctcgtgcagtgatggctaataattctgcaactgctaagaaaagcaatcttacagaatcagctttagtgaaagatatttacactacatctcaggctgtttcagcacctattgttgtgcccagagacattttagaggacaaaacagtaagcaatgttcgtcgagggactggagagacagctgcagtcccagatgattttcggatccctgttcacagaagaaaaccctcacttagtggcagtgctgctgatagtgatagctcatcaagatcagtgttcactgaacctgatgtttgctcagagggtttgtctagcttaaaattctcctttgggctaactccatatcacaagaaagaagaatttggcgatgtggataatgaaggtattgcacaaatagcagaaaagatggaaagaacagtgtcgctggaccattctcagcagttaaatgatgataaatgtacagccatttctctttgttcttaaacattgacacggtgtttgctagtatggtgatgtaacagtagaactctattttatgcagcctttgaatcaccatgctcaacaacagagactgccaaggtcaaatatgttagaggagttgctgtgccactggggaaaacaaagtctcttgttgagagatgggaaaaaagagagacttctagcactgattattcaccacaaactggttcttgtggtgatcgggcatcgagaaatgacaaccatccattccatctggcggaaccaagtacaacatttgaaaaggacctgtcaactgtagatgaagcgatggctcctgtcaatttagtgcggaaccatgatgaattcctaaatgctgtaaaacttcggctgacaaaactagagatgatgcggcatgtctttgaacaaagtggtattaaaggagcaattgctgcagtggcaaagctacctgacaatgctgttcaagcagatgttgttagtgctctcaaaggaaagcttgatcttttcaacctggaatttttctcaaattttctgcctgttcttgctgggttactgtgtagcaagactgaaaggcatgctatggtctctttggaaatgttgttggatcttataaagatttttggaccagtaattcattcagcattatcagcaaatttaggcgttggagttgacattcaggctgagcagaggttgcaacgttgttcacggtgctttaaccatttgcaaaagatccaacagagtctgaatccattgattctgcggggtggtcaaacagcacaacttgcacaagaactaagtctttcattgcaagatttggtggtgatctaggcaagatgatgtacaatgtatacgacagagtagataccattggttttggcgaaaagtgcccacagttgtgtagcttgtaattttgtcatagctttgcaagtgggttttgcaactgtgttttaacattgggctggcattcagcctggtcccctgttgtaaatgtgagcctagccgtgaatgagtctgtaattagccagccacatctgctgtgtgagcagccctgaacaaaaagactagttgaaaggaaacaaccgcaaaggggatcattttggttacaccccaggtggtaggatggctcatgtagcatgcggtgattggcaattccattctttgaaagcatctgtgtttaacgtatattttgtagaagtaaattgagttatgccatagtaacgatgactgattgggctaatatgccttttgtttcttcaactgaccaagaatactaagagtcggctagttttaagtgtc

SEQ ID NO: 78319 - DNA, 3149 bp, Zea Mays
acccacgccgctccacccctctcgttttcactgcccagagaccaccaaaggaaaaaaaggggactcgctctcgccaactcccctgctccacagccacaagcccactcggatcccaatccgagccctactcgtcgtcgacgacgcgacggccccgcgtgcgaagccagccagccagccagccagccatcgccgtggaccggggagcccggagggatggaccccgagaagcgcggctacgagctccaaaattttgtggcgcatgatgcggaagttaggtccctgtctattggcaaaaagtctaggcgtgtgttcatcaccggtggcaatgatcgcaaggtcaaactgtgggccattggcaagcaaactccacttctgaccttgtccggccacacaagtgcggtggaggctgtgcagtttgattcagcagaggtgcttgtgcttgctggctcgtcaaatggttccatcaagctctgggacttggaagaagctaaagttgtgcggtctctcactgggcacaggtcaagttgcactgctgttgaattccatccatttggcgagttttttgcatctggttcgtcagatacagacctgaagatatgggacataaagaaaaaaggatacatacacacatataagggtcacagaggagcaattaaaacaatcaggtttacgcctgatggacgatgggttgtcactggtggggaagataacattgtgaaggtgtgggatttgacagctggaaagcttctacatgatttcaagttccatagtggacaaatcaactgtattgattttcaccctcaagaatttttgcttgcaacaggctctgctgataggacagtgaaattttgggatcttgaaacttttgaattgataggttcttctggacctgagggtaccggtgtacgttctatggtctttcacccagatggtaaaacccttttctgtggattagaccaaagcttaaaggtattctcttgggaaccagtaaggtgccatgatgttgttgacatgggttggagtaatttggctgaccttagtatttatgaagggaaactcttgggatgctcctaccatgagtgccgtgttggtctatgggctgctgatatatcacgaatttttttgctgagcttgtgcagtctatggaagataatcctgtgaaaccagttgatagcactgcaaattctcgtcctgcttcagcaatggcacattcaagaagttcatacaaaatcaaggagtctgggattgctcaaagcagggttcgtggctcacatttgactccagcaagtacagataagaccaagaaagataggagcagcactattccacgaagacctgattcgtctttaaagtcatctgttcagagtactaccctgatgaggcgtatgaagcttgttgatagtccttccaccaacacaaaaaatgtggaacgtaatgttgggcagagagacatttcattagcgtctcgtgcagtgatggctaataattctgcaactgctaagaaaagcaatcttacagaatcagctttagtgaaagatatttacactacatctcaggctgtttcagcacctattgttgtgcccagagacattttagaggacaaaacagtaagcaatgttcgtcgagggactggagagacagctgcagtcccagatgattttcggatccctgttcacagaagaaaaccctcacttagtggcagtgctgctgatagtgatagctcatcaagatcagtgttcactgaacctgatgtttgctcagagggtttgtctagcttaaaattctcctttgggctaactccatatcacaagaaagaagaatttggcgatgtggataatgaaggtattgcacaaatagcagaaaagatggaaagaacagtgtcgctggaccattctcagcagttaaatgatgataaatcctttgaatcaccatgctcaacaacagagactgccaaggtcaaatatgttagaggagttgctgtgccactggggaaaacaaagtctcttgttgagagatgggaaaaaagagagacttctagcactgattattcaccacaaactggttcttgtggtgatcgggcatcgagaaatgacaaccatccattccatctggcggaaccaagtacaacatttgaaaaggacctgtcaactgtagatgaagcgatggctcctgtcaatttagtgcggaaccatgatgaattcctaaatgctgtaaaacttcggctgacaaaactagagatgatgcggcatgtctttgaacaaagtggtattaaaggagcaattgctgcagtggcaaagctacctgacaatgctgttcaagcagatgttgttagtgctctcaaaggaaagcttgatcttttcaacctggaatttttctcaaattttctgcctgttcttgctgggttactgtgtagcaagactgaaaggcatgctatggtctctttggaaatgttgttggatcttataaagatttttggaccagtaattcattcagcattatcagcaaatttaggcgttggagttgacattcaggctgagcagaggttgcaacgttgttcacggtgctttaaccatttgcaaaagatccaacagagtctgaatccattgattctgcggggtggtcaaacagcacaacttgcacaagaactaagtctttcattgcaagatttggtggtgatctaggcaagatgatgtacaatgtatacgacagagtagataccattggttttggcgaaaagtgcccacagttgtgtagcttgtaattttgtcatagctttgcaagtgggttttgcaactgtgttttaacattgggctggcattcagcctggtcccctgttgtaaatgtgagcctagccgtgaatgagtctgtaattagccagccacatctgctgtgtgagcagccctgaacaaaaagactagttgaaaggaaacaaccgcaaaggggatcattttggttacaccccaggtggtaggatggctcatgtagcatgcggtgattggcaattccattctttgaaagcatctgtgtttaacgtatattttgtagaagtaaattgagttatgccatagtaacgatgactgattgggctaatatgccttttgtttcttcaactgaccaagaatactaagagtcggctagttttaagtgtc

SEQ ID NO: 78320 - DNA, 3505 bp, Zea Mays
ggagacgacaacatctccactcccccacccacccacgccgctccacccctctcgttttcactgcccagagaccaccaaaggaaaaaaaggggactcgctctcgccaactcccctgctccacagccacaagcccactcggatcccaatccgagccctactcgtcgtcgacgacgcgacggccccgcgtgcgaagccagccagccagccagccagccatcgccgtggaccggggagcccggagggatggaccccgagaagcgcggctacgagctccaaaattttgtggcgcatgatgcggaagttaggtccctgtctattggcaaaaagtctaggcgtgtgttcatcaccggtggcaatgatcgcaaggtcaaactgtgggccattggcaagcaaactccacttctgaccttgtccggccacacaagtgcggtggaggctgtgcagtttgattcagcagaggtgcttgtgcttgctggctcgtcaaatggttccatcaagctctgggacttggaagaagctaaagttgtgcggtctctcactgggcacaggtcaagttgcactgctgttgaattccatccatttggcgagttttttgcatctggttcgtcagatacagacctgaagatatgggacataaagaaaaaaggatacatacacacatataagggtcacagaggagcaattaaaacaatcaggtttacgcctgatggacgatgggttgtcactggtggggaagataacattgtgaaggtgtgggatttgacagctggaaagcttctacatgatttcaagttccatagtggacaaatcaactgtattgattttcaccctcaagaatttttgcttgcaacaggctctgctgataggacagtgaaattttgggatcttgaaacttttgaattgataggttcttctggacctgaggtattgcaagtttttttcttaaatcaagctggatctggttatgaaatcgataatttgaagaccacaaactatggcttctcaaattctttagcatgcatgttctataggcatggtaactacagtacattcttgctgtggccttgtattaatatctttgtctttcttataaatcgtaactgtaagaactttctcagaggaatttagctcgcatttccctacagctgattcagttttataagagttatggtctgacatctagcctgagcttcacgtatgtgttgttccctgttttttaaccgttgctctaaaagcacatgaggagaacatccatcttcctcttctgtgatagcttacatgactcctctctccagggtaccggtgtacgttctatggtctttcacccagatggtaaaacccttttctgtggattagaccaaagcttaaagggaaactcttgggatgctcctaccatgagtgccgtgttggtctatgggctgctgatatatcactcattggaccctatgctcttggtgtattgcccaaagcgaatttttttgctgagcttgtgcagtctatggaagataatcctgtgaaaccagttgatagcactgcaaattctcgtcctgcttcagcaatggcacattcaagaagttcatacaaaatcaaggagtctgggattgctcaaagcagggttcgtggctcacatttgactccagcaagtacagataagaccaagaaagataggagcagcactattccacgaagacctgattcgtctttaaagtcatctgttcagagtactaccctgatgaggcgtatgaagcttgttgatagtccttccaccaacacaaaaaatgtggaacgtaatgttgggcagagagacatttcattagcgtctcgtgcagtgatggctaataattctgcaactgctaagaaaagcaatcttacagaatcagctttagtgaaagatatttacactacatctcaggctgtttcagcacctattgttgtgcccagagacattttagaggacaaaacagtaagcaatgttcgtcgagggactggagagacagctgcagtcccagatgattttcggatccctgttcacagaagaaaaccctcacttagtggcagtgctgctgatagtgatagctcatcaagatcagtgttcactgaacctgatgtttgctcagagggtttgtctagcttaaaattctcctttgggctaactccatatcacaagaaagaagaatttggcgatgtggataatgaaggtattgcacaaatagcagaaaagatggaaagaacagtgtcgctggaccattctcagcagttaaatgatgataaatcctttgaatcaccatgctcaacaacagagactgccaaggtcaaatatgttagaggagttgctgtgccactggggaaaacaaagtctcttgttgagagatgggaaaaaagagagacttctagcactgattattcaccacaaactggttcttgtggtgatcgggcatcgagaaatgacaaccatccattccatctggcggaaccaagtacaacatttgaaaaggacctgtcaactgtagatgaagcgatggctcctgtcaatttagtgcggaaccatgatgaattcctaaatgctgtaaaacttcggctgacaaaactagagatgatgcggcatgtctttgaacaaagtggtattaaaggagcaattgctgcagtggcaaagctacctgacaatgctgttcaagcagatgttgttagtgctctcaaaggaaagcttgatcttttcaacctggaatttttctcaaattttctgcctgttcttgctgggttactgtgtagcaagactgaaaggcatgctatggtctctttggaaatgttgttggatcttataaagatttttggaccagtaattcattcagcattatcagcaaatttaggcgttggagttgacattcaggctgagcagaggttgcaacgttgttcacggtgctttaaccatttgcaaaagatccaacagagtctgaatccattgattctgcggggtggtcaaacagcacaacttgcacaagaactaagtctttcattgcaagatttggtggtgatctaggcaagatgatgtacaatgtatacgacagagtagataccattggttttggcgaaaagtgcccacagttgtgtagcttgtaattttgtcatagctttgcaagtgggttttgcaactgtgttttaacattgggctggcattcagcctggtcccctgttgtaaatgtgagcctagccgtgaatgagtctgtaattagccagccacatctgctgtgtgagcagccctgaacaaaaagactagttgaaaggaaacaaccgcaaaggggatcattttggttacaccccaggtggtaggatggctcatgtagcatgcggtgattggcaattccattctttgaaagcatctgtgtttaacgtatattttgtagaagtaaattgagttatgccatagtaacgatgactgattgggctaatatgccttttgtttcttcaactgaccaagaatactaagagtcggctagttttaagtgtc

SEQ ID NO: 78321 - DNA, 3186 bp, Zea Mays
caaaagcggagcgacgcgtaggagagagagagagagagagagagaggagacgacaacatctccactcccccacccacccacgccgctccacccctctcgttttcactgcccagagaccaccaaaggaaaaaaaggggactcgctctcgccaactcccctgctccacagccacaagcccactcggatcccaatccgagccctactcgtcgtcgacgacgcgacggccccgcgtgcgaagccagccagccagccagccagccatcgccgtggaccggggagcccggagggatggaccccgagaagcgcggctacgagctccaaaattttgtggcgcatgatgcggaagttaggtccctgtctattggcaaaaagtctaggcgtgtgttcatcaccggtggcaatgatcgcaaggtcaaactgtgggccattggcaagcaaactccacttctgaccttgtccggccacacaagtgcggtggaggctgtgcagtttgattcagcagaggtgcttgtgcttgctggctcgtcaaatggttccatcaagctctgggacttggaagaagctaaagttgtgcggtctctcactgggcacaggtcaagttgcactgctgttgaattccatccatttggcgagttttttgcatctggttcgtcagatacagacctgaagatatgggacataaagaaaaaaggatacatacacacatataagggtcacagaggagcaattaaaacaatcaggtttacgcctgatggacgatgggttgtcactggtggggaagataacattgtgaaggtgtgggatttgacagctggaaagcttctacatgatttcaagttccatagtggacaaatcaactgtattgattttcaccctcaagaatttttgcttgcaacaggctctgctgataggacagtgaaattttgggatcttgaaacttttgaattgataggttcttctggacctgaggtattctcttgggaaccagtaaggtgccatgatgttgttgacatgggttggagtaatttggctgaccttagtatttatgaagggaaactcttgggatgctcctaccatgagtgccgtgttggtctatgggctgctgatatatcactcattggaccctatgctcttggtgtattgcccaaagcgaatttttttgctgagcttgtgcagtctatggaagataatcctgtgaaaccagttgatagcactgcaaattctcgtcctgcttcagcaatggcacattcaagaagttcatacaaaatcaaggagtctgggattgctcaaagcagggttcgtggctcacatttgactccagcaagtacagataagaccaagaaagataggagcagcactattccacgaagacctgattcgtctttaaagtcatctgttcagagtactaccctgatgaggcgtatgaagcttgttgatagtccttccaccaacacaaaaaatgtggaacgtaatgttgggcagagagacatttcattagcgtctcgtgcagtgatggctaataattctgcaactgctaagaaaagcaatcttacagaatcagctttagtgaaagatatttacactacatctcaggctgtttcagcacctattgttgtgcccagagacattttagaggacaaaacagtaagcaatgttcgtcgagggactggagagacagctgcagtcccagatgattttcggatccctgttcacagaagaaaaccctcacttagtggcagtgctgctgatagtgatagctcatcaagatcagtgttcactgaacctgatgtttgctcagagggtttgtctagcttaaaattctcctttgggctaactccatatcacaagaaagaagaatttggcgatgtggataatgaaggtattgcacaaatagcagaaaagatggaaagaacagtgtcgctggaccattctcagcagttaaatgatgataaatcctttgaatcaccatgctcaacaacagagactgccaaggtcaaatatgttagaggagttgctgtgccactggggaaaacaaagtctcttgttgagagatgggaaaaaagagagacttctagcactgattattcaccacaaactggttcttgtggtgatcgggcatcgagaaatgacaaccatccattccatctggcggaaccaagtacaacatttgaaaaggacctgtcaactgtagatgaagcgatggctcctgtcaatttagtgcggaaccatgatgaattcctaaatgctgtaaaacttcggctgacaaaactagagatgatgcggcatgtctttgaacaaagtggtattaaaggagcaattgctgcagtggcaaagctacctgacaatgctgttcaagcagatgttgttagtgctctcaaaggaaagcttgatcttttcaacctggaatttttctcaaattttctgcctgttcttgctgggttactgtgtagcaagactgaaaggcatgctatggtctctttggaaatgttgttggatcttataaagatttttggaccagtaattcattcagcattatcagcaaatttaggcgttggagttgacattcaggctgagcagaggttgcaacgttgttcacggtgctttaaccatttgcaaaagatccaacagagtctgaatccattgattctgcggggtggtcaaacagcacaacttgcacaagaactaagtctttcattgcaagatttggtggtgatctaggcaagatgatgtacaatgtatacgacagagtagataccattggttttggcgaaaagtgcccacagttgtgtagcttgtaattttgtcatagctttgcaagtgggttttgcaactgtgttttaacattgggctggcattcagcctggtcccctgttgtaaatgtgagcctagccgtgaatgagtctgtaattagccagccacatctgctgtgtgagcagccctgaacaaaaagactagttgaaaggaaacaaccgcaaaggggatcattttggttacaccccaggtggtaggatggctcatgtagcatgcggtgattggcaattccattctttgaaagcatctgtgtttaacgtatattttgtagaagtaaattgagttatgccatagtaacgatgactgattgggctaatatgccttttgtttcttcaactgaccaagaatactaagagtcggctagttttaagtgtc

SEQ ID NO: 78322 - DNA, 3440 bp, Zea Mays
taaagattgctctcaaccgttggatatattttggcaggaacgaaaggtgcacggttgatttcgtacgcctgattcatgtgagcctcgcttttccagattcaaggaacgcgaagggaaccttttgcttttggccccctcccctgcttctcggtacacaagcaatgcaaaagggacgggagcaaaagcggagcgacgcgtaggagagagagagagagagagagagaggagacgacaacatctccactcccccacccacccacgccgctccacccctctcgttttcactgcccagagaccaccaaaggaaaaaaaggggactcgctctcgccaactcccctgctccacagccacaagcccactcggatcccaatccgagccctactcgtcgtcgacgacgcgacggccccgcgtgcgaagccagccagccagccagccagccatcgccgtggaccggggagcccggagggatggaccccgagaagcgcggctacgagctccaaaattttgtggcgcatgatgcggaagttaggtccctgtctattggcaaaaagtctaggcgtgtgttcatcaccggtggcaatgatcgcaaggtcaaactgtgggccattggcaagcaaactccacttctgaccttgtccggccacacaagtgcggtggaggctgtgcagtttgattcagcagaggtgcttgtgcttgctggctcgtcaaatggttccatcaagctctgggacttggaagaagctaaagttgtgcggtctctcactgggcacaggtcaagttgcactgctgttgaattccatccatttggcgagttttttgcatctggttcgtcagatacagacctgaagatatgggacataaagaaaaaaggatacatacacacatataagggtcacagaggagcaattaaaacaatcaggtttacgcctgatggacgatgggttgtcactggtggggaagataacattgtgaaggtgtgggatttgacagctggaaagcttctacatgatttcaagttccatagtggacaaatcaactgtattgattttcaccctcaagaatttttgcttgcaacaggctctgctgataggacagtgaaattttgggatcttgaaacttttgaattgataggttcttctggacctgagggtaccggtgtacgttctatggtctttcacccagatggtaaaacccttttctgtggattagaccaaagcttaaaggtattctcttgggaaccagtaaggtgccatgatgttgttgacatgggttggagtaatttggctgaccttagtatttatgaagggaaactcttgggatgctcctaccatgagtgccgtgttggtctatgggctgctgatatatcactcattggaccctatgctcttggtgtattgcccaaagcgaatttttttgctgagcttgtgcagtctatggaagataatcctgtgaaaccagttgatagcactgcaaattctcgtcctgcttcagcaatggcacattcaagaagttcatacaaaatcaaggagtctgggattgctcaaagcagggttcgtggctcacatttgactccagcaagtacagataagaccaagaaagataggagcagcactattccacgaagacctgattcgtctttaaagtcatctgttcagagtactaccctgatgaggcgtatgaagcttgttgatagtccttccaccaacacaaaaaatgtggaacgtaatgttgggcagagagacatttcattagcgtctcgtgcagtgatggctaataattctgcaactgctaagaaaagcaatcttacagaatcagctttagtgaaagatatttacactacatctcaggctgtttcagcacctattgttgtgcccagagacattttagaggacaaaacagtaagcaatgttcgtcgagggactggagagacagctgcagtcccagatgattttcggatccctgttcacagaagaaaaccctcacttagtggcagtgctgctgatagtgatagctcatcaagatcagtgttcactgaacctgatgtttgctcagagggtttgtctagcttaaaattctcctttgggctaactccatatcacaagaaagaagaatttggcgatgtggataatgaaggtattgcacaaatagcagaaaagatggaaagaacagtgtcgctggaccattctcagcagttaaatgatgataaatcctttgaatcaccatgctcaacaacagagactgccaaggtcaaatatgttagaggagttgctgtgccactggggaaaacaaagtctcttgttgagagatgggaaaaaagagagacttctagcactgattattcaccacaaactggttcttgtggtgatcgggcatcgagaaatgacaaccatccattccatctggcggaaccaagtacaacatttgaaaaggacctgtcaactgtagatgaagcgatggctcctgtcaatttagtgcggaaccatgatgaattcctaaatgctgtaaaacttcggctgacaaaactagagatgatgcggcatgtctttgaacaaagtggtattaaaggagcaattgctgcagtggcaaagctacctgacaatgctgttcaagcagatgttgttagtgctctcaaaggaaagcttgatcttttcaacctggaatttttctcaaattttctgcctgttcttgctgggttactgtgtagcaagactgaaaggcatgctatggtctctttggaaatgttgttggatcttataaagatttttggaccagtaattcattcagcattatcagcaaatttaggcgttggagttgacattcaggctgagcagaggttgcaacgttgttcacggtgctttaaccatttgcaaaagatccaacagagtctgaatccattgattctgcggggtggtcaaacagcacaacttgcacaagaactaagtctttcattgcaagatttggtggtgatctaggcaagatgatgtacaatgtatacgacagagtagataccattggttttggcgaaaagtgcccacagttgtgtagcttgtaattttgtcatagctttgcaagtgggttttgcaactgtgttttaacattgggctggcattcagcctggtcccctgttgtaaatgtgagcctagccgtgaatgagtctgtaattagccagccacatctgctgtgtgagcagccctgaacaaaaagactagttgaaaggaaacaaccgcaaaggggatcattttggttacaccccaggtggtaggatggctcatgtagcatgcggtgattggcaattccattctttgaaagcatctgtgtttaacgtatattttgtagaagtaaattgagttatgccatagtaacgatgactgattgggctaatatgccttttgtttcttcaactgaccaagaatactaagagtcggctagttttaagtgtc

SEQ ID NO: 78323 - DNA, 2644 bp, Zea Mays
aagcaatgcaaaagggacgggagcaaaagcggagcgacgcgtaggagagagagagagagagagagagaggagacgacaacatctccactcccccacccacccacgccgctccacccctctcgttttcactgcccagagaccaccaaaggaaaaaaaggggactcgctctcgccaactcccctgctccacagccacaagcccactcggatcccaatccgagccctactcgtcgtcgacgacgcgacggccccgcgtgcgaagccagccagccagccagccagccatcgccgtggaccggggagcccggagggatggaccccgagaagcgcggctacgagctccaaaattttgtggcgcatgatgcggaagttaggtccctgtctattggcaaaaagtctaggcgtgtgttcatcaccggtggcaatgatcgcaaggtcaaactgtgggccattggcaagcaaactccacttctgaccttgtccggccacacaagtgcggtggaggctgtgcagtttgattcagcagaggtgcttgtgcttgctggctcgtcaaatggttccatcaagctctgggacttggaagaagctaaagttgtgcggtctctcactgggcacaggtcaagttgcactgctgttgaattccatccatttggcgagttttttgcatctggttcgtcagatacagacctgaagatatgggacataaagaaaaaaggatacatacacacatataagggtcacagaggagcaattaaaacaatcaggtttacgcctgatggacgatgggttgtcactggtggggaagataacattgtgaaggtgtgggatttgacagctggaaagcttctacatgatttcaagttccatagtggacaaatcaactgtattgattttcaccctcaagaatttttgcttgcaacaggctctgctgataggacagtgaaattttgggatcttgaaacttttgaattgataggttcttctggacctgaggtattgcaagtttttttcttaaatcaagctggatctggttatgaaatcgataatttgaagaccacaaactatggcttctcaaattctttagcatgcatgttctataggcatggtaactacagtacattcttgctgtggccttgtattaatatctttgtctttcttataaatcgtaactgtaagaactttctcagaggaatttagctcgcatttccctacagctgattcagttttataagagttatggtctgacatctagcctgagcttcacgtatgtgttgttccctgttttttaaccgttgctctaaaagcacatgaggagaacatccatcttcctcttctgtgatagcttacatgactcctctctccagggtaccggtgtacgttctatggtctttcacccagatggtaaaacccttttctgtggattagaccaaagcttaaaggtattctcttgggaaccagtaaggtgccatgatgttgttgacatgggttggagtaatttggctgaccttagtatttatgaagggaaactcttgggatgctcctaccatgagtgccgtgttggtctatgggctgctgatatatcactcattggaccctatgctcttggtgtattgcccaaagcgaatttttttgctgagcttgtgcagtctatggaagataatcctgtgaaaccagttgatagcactgcaaattctcgtcctgcttcagcaatggcacattcaagaagttcatacaaaatcaaggagtctgggattgctcaaagcagggttcgtggctcacatttgactccagcaagtacagataagaccaagaaagataggagcagcactattccacgaagacctgattcgtctttaaagtcatctgttcagagtactaccctgatgaggcgtatgaagcttgttgatagtccttccaccaacacaaaaaatgtggaacgtaatgttgggcagagagacatttcattagcgtctcgtgcagtgatggctaataattctgcaactgctaagaaaagcaatcttacagaatcagctttagtgaaagatatttacactacatctcaggctgtttcagcacctattgttgtgcccagagacattttagaggacaaaacagtaagcaatgttcgtcgagggactggagagacagctgcagtcccagatgattttcggatccctgttcacagaagaaaaccctcacttagtggcagtgctgctgatagtgatagctcatcaagatcagtgttcactgaacctgatgtttgctcagagggtttgtctagcttaaaattctcctttgggctaactccatatcacaagaaagaagaatttggcgatgtggataatgaaggtattgcacaaatagcagaaaagatggaaagaacagtgtcgctggaccattctcagcagttaaatgatgataaatcctttgaatcaccatgctcaacaacagagactgccaaggtcaaatatgttagaggagttgctgtgccactggggaaaacaaagtctcttgttgagagatgggaaaaaagagagacttctagcactgattattcaccacaaactggttcttgtggtgatcgggcatcgagaaatgacaaccatccattccatctggagagctgcgtatcatttcattagtag

SEQ ID NO: 78324 - DNA, 1414 bp, Zea Mays
cttaatctcgctggcaggacgacgttggaaacttctgtcaaggactaccagaatttcaatttccgacaaccttattctcaagcttcatactatgtctctctgatattggaagataaaaaatggcctgtcgctgagaaacttgaagctctttctaagcttgaatcagatttttttgcaaagtttgtaccacacctactatcgaagacatttttggaatgttatgttcaagggaacattgaaccaagtgaagcaaaatctgtcgtacaagagatcgaaaacactatatttaatgcccccaattctttgttcaaatccatgtctccatcagagtatctgactaaaagagttgtcatgcttgaaaatgagttaaaatgctactaccaaactgagggattaaaccagaagaatcagaattcatcagttatccaatatattcaggtacatcaggatgacgccattttgaatatcaaacttgagctgttctctctaatagcaagccagccagccttcaaccagctgcgaactgttgaacagcttgggtatataacaagtctttctctgagatccgactatggagtcctggcactccaggtggttatacagtccacagtaaaggatccttcgtatcttgatggtagagttgatgaattcttcaagatgtttgaaagcaaaatctatgaactctccgacaaggacttcaagagaaatgtgaaatcactaattgattctaaactggagaagtttaaaaacttatgggaggaatcagatttctactggggagagattcaggcaggaactctgaagtttgatagggtcgagtctgaggtcactatgctaagagagctcaagaaagaagaattcatagagtacttcgaccagtacataaaagtggacgcgcctcaaaggaggacactaagcgtgcaagtcttcggcggcaaccattcggcagaattcaagacggcgatcgccgaagccgatccgcccaaaatgtacagaattacagacatattcggcttcaaacgatcgaggccgctgtacagctcactcaagggaggtccgggcaggatcaccatggactgacagccatcacgcagctattccctagttttcatgtacgtacgtagtgtaacggcctgttcatacgcctgaattccatcctgaatcctgcatcagattcgattgcacgattgatgctattcttaactgatggtttgttatgttaaccaataatgcacgacagcgtgtcactttctgggcagatatagggggctgtataaataaagtcatgtatgttcgcatgtctgtatgcatttcttctgacagctatgcattatgtacagttacagttacagttacatatccagtgcactaagaactagaaggcgccatgaggagcggagagaccaacacaaac

SEQ ID NO: 78325 - DNA, 1298 bp, Zea Mays
ctagaccaattcgacgaggaggctcatgcacggtggctcttacaatgcatatacaagctcagagacaacaaacttctttttcgatgtcaatgtggacaattttgaagaagccttagatagatttgctcagttcttcattaagccactgatgtcacaggatgctgttcttagagagataaaagctgttgattctgaacacaagaaaaatttgttgtccgatggctggagaatgtatcagcttcaaaagcatctggcttcaaaggatcacccttaccacaaattcagtacaggaagttgggaaacactagaaactaaaccaaaagcgaggggcgtggacatcagacttgaacttctgaagttttacaagaattattcagcaaaccttatgcaccttgttgtttatggaaaggagagcctcgattacattcagggcttggttgagcgtatgtttagtgacataaaaaacactgatcagagatgcttcaaatgtccaagtcatcctctttcagaggaacatttgcagcttcttgtcaaagcactaccaatagaagaaggggactatctaagaattatatggccaattactcctagcatccagttttacaaagaaggtccttgccattatctaagtcacctcattgggcatgaaggcgaggggtccgtcttccatattataaaggaactaggatgggccatgaacttaatggctggagagagcactgacagtaatgaatattcctttttctcaaacacatggaggatattgttgggttgatctttaaatatcttcatctattaaaagtagacggagtccacgagtggatatttaatgagcttgaagcgataaatgaaatggagttccattatcaagacaaagttgatccaataagctatgtgatgcgtactgtctcaactatgcggttgtttccaccagaagaatggctggttggagcagcattgccatcaaagtatgcaccacaaagaataaatatgatactcgatcaactatcacctgaaagatgttatgcaccttgagtccagccaatgtaacccactagtgttaggtatatgtaatacaaagatcactattaatgacttagggtttttactctccaacattggagttttttcttttgcaccttccctagccgtcgcctgcccactagggatgccaccaccatggtcgacggccctcctctccccctacgggctctcctctcctccctcattggtctttggtagatgctgggattccttccaccccaaccccaccaccatccccagcctctagttgtctg

SEQ ID NO: 78326 - DNA, 1349 bp, Zea Mays
caaagaggaggacgggaggtgggaggactagaccaattcgacgaggaggctcatgcacggtggctcttacaatgcatatacaagctcagagacaacaaacttctttttcgatgtcaatgtggacaattttgaagaagccttagatagatttgctcagttcttcattaagccactgatgtcacaggatgctgttcttagagagataaaagctgttgattctgaacacaagaaaaatttgttgtccgatggctggagaatgtatcagcttcaaaagcatctggcttcaaaggatcacccttaccacaaattcagtacaggaagttgggaaacactagaaactaaaccaaaagcgaggggcgtggacatcagacttgaacttctgaagttttacaagaattattcagcaaaccttatgcaccttgttgtttatggaaaggagagcctcgattacattcagggcttggttgagcgtatgtttagtgacataaaaaacactgatcagagatgcttcaaatgtccaagtcatcctctttcagaggaacatttgcagcttcttgtcaaagcactaccaatagaagaaggggactatctaagaattatatggccaattactcctagcatccagttttacaaagaaggtccttgccattatctaagtcacctcattgggcatgaaggcgaggggtccgtcttccatattataaaggaactaggatgggccatgaacttaatggctggagagagcactgacagtaatgaatattcctttttctcagtaagcatcaggctcaccgatgctggtcatgaacacatggaggatattgttgggttgatctttaaatatcttcatctattaaaagtagacggagtccacgagtggatatttaatgagcgataaatgaaatggagttccattatcaagacaaagttgatccaataagctatgtgatgcgtactgtctcaactatgcggttgtttccaccagaagaatggctggttggagcagcattgccatcaaagtatgcaccacaaagaataaatatgatactcgatcaactatcacctgaaagatgttatgcaccttgagtccagccaatgtaacccactagtgttaggtatatgtaatacaaagatcactattaatgacttagggtttttactctccaacattggagttttttcttttgcaccttccctagccgtcgcctgcccactagggatgccaccaccatggtcgacggccctcctctccccctacgggctctcctctcctccctcattggtctttggtagatgctgggattccttccaccccaaccccaccaccatccccagcctctagttgtctg

SEQ ID NO: 78327 - DNA, 1373 bp, Zea Mays
agatgtgaggactgggccaaagaggaggacgggaggtgggaggactagaccaattcgacgaggaggctcatgcacggtggctcttacaatgcatatacaagctcagagacaacaaacttctttttcgatgtcaatgtggacaattttgaagaagccttagatagatttgctcagttcttcattaagccactgatgtcacaggatgctgttcttagagagataaaagctgttgattctgaacacaagaaaaatttgttgtccgatggctggagaatgtatcagcttcaaaagcatctggcttcaaaggatcacccttaccacaaattcagtacaggaagttgggaaacactagaaactaaaccaaaagcgaggggcgtggacatcagacttgaacttctgaagttttacaagaattattcagcaaaccttatgcaccttgttgtttatggaaaggagagcctcgattacattcagggcttggttgagcgtatgtttagtgacataaaaaacactgatcagagatgcttcaaatgtccaagtcatcctctttcagaggaacatttgcagcttcttgtcaaagcactaccaatagaagaaggggactatctaagaattatatggccaattactcctagcatccagttttacaaagaaggtccttgccattatctaagtcacctcattgggcatgaaggcgaggggtccgtcttccatattataaaggaactaggatgggccatgaacttaatggctggagagagcactgacagtaatgaatattcctttttctcagtaagcatcaggctcaccgatgctggtcatgaacacatggaggatattgttgggttgatctttaaatatcttcatctattaaaagtagacggagtccacgagtggatatttaatgagcttgaagcgataaatgaaatggagttccattatcaagacaaagttgatccaataagctatgtgatgcgtactgtctcaactatgcggttgtttccaccagaagaatggctggttggagcagcattgccatcaaagtatgcaccacaaagaataaatatgatactcgatcaactatcacctgaaagatgttatgcaccttgagtccagccaatgtaacccactagtgttaggtatatgtaatacaaagatcactattaatgacttagggtttttactctccaacattggagttttttcttttgcaccttccctagccgtcgcctgcccactagggatgccaccaccatggtcgacggccctcctctccccctacgggctctcctctcctccctcattggtctttggtagatgctgggattccttccaccccaaccccaccaccatccccagcctctagttgtctg

SEQ ID NO: 78328 - DNA, 1637 bp, Zea Mays
tcttggtccccaatccaatcccgcacccaccattgcgagagatcatcagaggaccgcgtccaatcgaagcggagaggaggagaagggtgtgctgatggcgacggcggtggcggccacggccgcggcggcgggtggcagcaatgtcgagttcatccgcgcgcgcagcgacaagcgggagtaccgccgtgtggtgctcgcaaacgcgctcgagatcctactaatcagcgaccccgacactgacaaggcggcggcgtgcatggaggtcgaggtgggctcgttcagcgacccggagggactcgagggcctcgcgcacttcctcgagcacatgctattttatgccagcgagaaatatcctggagaacacgagtatacgaaatatatcacagagcacggtggctcttacaatgcatatacaagctcagagacaacaaacttctttttcgatgtcaatgtggacaattttgaagaagccttagatagatttgctcagttcttcattaagccactgatgtcacaggatgctgttcttagagagataaaagctgttgattctgaacacaagaaaaatttgttgtccgatggctggagaatgtatcaggaagttgggaaacactagaaactaaaccaaaagcgaggggcgtggacatcagacttgaacttctgaagttttacaagaattattcagcaaaccttatgcaccttgttgtttatggaaaggagagcctcgattacattcagggcttggttgagcgtatgtttagtgacataaaaaacactgatcagagatgcttcaaatgtccaagtcatcctctttcagaggaacatttgcagcttcttgtcaaagcactaccaatagaagaaggggactatctaagaattatatggccaattactcctagcatccagttttacaaagaaggtccttgccattatctaagtcacctcattgggcatgaaggcgaggggtccgtcttccatattataaaggaactaggatgggccatgaacttaatggctggagagagcactgacagtaatgaatattcctttttctcagtaagcatcaggctcaccgatgctggtcatgaacacatggaggatattgttgggttgatctttaaatatcttcatctattaaaagtagacggagtccacgagtggatatttaatgagcttgaagcgataaatgaaatggagttccattatcaagacaaagttgatccaataagctatgtgatgcgtactgtctcaactatgcggttgtttccaccagaagaatggctggttggagcagcattgccatcaaagtatgcaccacaaagaataaatatgatactcgatcaactatcacctgaaagatgttatgcaccttgagtccagccaatgtaacccactagtgttaggtatatgtaatacaaagatcactattaatgacttagggtttttactctccaacattggagttttttcttttgcaccttccctagccgtcgcctgcccactagggatgccaccaccatggtcgacggccctcctctccccctacgggctctcctctcctccctcattggtctttggtagatgctgggattccttccaccccaaccccaccaccatccccagcctctagttgtctg

SEQ ID NO: 78329 - DNA, 2563 bp, Zea Mays
gttgactctaatgtctttgtgcatggctcatttttgaatgtttgctggtgggaggatcgtctcttctatgtctacaagaatattttgccagtgatgacggtgtttagaggatgggatccttgcaattgtcaaacaagatgagagaccccttgaattgcttgctaaagaatatgctatcaactcttttgacatagatcctcaaaacccctctgatgttgttttcacgttagaatgggaatcaatcggtgtcctaccttgtggctagaagaaagaaaatttttactaccgagggatctcaattagaattttaggctcattcatacattcactacaatgccttcgaactcatgaacatttatctctggctctattgtggtgggttacatgaatagagtttttgcatgttcttcgtttcatatggtggcatacttgttactatgtgacattgtttgatgaaacccttgcgacattgtattatttattttgttctatatagtcttaacattttatcaaataagaatttatgtgacatcacaacacattgtactatcatatatagaagtcgacattgtattgatggttgcaatgtagtggtcccgttgcaacgcacggtggttggaagactcgatcatacgacgccagcaaagaggccaattctggtcgttgcgcaggcagcgtggcacgtcattcggcgatcgtggaaaggccttctgccatgagcccatgacgcgcatacgctcgcggcggaagcgaacgggtacttgtcacgtcctttccgagaacctcacagcagagtagcagaccacattttgttttgcagctggtgccgcaacccggacggccggaccggacggacggcatctgctccctgcccgtgggcggctggccccgatataaaactgacaagagatagactaatcaagtctctcaacccgagtctaatcttggtccccaatccaatcccgcacccaccattgcgagagatcatcagaggaccgcgtccaatcgaagcggagaggaggagaagggtgtgctgatggcgacggcggtggcggccacggccgcggcggcgggtggcagcaatgtcgagttcatccgcgcgcgcagcgacaagcgggagtaccgccgtgtggtgctcgcaaacgcgctcgagatcctactaatcagcgaccccgacactgacaaggcggcggcgtgcatggaggtcgaggtgggctcgttcagcgacccggagggactcgagggcctcgcgcacttcctcgcacggtggctcttacaatgcatatacaagctcagagacaacaaacttctttttcgatgtcaatgtggacaattttgaagaagccttagatagatttgctcagttcttcattaagccactgatgtcacaggatgctgttcttagagagataaaagctgttgattctgaacacaagaaaaatttgttgtccgatggctggagaatgtatcagcttcaaaagcatctggcttcaaaggatcacccttaccacaaattcagtacaggaagttgggaaacactagaaactaaaccaaaagcgaggggcgtggacatcagacttgaacttctgaagttttacaagaattattcagcaaaccttatgcaccttgttgtttatggaaaggagagcctcgattacattcagggcttggttgagcgtatgtttagtgacataaaaaacactgatcagagatgcttcaaatgtccaagtcatcctctttcagaggaacatttgcagcttcttgtcaaagcactaccaatagaagaaggggactatctaagaattatatggccaattactcctagcatccagttttacaaagaaggtccttgccattatctaagtcacctcattgggcatgaaggcgaggggtccgtcttccatattataaaggaactaggatgggccatgaacttaatggctggagagagcactgacagtaatgaatattcctttttctcagtaagcatcaggctcaccgatgctggtcatgaacacatggaggatattgttgggttgatctttaaatatcttcatctattaaaagtagacggagtccacgagtggatatttaatgagcttgaagcgataaatgaaatggagttccattatcaagacaaagttgatccaataagctatgtgatgcgtactgtctcaactatgcggttgtttccaccagaagaatggctggttggagcagcattgccatcaaagtatgcaccacaaagaataaatatgatactcgatcaactatcacctgaaagatgttatgcaccttgagtccagccaatgtaacccactagtgttaggtatatgtaatacaaagatcactattaatgacttagggtttttactctccaacattggagttttttcttttgcaccttccctagccgtcgcctgcccactagggatgccaccaccatggtcgacggccctcctctccccctacgggctctcctctcctccctcattggtctttggtagatgctgggattccttccaccccaaccccaccaccatccccagcctctagttgtctg

SEQ ID NO: 78330 - DNA, 2623 bp, Zea Mays
aaatccaactgatctcgttaaagttaggttgcaagctgatggaaaggctaacacagtcaagaggagttattctggagcccttaatgtatatgctacaataatcagacatgttactttaaccatcatgggcagatcgtctcttctatgtctacaagaatattttgccagtgatgacggtgtttagaggatgggatccttgcaattgtcaaacaagatgagagaccccttgaattgcttgctaaagaatatgctatcaactcttttgacatagatcctcaaaacccctctgatgttgttttcacgttagaatgggaatcaatcggtgtcctaccttgtggctagaagaaagaaaatttttactaccgagggatctcaattagaattttaggctcattcatacattcactacaatgccttcgaactcatgaacatttatctctggctctattgtggtgggttacatgaatagagtttttgcatgttcttcgtttcatatggtggcatacttgttactatgtgacattgtttgatgaaacccttgcgacattgtattatttattttgttctatatagtcttaacattttatcaaataagaatttatgtgacatcacaacacattgtactatcatatatagaagtcgacattgtattgatggttgcaatgtagtggtcccgttgcaacgcacggtggttggaagactcgatcatacgacgccagcaaagaggccaattctggtcgttgcgcaggcagcgtggcacgtcattcggcgatcgtggaaaggccttctgccatgagcccatgacgcgcatacgctcgcggcggaagcgaacggctggtgccgcaacccggacggccggaccggacggacggcatctgctccctgcccgtgggcggctggccccgatataaaactgacaagagatagactaatcaagtctctcaacccgagtctaatcttggtccccaatccaatcccgcacccaccattgcgagagatcatcagaggaccgcgtccaatcgaagcggagaggaggagaagggtgtgctgatggcgacggcggtggcggccacggccgcggcggcgggtggcagcaatgtcgagttcatccgcgcgcgcagcgacaagcgggagtaccgccgtgtggtgctcgcaaacgcgctcgagatcctactaatcagcgaccccgacactgacaaggcggcggcgtgcatggaggtcgaggtgggctcgttcagcgacccggagggactcgagggcctcgcgcacttcctcgcgagaaatatcctggagaacacgagtatacgaaatatatcacagagcacggtggctcttacaatgcatatacaagctcagagacaacaaacttctttttcgatgtcaatgtggacaattttgaagaagccttagatagatttgctcagttcttcattaagccactgatgtcacaggatgctgttcttagagagataaaagctgttgattctgaacacaagaaaaatttgttgtccgatggctggagaatgtatcagcttcaaaagcatctggcttcaaaggatcacccttaccacaaattcagtacaggaagttgggaaacactagaaactaaaccaaaagcgaggggcgtggacatcagacttgaacttctgaagttttacaagaattattcagcaaaccttatgcaccttgttgtttatggaaaggagagcctcgattacattcagggcttggttgagcgtatgtttagtgacataaaaaacactgatcagagatgcttcaaatgtccaagtcatcctctttcagaggaacatttgcagcttcttgtcaaagcactaccaatagaagaaggggactatctaagaattatatggccaattactcctagcatccagttttacaaagaaggtccttgccattatctaagtcacctcattgggcatgaaggcgaggggtccgtcttccatattataaaggaactaggatgggccatgaacttaatggctggagagagcactgacagtaatgaatattcctttttctcagtaagcatcaggctcaccgatgctggtcatgaacacatggaggatattgttgggttgatctttaaatatcttcatctattaaaagtagacggagtccacgagtggatatttaatgagcttgaagcgataaatgaaatggagttccattatcaagacaaagttgatccaataagctatgtgatgcgtactgtctcaactatgcggttgtttccaccagaagaatggctggttggagcagcattgccatcaaagtatgcaccacaaagaataaatatgatactcgatcaactatcacctgaaagatgttatgcaccttgagtccagccaatgtaacccactagtgttaggtatatgtaatacaaagatcactattaatgacttagggtttttactctccaacattggagttttttcttttgcaccttccctagccgtcgcctgcccactagggatgccaccaccatggtcgacggccctcctctccccctacgggctctcctctcctccctcattggtctttggtagatgctgggattccttccaccccaaccccaccaccatccccagcctctagttgtctg

SEQ ID NO: 78331 - DNA, 3170 bp, Zea Mays
tattgttgtggcaaatccaactgatctcgttaaagttaggttgcaagctgatggaaaggctaacacagtcaagaggagttattctggagcccttaatgaaggtattggagctttgtggactggccttggcccaaatgtcgcacacaatgtcataattaacgctgccgagttggacagctatgattagttcaaacatgtacctgttgactctaatgtctttgtggtgggcattatatttcattatcattattcattcatttgttctgttcatgtagatgtttctaaaacttcctaggtatactgataacgtgttacccatcttttagctggacttggtgctgattttttttactatttgcattggctctccgatggatgcaaataagctttgactaaatatcttactagcagttcacaaggttcagcaaaaaaaaaactaaaacaacacaattgttttgtattctttacttcaatagtcatcgagtgattcatcctccatattttgcacaaaaactaagggaacacctagcctacctaccgtggacaaataccatttgaagaattgttagataatttcacacatgtatttacatttttttcctaatgagtacgtgcaggtttatactatatattaatctaccatatctctatacacttagacatgactaattttcgactgaaattagctgcaatctcagaaaattcgttgaacattggttgttttaattttggggaaatcatgtatcttagagaacccttatttacattgcacatttgaagccatcatttaaaaaatcaaacaaattataaattaggatggatggaatatttgtttacattttccctagagggggtgaacattctgaagcattaacgaactacagcctaggaagaaatttaggtattggtacatttggaaaagtgaagattgcagagcataaccttacatgacatagggttgctataaagatcatcaactgctaccaaatgagaaatatggaaatggaagataaaaatatggtttcgggtgaaggaagttgttaatattaacaaattgttatcaacatttgggtttgtacttgccactcaaacttttatctctactaatatgaagaaggtaaggggtaggttgcctaccatggttctgcctaccccttgttctgcctcctgcgcctccacgctaggcaaccaagaatgttcttaaatgagcaactttttcatgcaatcaagaatcagaagtctgtgttggtttacatcttttctgaaagtgatttactattttatacttgagtaactttgtcctatgatatgagatatccaaattcatctaataattagttaatttgagatgagttggtcctacaagggtccataactgtattgtatgcacttgcacccacatatatctaataagtgagtctgagcagtgacatagtccattggtaccatgggttgtatggatataggtcactgcattgctgatagtgaggagcagaaagttcatgttattgctggtgtgctgacccttaccactccaattttagtccacccctattgaccacatagttgaaatgagtattataggtgtgattacatgagtcatatctgcagcatggctcatttttgaatgtttgctggtgggaggatcgtctcttctatgtctacaagaatattttgccagtgatgacggtgtttagaggatgggatccttgcaattgtcaaacaagatgagagaccccttgaattgcttgctaaagaatatgctatcaactcttttgacatagatcctcaaaacccctctagcacatgctattttatgccagcgagaaatatcctggagaacacgagtatacgaaatatatcacagagcacggtggctcttacaatgcatatacaagctcagagacaacaaacttctttttcgatgtcaatgtggacaattttgaagaagccttagatagatttgctcagttcttcattaagccactgatgtcacaggatgctgttcttagagagataaaagctgttgattctgaacacaagaaaaatttgttgtccgatggctggagaatgtatcagcttcaaaagcatctggcttcaaaggatcacccttaccacaaattcagtacaggaagttgggaaacactagaaactaaaccaaaagcgaggggcgtggacatcagacttgaacttctgaagttttacaagaattattcagcaaaccttatgcaccttgttgtttatggaaaggagagcctcgattacattcagggcttggttgagcgtatgtttagtgacataaaaaacactgatcagagatgcttcaaatgtccaagtcatcctctttcagaggaacatttgcagcttcttgtcaaagcactaccaatagaagaaggggactatctaagaattatatggccaattactcctagcatccagttttacaaagaaggtccttgccattatctaagtcacctcattgggcatgaaggcgaggggtccgtcttccatattataaaggaactaggatgggccatgaacttaatggctggagagagcactgacagtaatgaatattcctttttctcagtaagcatcaggctcaccgatgctggtcatgaacacatggaggatattgttgggttgatctttaaatatcttcatctattaaaagtagacggagtccacgagtggatatttaatgagcttgaagcgataaatgaaatggagttccattatcaagacaaagttgatccaataagctatgtgatgcgtactgtctcaactatgcggttgtttccaccagaagaatggctggttggagcagcattgccatcaaagtatgcaccacaaagaataaatatgatactcgatcaactatcacctgaaagatgttatgcaccttgagtccagccaatgtaacccactagtgttaggtatatgtaatacaaagatcactattaatgacttagggtttttactctccaacattggagttttttcttttgcaccttccctagccgtcgcctgcccactagggatgccaccaccatggtcgacggccctcctctccccctacgggctctcctctcctccctcattggtctttggtagatgctgggattccttccaccccaaccccaccaccatccccagcctctagttgtctg

SEQ ID NO: 78332 - DNA, 4239 bp, Zea Mays
tattgttgtggcaaatccaactgatctcgttaaagttaggttgcaagctgatggaaaggctaacacagtcaagaggagttattctggagcccttaatgtatatgctacaataatcagacatgttactttaaccatcatgggcagtaagtgtacaagattatttcttttttcgttgtccttaaaatatttcatgtttccaggaaggtattggagctttgtggactggccttggcccaaatgtcgcacacaatgtcataattaacgctgccgagttggacagctatgattagttcaaacatgtacctgttgactctaatgtctttgtggtgggcattatatttcattatcattattcattcatttgttctgttcatgtagatgtttctaaaacttcctaggtatactgataacgtgttacccatcttttagctggacttggtgctgattttttttactatttgcattggctctccgatggatgcaaataagctttgactaaatatcttactagcagttcacaaggttcagcaaaaaaaaaactaaaacaacacaattgttttgtattctttacttcaatagtcatcgagtgattcatcctccatattttgcacaaaaactaagggaacacctagcctacctaccgtggacaaataccatttgaagaattgttagataatttcacacatgtatttacatttttttcctaatgagtacgtgcaggtttatactatatattaatctaccatatctctatacacttagacatgactaattttcgactgaaattagctgcaatctcagaaaattcgttgaacattggttgttttaattttggggaaatcatgtatcttagagaacccttatttacattgcacatttgaagccatcatttaaaaaatcaaacaaattataaattaggatggatggaatatttgtttacattttccctagagggggtgaacattctgaagcattaacgaactacagcctaggaagaaatttaggtattggtacatttggaaaagtgaagattgcagagcataaccttacatgacatagggttgctataaagatcatcaactgctaccaaatgagaaatatggaaatggaagataaaaatatggtttcgggtgaaggaagttgttaatattaacaaattgttatcaacatttgggtttgtacttgccactcaaacttttatctctactaatatgaagaaggtaaggggtaggttgcctaccatggttctgcctaccccttgttctgcctcctgcgcctccacgctaggcaaccaagaatgttcttaaatgagcaactttttcatgcaatcaagaatcagaagtctgtgttggtttacatcttttctgaaagtgatttactattttatacttgagtaactttgtcctatgatatgagatatccaaattcatctaataattagttaatttgagatgagttggtcctacaagggtccataactgtattgtatgcacttgcacccacatatatctaataagtgagtctgagcagtgacatagtccattggtaccatgggttgtatggatataggtcactgcattgctgatagtgaggagcagaaagttcatgttattgctggtgtgctgacccttaccactccaattttagtccacccctattgaccacatagttgaaatgagtattataggtgtgattacatgagtcatatctgcagcatggctcatttttgaatgtttgctggtgggaggatcgtctcttctatgtctacaagaatattttgccagtgatgacggtgtttagaggatgggatccttgcaattgtcaaacaagatgagagaccccttgaattgcttgctaaagaatatgctatcaactcttttgacatagatcctcaaaacccctctgatgttgttttcacgttagaatgggaatcaatcggtgtcctaccttgtggctagaagaaagaaaatttttactaccgagggatctcaattagaattttaggctcattcatacattcactacaatgccttcgaactcatgaacatttatctctggctctattgtggtgggttacatgaatagagtttttgcatgttcttcgtttcatatggtggcatacttgttactatgtgacattgtttgatgaaacccttgcgacattgtattatttattttgttctatatagtcttaacattttatcaaataagaatttatgtgacatcacaacacattgtactatcatatatagaagtcgacattgtattgatggttgcaatgtagtggtcccgttgcaacgcacggtggttggaagactcgatcatacgacgccagcaaagaggccaattctggtcgttgcgcaggcagcgtggcacgtcattcggcgatcgtggaaaggccttctgccatgagcccatgacgcgcatacgctcgcggcggaagcgaacggctggtgccgcaacccggacggccggaccggacggacggcatctgctccctgcccgtgggcggctggccccgatataaaactgacaagagatagactaatcaagtctctcaacccgagtctaatcttggtccccaatccaatcccgcacccaccattgcgagagatcatcagaggaccgcgtccaatcgaagcggagaggaggagaagggtgtgctgatggcgacggcggtggcggccacggccgcggcggcgggtggcagcaatgtcgagttcatccgcgcgcgcagcgacaagcgggagtaccgccgtgtggtgctcgcaaacgcgctcgagatcctactaatcagcgaccccgacactgacaaggcggcggcgtgcatggaggtcgaggtgggctcgttcagcgacccggagggactcgagggcctcgcgcacttcctcgcgagaaatatcctggagaacacgagtatacgaaatatatcacagagcacggtggctcttacaatgcatatacaagctcagagacaacaaacttctttttcgatgtcaatgtggacaattttgaagaagccttagatagatttgctcagttcttcattaagccactgatgtcacaggatgctgttcttagagagataaaagctgttgattctgaacacaagaaaaatttgttgtccgatggctggagaatgtatcagcttcaaaagcatctggcttcaaaggatcacccttaccacaaattcagtacaggaagttgggaaacactagaaactaaaccaaaagcgaggggcgtggacatcagacttgaacttctgaagttttacaagaattattcagcaaaccttatgcaccttgttgtttatggaaaggagagcctcgattacattcagggcttggttgagcgtatgtttagtgacataaaaaacactgatcagagatgcttcaaatgtccaagtcatcctctttcagaggaacatttgcagcttcttgtcaaagcactaccaatagaagaaggggactatctaagaattatatggccaattactcctagcatccagttttacaaagaaggtccttgccattatctaagtcacctcattgggcatgaaggcgaggggtccgtcttccatattataaaggaactaggatgggccatgaacttaatggctggagagagcactgacagtaatgaatattcctttttctcagtaagcatcaggctcaccgatgctggtcatgaacacatggaggatattgttgggttgatctttaaatatcttcatctattaaaagtagacggagtccacgagtggatatttaatgagcttgaagcgataaatgaaatggagttccattatcaagacaaagttgatccaataagctatgtgatgcgtactgtctcaactatgcggttgtttccaccagaagaatggctggttggagcagcattgccatcaaagtatgcaccacaaagaataaatatgatactcgatcaactatcacctgaaagatgttatgcaccttgagtccagccaatgtaacccactagtgttaggtatatgtaatacaaagatcactattaatgacttagggtttttactctccaacattggagttttttcttttgcaccttccctagccgtcgcctgcccactagggatgccaccaccatggtcgacggccctcctctccccctacgggctctcctctcctccctcattggtctttggtagatgctgggattccttccaccccaaccccaccaccatccccagcctctagttgtctg

SEQ ID NO: 78333 - DNA, 4188 bp, Zea Mays
tagctattgttgtggcaaatccaactgatctcgttaaagttaggttgcaagctgatggaaaggctaacacagtcaagaggagttattctggagcccttaatgaaggtattggagctttgtggactggccttggcccaaatgtcgcacacaatgtcataattaacgctgccgagttggacagctatgattagttcaaacatgtacctgttgactctaatgtctttgtggtgggcattatatttcattatcattattcattcatttgttctgttcatgtagatgtttctaaaacttcctaggtatactgataacgtgttacccatcttttagctggacttggtgctgattttttttactatttgcattggctctccgatggatgcaaataagctttgactaaatatcttactagcagttcacaaggttcagcaaaaaaaaaactaaaacaacacaattgttttgtattctttacttcaatagtcatcgagtgattcatcctccatattttgcacaaaaactaagggaacacctagcctacctaccgtggacaaataccatttgaagaattgttagataatttcacacatgtatttacatttttttcctaatgagtacgtgcaggtttatactatatattaatctaccatatctctatacacttagacatgactaattttcgactgaaattagctgcaatctcagaaaattcgttgaacattggttgttttaattttggggaaatcatgtatcttagagaacccttatttacattgcacatttgaagccatcatttaaaaaatcaaacaaattataaattaggatggatggaatatttgtttacattttccctagagggggtgaacattctgaagcattaacgaactacagcctaggaagaaatttaggtattggtacatttggaaaagtgaagattgcagagcataaccttacatgacatagggttgctataaagatcatcaactgctaccaaatgagaaatatggaaatggaagataaaaatatggtttcgggtgaaggaagttgttaatattaacaaattgttatcaacatttgggtttgtacttgccactcaaacttttatctctactaatatgaagaaggtaaggggtaggttgcctaccatggttctgcctaccccttgttctgcctcctgcgcctccacgctaggcaaccaagaatgttcttaaatgagcaactttttcatgcaatcaagaatcagaagtctgtgttggtttacatcttttctgaaagtgatttactattttatacttgagtaactttgtcctatgatatgagatatccaaattcatctaataattagttaatttgagatgagttggtcctacaagggtccataactgtattgtatgcacttgcacccacatatatctaataagtgagtctgagcagtgacatagtccattggtaccatgggttgtatggatataggtcactgcattgctgatagtgaggagcagaaagttcatgttattgctggtgtgctgacccttaccactccaattttagtccacccctattgaccacatagttgaaatgagtattataggtgtgattacatgagtcatatctgcagcatggctcatttttgaatgtttgctggtgggaggatcgtctcttctatgtctacaagaatattttgccagtgatgacggtgtttagaggatgggatccttgcaattgtcaaacaagatgagagaccccttgaattgcttgctaaagaatatgctatcaactcttttgacatagatcctcaaaacccctctgatgttgttttcacgttagaatgggaatcaatcggtgtcctaccttgtggctagaagaaagaaaatttttactaccgagggatctcaattagaattttaggctcattcatacattcactacaatgccttcgaactcatgaacatttatctctggctctattgtggtgggttacatgaatagagtttttgcatgttcttcgtttcatatggtggcatacttgttactatgtgacattgtttgatgaaacccttgcgacattgtattatttattttgttctatatagtcttaacattttatcaaataagaatttatgtgacatcacaacacattgtactatcatatatagaagtcgacattgtattgatggttgcaatgtagtggtcccgttgcaacgcacggtggttggaagactcgatcatacgacgccagcaaagaggccaattctggtcgttgcgcaggcagcgtggcacgtcattcggcgatcgtggaaaggccttctgccatgagcccatgacgcgcatacgctcgcggcggaagcgaacgggtacttgtcacgtcctttccgagaacctcacagcagagtagcagaccacattttgttttgcagctggtgccgcaacccggacggccggaccggacggacggcatctgctccctgcccgtgggcggctggccccgatataaaactgacaagagatagactaatcaagtctctcaacccgagtctaatcttggtccccaatccaatcccgcacccaccattgcgagagatcatcagaggaccgcgtccaatcgaagcggagaggaggagaagggtgtgctgatggcgacggcggtggcggccacggccgcggcggcgggtggcagcaatgtcgagttcatccgcgcgcgcagcgacaagcgggagtaccgccgtgtggtgctcgcaaacgcgctcgagatcctactaatcagcgaccccgacactgacaaggcggcggcgtgcatggaggtcgaggtgggctcgttcagcgacccggagggactcgagggcctcgcgcacttcctcgagcacatgctattttatgccagcgagaaatatcctggagaacacgagtatacgaaatatatcacagagcacggtggctcttacaatgcatatacaagctcagagacaacaaacttctttttcgatgtcaatgtggacaattttgaagaagccttagataggatgctgttcttagagagataaaagctgttgattctgaacacaagaaaaatttgttgtccgatggctggagaatgtatcagcttcaaaagcatctggcttcaaaggatcacccttaccacaaattcagtacaggaagttgggaaacactagaaactaaaccaaaagcgaggggcgtggacatcagacttgaacttctgaagttttacaagaattattcagcaaaccttatgcaccttgttgtttatggaaaggagagcctcgattacattcagggcttggttgagcgtatgtttagtgacataaaaaacactgatcagagatgcttcaaatgtccaagtcatcctctttcagaggaacatttgcagcttcttgtcaaagcactaccaatagaagaaggggactatctaagaattatatggccaattactcctagcatccagttttacaaagaaggtccttgccattatctaagtcacctcattgggcatgaaggcgaggggtccgtcttccatattataaaggaactaggatgggccatgaacttaatggctggagagagcactgacagtaatgaatattcctttttctcagtaagcatcaggctcaccgatgctggtcatgaacacatggaggatattgttgggttgatctttaaatatcttcatctattaaaagtagacggagtccacgagtggatatttaatgagcttgaagcgataaatgaaatggagttccattatcaagacaaagttgatccaataagctatgtgatgcgtactgtctcaactatgcggttgtttccaccagaagaatggctggttggagcagcattgccatcaaagtatgcaccacaaagaataaatatgatactcgatcaactatcacctgaaagatgttatgcaccttgagtccagccaatgtaacccactagtgttaggtatatgtaatacaaagatcactattaatgacttagggtttttactctccaacattggagttttttcttttgcaccttccctagccgtcgcctgcccactagggatgccaccaccatggtcgacggccctcctctccccctacgggctctcctctcctccctcattggtctttggtagatgctgggattccttccaccccaaccccaccaccatccccagcctctagttgtctg

SEQ ID NO: 78334 - DNA, 3888 bp, Zea Mays
tgatagctattgttgtggcaaatccaactgatctcgttaaagttaggttgcaagctgatggaaaggctaacacagtcaagaggagttattctggagcccttaatgtatatgctacaataatcagacatgttactttaaccatcatgggcagtaagtgtacaagattatttcttttttcgttgtccttaaaatatttcatgtttccaggaaggtattggagctttgtggactggccttggcccaaatgtcgcacacaatgtcataattaacgctgccgagttggacagctatgattagttcaaacatgtacctgttgactctaatgtctttgtggtgggcattatatttcattatcattattcattcatttgttctgttcatgtagatgtttctaaaacttcctaggtatactgataacgtgttacccatcttttagctggacttggtgctgattttttttactatttgcattggctctccgatggatgcaaataagctttgactaaatatcttactagcagttcacaaggttcagcaaaaaaaaaactaaaacaacacaattgttttgtattctttacttcaatagtcatcgagtgattcatcctccatattttgcacaaaaactaagggaacacctagcctacctaccgtggacaaataccatttgaagaattgttagataatttcacacatgtatttacatttttttcctaatgagtacgtgcaggtttatactatatattaatctaccatatctctatacacttagacatgactaattttcgactgaaattagctgcaatctcagaaaattcgttgaacattggttgttttaattttggggaaatcatgtatcttagagaacccttatttacattgcacatttgaagccatcatttaaaaaatcaaacaaattataaattaggatggatggaatatttgtttacattttccctagagggggtgaacattctgaagcattaacgaactacagcctaggaagaaatttaggtattggtacatttggaaaagtgaagattgcagagcataaccttacatgacatagggttgctataaagatcatcaactgctaccaaatgagaaatatggaaatggaagataaaaatatggtttcgggtgaaggaagttgttaatattaacaaattgttatcaacatttgggtttgtacttgccactcaaacttttatctctactaatatgaagaaggtaaggggtaggttgcctaccatggttctgcctaccccttgttctgcctcctgcgcctccacgctaggcaaccaagaatgttcttaaatgagcaactttttcatgcaatcaagaatcagaagtctgtgttggtttacatcttttctgaaagtgatttactattttatacttgagtaactttgtcctatgatatgagatatccaaattcatctaataattagttaatttgagatgagttggtcctacaagggtccataactgtattgtatgcacttgcacccacatatatctaataagtgagtctgagcagtgacatagtccattggtaccatgggttgtatggatataggtcactgcattgctgatagtgaggagcagaaagttcatgttattgctggtgtgctgacccttaccactccaattttagtccacccctattgaccacatagttgaaatgagtattataggtgtgattacatgagtcatatctgcagcatggctcatttttgaatgtttgctggtgggaggatcgtctcttctatgtctacaagaatattttgccagtgatgacggtgtttagaggatgggatccttgcaattgtcaaacaagatgagagaccccttgaattgcttgctaaagaatatgctatcaactcttttgacatagatcctcaaaacccctcttggtcccgttgcaacgcacggtggttggaagactcgatcatacgacgccagcaaagaggccaattctggtcgttgcgcaggcagcgtggcacgtcattcggcgatcgtggaaaggccttctgccatgagcccatgacgcgcatacgctcgcggcggaagcgaacggctggtgccgcaacccggacggccggaccggacggacggcatctgctccctgcccgtgggcggctggccccgatataaaactgacaagagatagactaatcaagtctctcaacccgagtctaatcttggtccccaatccaatcccgcacccaccattgcgagagatcatcagaggaccgcgtccaatcgaagcggagaggaggagaagggtgtgctgatggcgacggcggtggcggccacggccgcggcggcgggtggcagcaatgtcgagttcatccgcgcgcgcagcgacaagcgggagtaccgccgtgtggtgctcgcaaacgcgctcgagatcctactaatcagcgaccccgacactgacaaggcggcggcgtgcatggaggtcgaggtgggctcgttcagcgacccggagggactcgagggcctcgcgcacttcctcgagcacatgctattttatgccagcgagaaatatcctggagaacacgagtatacgaaatatatcacagagcacggtggctcttacaatgcatatacaagctcagagacaacaaacttctttttcgatgtcaatgtggacaattttgaagaagccttagatagatttgctcagttcttcattaagccactgatgtcacaggatgctgttcttagagagataaaagctgttgattctgaacacaagaaaaatttgttgtccgatggctggagaatgtatcagcttcaaaagcatctggcttcaaaggatcacccttaccacaaattcagtacaggaagttgggaaacactagaaactaaaccaaaagcgaggggcgtggacatcagacttgaacttctgaagttttacaagaattattcagcaaaccttatgcaccttgttgtttatggaaaggagagcctcgattacattcagggcttggttgagcgtatgtttagtgacataaaaaacactgatcagagatgcttcaaatgtccaagtcatcctctttcagaggaacatttgcagcttcttgtcaaagcactaccaatagaagaaggggactatctaagaattatatggccaattactcctagcatccagttttacaaagaaggtccttgccattatctaagtcacctcattgggcatgaaggcgaggggtccgtcttccatattataaaggaactaggatgggccatgaacttaatggctggagagagcactgacagtaatgaatattcctttttctcagtaagcatcaggctcaccgatgctggtcatgaacacatggaggatattgttgggttgatctttaaatatcttcatctattaaaagtagacggagtccacgagtggatatttaatgagcttgaagcgataaatgaaatggagttccattatcaagacaaagttgatccaataagctatgtgatgcgtactgtctcaactatgcggttgtttccaccagaagaatggctggttggagcagcattgccatcaaagtatgcaccacaaagaataaatatgatactcgatcaactatcacctgaaagatgttatgcaccttgagtccagccaatgtaacccactagtgttaggtatatgtaatacaaagatcactattaatgacttagggtttttactctccaacattggagttttttcttttgcaccttccctagccgtcgcctgcccactagggatgccaccaccatggtcgacggccctcctctccccctacgggctctcctctcctccctcattggtctttggtagatgctgggattccttccaccccaaccccaccaccatccccagcctctagttgtctg

SEQ ID NO: 78335 - DNA, 5040 bp, Zea Mays
cttgtccattccagggctccagccagcaaagagctggattcttcgtatcccctaccaaaccccaccaccacgagcggccgccgcgcggcgagaccaggacgcatggcgactgcctcctccttcaccgccatctttttcagcagtgccttcgtcgcatgcttcgcggaggtaccgtccgcacacctgcattctttagtttcttttttatagcctctcgcgagcatcgcatggcatccatccgtctgagaggcagaggaggagccactgaaaagccactgaaattgggactactctctcgctccctacctcaagcatagtgagtagtgactggggcttgcagtagctctgttttgatgagccattgaggcaaattgaagagggatttgtttggcttgcaagtggcatgatattcttattttattttttgcaacttaaaaactattagtttggggctactagctaggctaacgttgccatttgcttcttcaaagaaagttggaggatgtttatttgatctcaaacagaagtgtcaacgatttgggcttggagccagctttgatttaccattcctttcgacatagccaaagtgcagatccagctgcaaaggaaggcaccattaccaccaccacctgtggctgcaacagccacaactgctgctggtggagggacactagccacaatcatgtgcatcgccagagaggaaggggttgtcgcgctctagaagggcgtcatccctggcctccactgtcagtttctctatgatggcctccacatcagcttgtgaaggctttcttcgtcagatgtgctgttgtgggtgatgtcagtttactaagcaagattcttgctgcgcttgccacaggtgtgatagctattgttgtggcaaatccaactgatctcgttaaagttaggttgcaagctgatggaaaggctaacacagtcaagaggagttattctggagcccttaatgtatatgctacaataatcagacatgttactttaaccatcatgggcagtaagtgtacaagattatttcttttttcgttgtccttaaaatatttcatgtttccaggaaggtattggagctttgtggactggccttggcccaaatgtcgcacacaatgtcataattaacgctgccgagttggacagctatgattagttcaaacatgtacctgttgactctaatgtctttgtggtgggcattatatttcattatcattattcattcatttgttctgttcatgtagatgtttctaaaacttcctaggtatactgataacgtgttacccatcttttagctggacttggtgctgattttttttactatttgcattggctctccgatggatgcaaataagctttgactaaatatcttactagcagttcacaaggttcagcaaaaaaaaaactaaaacaacacaattgttttgtattctttacttcaatagtcatcgagtgattcatcctccatattttgcacaaaaactaagggaacacctagcctacctaccgtggacaaataccatttgaagaattgttagataatttcacacatgtatttacatttttttcctaatgagtacgtgcaggtttatactatatattaatctaccatatctctatacacttagacatgactaattttcgactgaaattagctgcaatctcagaaaattcgttgaacattggttgttttaattttggggaaatcatgtatcttagagaacccttatttacattgcacatttgaagccatcatttaaaaaatcaaacaaattataaattaggatggatggaatatttgtttacattttccctagagggggtgaacattctgaagcattaacgaactacagcctaggaagaaatttaggtattggtacatttggaaaagtgaagattgcagagcataaccttacatgacatagggttgctataaagatcatcaactgctaccaaatgagaaatatggaaatggaagataaaaatatggtttcgggtgaaggaagttgttaatattaacaaattgttatcaacatttgggtttgtacttgccactcaaacttttatctctactaatatgaagaaggtaaggggtaggttgcctaccatggttctgcctaccccttgttctgcctcctgcgcctccacgctaggcaaccaagaatgttcttaaatgagcaactttttcatgcaatcaagaatcagaagtctgtgttggtttacatcttttctgaaagtgatttactattttatacttgagtaactttgtcctatgatatgagatatccaaattcatctaataattagttaatttgagatgagttggtcctacaagggtccataactgtattgtatgcacttgcacccacatatatctaataagtgagtctgagcagtgacatagtccattggtaccatgggttgtatggatataggtcactgcattgctgatagtgaggagcagaaagttcatgttattgctggtgtgctgacccttaccactccaattttagtccacccctattgaccacatagttgaaatgagtattataggtgtgattacatgagtcatatctgcagcatggctcatttttgaatgtttgctggtgggaggatcgtctcttctatgtctacaagaatattttgccagtgatgacggtgtttagaggatgggatccttgcaattgtcaaacaagatgagagaccccttgaattgcttgctaaagaatatgctatcaactcttttgacatagatcctcaaaacccctctgtaagcccttgtcttcacctgctcaagtgaacaatttttcttatttatatataatgttaatattgttatggatttgtgtaggatgttgttttcacgttagaatgggaatcaatcggtgtcctaccttgtggctagaagaaagaaaatttttactaccgagggatctcaattagaattttaggctcattcatacattcactacaatgccttcgaactcatgaacatttatctctggctctattgtggtgggttacatgaatagagtttttgcatgttcttcgtttcatatggtggcatacttgttactatgtgacattgtttgatgaaacccttgcgacattgtattatttattttgttctatatagtcttaacattttatcaaataagaatttatgtgacatcacaacacattgtactatcatatatagaagtcgacattgtattgatggttgcaatgtagtggtcccgttgcaacgcacggtggttggaagactcgatcatacgacgccagcaaagaggccaattctggtcgttgcgcaggcagcgtggcacgtcattcggcgatcgtggaaaggccttctgccatgagcccatgacgcgcatacgctcgcggcggaagcgaacggaggaccgcgtccaatcgaagcggagaggaggagaagggtgtgctgatggcgacggcggtggcggccacggccgcggcggcgggtggcagcaatgtcgagttcatccgcgcgcgcagcgacaagcgggagtaccgccgtgtggtgctcgcaaacgcgctcgagatcctactaatcagcgaccccgacactgacaaggcggcggcgtgcatggaggtcgaggtgggctcgttcagcgacccggagggactcgagggcctcgcgcacttcctcgagcacatgctattttatgccagcgagaaatatcctggagaacacgagtatacgaaatatatcacagagcacggtggctcttacaatgcatatacaagctcagagacaacaaacttctttttcgatgtcaatgtggacaattttgaagaagccttagatagatttgctcagttcttcattaagccactgatgtcacaggatgctgttcttagagagataaaagctgttgattctgaacacaagaaaaatttgttgtccgatggctggagaatgtatcagcttcaaaagcatctggcttcaaaggatcacccttaccacaaattcagtacaggaagttgggaaacactagaaactaaaccaaaagcgaggggcgtggacatcagacttgaacttctgaagttttacaagaattattcagcaaaccttatgcaccttgttgtttatggaaaggagagcctcgattacattcagggcttggttgagcgtatgtttagtgacataaaaaacactgatcagagatgcttcaaatgtccaagtcatcctctttcagaggaacatttgcagcttcttgtcaaagcactaccaatagaagaaggggactatctaagaattatatggccaattactcctagcatccagttttacaaagaaggtccttgccattatctaagtcacctcattgggcatgaaggcgaggggtccgtcttccatattataaaggaactaggatgggccatgaacttaatggctggagagagcactgacagtaatgaatattcctttttctcagtaagcatcaggctcaccgatgctggtcatgaacacatggaggatattgttgggttgatctttaaatatcttcatctattaaaagtagacggagtccacgagtggatatttaatgagcttgaagcgataaatgaaatggagttccattatcaagacaaagttgatccaataagctatgtgatgcgtactgtctcaactatgcggttgtttccaccagaagaatggctggttggagcagcattgccatcaaagtatgcaccacaaagaataaatatgatactcgatcaactatcacctgaaagatgttatgcaccttgagtccagccaatgtaacccactagtgttaggtatatgtaatacaaagatcactattaatgacttagggtttttactctccaacattggagttttttcttttgcaccttccctagccgtcgcctgcccactagggatgccaccaccatggtcgacggccctcctctccccctacgggctctcctctcctccctcattggtctttggtagatgctgggattccttccaccccaaccccaccaccatccccagcctctagttgtctg

SEQ ID NO: 78336 - DNA, 4191 bp, Zea Mays
cttgtccattccagggctccagccagcaaagagctggattcttcgtatcccctaccaaaccccaccaccacgagcggccgccgcgcggcgagaccaggacgcatggcgactgcctcctccttcaccgccatctttttcagcagtgccttcgtcgcatgcttcgcggaggtaccgtccgcacacctgcattctttagtttcttttttatagcctctcgcgagcatcgcatggcatccatccgtctgagaggcagaggaggagccactgaaaagccactgaaattgggactactctctcgctccctacctcaagcatagtgagtagtgactggggcttgcagtagctctgttttgatgagccattgaggcaaattgaagagggatttgtttggcttgcaagtggcatgatattcttattttattttttgcaacttaaaaactattagtttggggctactagctaggctaacgttgccatttgcttcttcaaagaaagttggaggatgtttatttgatctcaaacagaagtgtcaacgatttgggcttggagccagctttgatttaccattcctttcgacatagccaaagtgcagatccagctgcaaaggaaggcaccattaccaccaccacctgtggctgcaacagccacaactgctgctggtggagggacactagccacaatcatgtgcatcgccagagaggaaggggttgtcgcgctctagaagggcgtcatccctggcctccactgtcagtttctctatgatggcctccacatcagcttgtgaaggctttcttcgtcagatgtgctgttgtgggtgatgtcagtttactaagcaagattcttgctgcgcttgccacaggtgtgatagctattgttgtggcaaatccaactgatctcgttaaagttaggttgcaagctgatggaaaggctaacacagtcaagaggagttattctggagcccttaatgtatatgctacaataatcagacatgttactttaaccatcatgggcagtaagtgtacaagattatttcttttttcgttgtccttaaaatatttcatgtttccaggaaggtattggagctttgtggactggccttggcccaaatgtcgcacacaatgtcataattaacgctgccgagttggacagctatgattagttcaaacatgtacctgttgactctaatgtctttgtggtgggcattatatttcattatcattattcattcatttgttctgttcatgtagatgtttctaaaacttcctaggtatactgataacgtgttacccatcttttagctggacttggtgctgattttttttactatttgcattggctctccgatggatgcaaataagctttgactaaatatcttactagcagttcacaaggttcagcaaaaaaaaaactaaaacaacacaattgttttgtattctttacttcaatagtcatcgagtgattcatcctccatattttgcacaaaaactaagggaacacctagcctacctaccgtggacaaataccatttgaagaattgttagataatttcacacatgtatttacatttttttcctaatgagtacgtgcaggtttatactatatattaatctaccatatctctatacacttagacatgactaattttcgactgaaattagctgcaatctcagaaaattcgttgaacattggttgttttaattttggggaaatcatgtatcttagagaacccttatttacattgcacatttgaagccatcatttaaaaaatcaaacaaattataaattaggatggatggaatatttgtttacattttccctagagggggtgaacattctgaagcattaacgaactacagcctaggaagaaatttaggtattggtacatttggaaaagtgaagattgcagagcataaccttacatgacatagggttgctataaagatcatcaactgctaccaaatgagaaatatggaaatggaagataaaaatatggtttcgggtgaaggaagttgttaatattaacaaattgttatcaacatttgggtttgtacttgccactcaaacttttatctctactaatatgaagaaggtaaggggtaggttgcctaccatggttctgcctaccccttgttctgcctcctgcgcctccacgctaggcaaccaagaatgttcttaaatgagcaactttttcatgcaatcaagaatcagaagtctgtgttggtttacatcttttctgaaagtgatttactattttatacttgagtaactttgtcctatgatatgagatatccaaattcatctaataattagttaatttgagatgagttggtcctacaagggtccataactgtattgtatgcacttgcacccacatatatctaataagtgagtctgagcagtgacatagtccattggtaccatgggttgtatggatataggtcactgcattgctgatagtgaggagcagaaagttcatgttattgctggtgtgctgacccttaccactccaattttagtccacccctattgaccacatagttgaaatgagtattataggtgtgattacatgagtcatatctgcagcatggctcatttttgaatgtttgctggtgggaggatcgtctcttctatgtctacaagaatattttgccagtgatgacggtgtttagaggatgggatccttgcaattgtcaaacaagatgagagaccccttgaattgcttgctaaagaatatgctatcaactcttttgacatagatcctcaaaacccctctagcacatgctattttatgccagcgagaaatatcctggagaacacgagtatacgaaatatatcacagagtgtgctttggctacaattttgactatttagtatgatgcgaaaatatcagcacggtggctcttacaatgcatatacaagctcagagacaacaaacttctttttcgatgtcaatgtggacaattttgaagaagccttagatagatttgctcagttcttcattaagccactgatgtcacaggatgctgttcttagagagataaaagctgttgattctgaacacaagaaaaatttgttgtccgatggctggagaatgtatcagcttcaaaagcatctggcttcaaaggatcacccttaccacaaattcagtacaggaagttgggaaacactagaaactaaaccaaaagcgaggggcgtggacatcagacttgaacttctgaagttttacaagaattattcagcaaaccttatgcaccttgttgtttatggaaaggagagcctcgattacattcagggcttggttgagcgtatgtttagtgacataaaaaacactgatcagagatgcttcaaatgtccaagtcatcctctttcagaggaacatttgcagcttcttgtcaaagcactaccaatagaagaaggggactatctaagaattatatggccaattactcctagcatccagttttacaaagaaggtccttgccattatctaagtcacctcattgggcatgaaggcgaggggtccgtcttccatattataaaggaactaggatgggccatgaacttaatggctggagagagcactgacagtaatgaatattcctttttctcagtaagcatcaggctcaccgatgctggtcatgaacacatggaggatattgttgggttgatctttaaatatcttcatctattaaaagtagacggagtccacgagtggatatttaatgagcttgaagcgataaatgaaatggagttccattatcaagacaaagttgatccaataagctatgtgatgcgtactgtctcaactatgcggttgtttccaccagaagaatggctggttggagcagcattgccatcaaagtatgcaccacaaagaataaatatgatactcgatcaactatcacctgaaagatgttatgcaccttgagtccagccaatgtaacccactagtgttaggtatatgtaatacaaagatcactattaatgacttagggtttttactctccaacattggagttttttcttttgcaccttccctagccgtcgcctgcccactagggatgccaccaccatggtcgacggccctcctctccccctacgggctctcctctcctccctcattggtctttggtagatgctgggattccttccaccccaaccccaccaccatccccagcctctagttgtctg

SEQ ID NO: 78337 - DNA, 4739 bp, Zea Mays
cttcccttggctgcctctgtgtcttgtccattccagggctccagccagcaaagagctggattcttcgtatcccctaccaaaccccaccaccacgagcggccgccgcgcggcgagaccaggacgcatggcgactgcctcctccttcaccgccatctttttcagcagtgccttcgtcgcatgcttcgcggagccaaagtgcagatccagctgcaaaggaaggcaccattaccaccaccacctgtggctgcaacagccacaactgctgctggtggagggacactagccacaatcatgtgcatcgccagagaggaaggggttgtcgcgctctagaagggcgtcatccctggcctccactgtcagtttctctatgatggcctccacatcagcttgtgaaggctttcttcgtcagatgtgctgttgtgggtgatgtcagtttactaagcaagattcttgctgcgcttgccacaggtgtgatagctattgttgtggcaaatccaactgatctcgttaaagttaggttgcaagctgatggaaaggctaacacagtcaagaggagttattctggagcccttaatgtatatgctacaataatcagacatgttactttaaccatcatgggcagtaagtgtacaagattatttcttttttcgttgtccttaaaatatttcatgtttccaggaaggtattggagctttgtggactggccttggcccaaatgtcgcacacaatgtcataattaacgctgccgagttggacagctatgattagttcaaacatgtacctgttgactctaatgtctttgtggtgggcattatatttcattatcattattcattcatttgttctgttcatgtagatgtttctaaaacttcctaggtatactgataacgtgttacccatcttttagctggacttggtgctgattttttttactatttgcattggctctccgatggatgcaaataagctttgactaaatatcttactagcagttcacaaggttcagcaaaaaaaaaactaaaacaacacaattgttttgtattctttacttcaatagtcatcgagtgattcatcctccatattttgcacaaaaactaagggaacacctagcctacctaccgtggacaaataccatttgaagaattgttagataatttcacacatgtatttacatttttttcctaatgagtacgtgcaggtttatactatatattaatctaccatatctctatacacttagacatgactaattttcgactgaaattagctgcaatctcagaaaattcgttgaacattggttgttttaattttggggaaatcatgtatcttagagaacccttatttacattgcacatttgaagccatcatttaaaaaatcaaacaaattataaattaggatggatggaatatttgtttacattttccctagagggggtgaacattctgaagcattaacgaactacagcctaggaagaaatttaggtattggtacatttggaaaagtgaagattgcagagcataaccttacatgacatagggttgctataaagatcatcaactgctaccaaatgagaaatatggaaatggaagataaaaatatggtttcgggtgaaggaagttgttaatattaacaaattgttatcaacatttgggtttgtacttgccactcaaacttttatctctactaatatgaagaaggtaaggggtaggttgcctaccatggttctgcctaccccttgttctgcctcctgcgcctccacgctaggcaaccaagaatgttcttaaatgagcaactttttcatgcaatcaagaatcagaagtctgtgttggtttacatcttttctgaaagtgatttactattttatacttgagtaactttgtcctatgatatgagatatccaaattcatctaataattagttaatttgagatgagttggtcctacaagggtccataactgtattgtatgcacttgcacccacatatatctaataagtgagtctgagcagtgacatagtccattggtaccatgggttgtatggatataggtcactgcattgctgatagtgaggagcagaaagttcatgttattgctggtgtgctgacccttaccactccaattttagtccacccctattgaccacatagttgaaatgagtattataggtgtgattacatgagtcatatctgcagcatggctcatttttgaatgtttgctggtgggaggatcgtctcttctatgtctacaagaatattttgccagtgatgacggtgtttagaggatgggatccttgcaattgtcaaacaagatgagagaccccttgaattgcttgctaaagaatatgctatcaactcttttgacatagatcctcaaaacccctctgatgttgttttcacgttagaatgggaatcaatcggtgtcctaccttgtggctagaagaaagaaaatttttactaccgagggatctcaattagaattttaggctcattcatacattcactacaatgccttcgaactcatgaacatttatctctggctctattgtggtgggttacatgaatagagtttttgcatgttcttcgtttcatatggtggcatacttgttactatgtgacattgtttgatgaaacccttgcgacattgtattatttattttgttctatatagtcttaacattttatcaaataagaatttatgtgacatcacaacacattgtactatcatatatagaagtcgacattgtattgatggttgcaatgtagtggtcccgttgcaacgcacggtggttggaagactcgatcatacgacgccagcaaagaggccaattctggtcgttgcgcaggcagcgtggcacgtcattcggcgatcgtggaaaggccttctgccatgagcccatgacgcgcatacgctcgcggcggaagcgaacggctggtgccgcaacccggacggccggaccggacggacggcatctgctccctgcccgtgggcggctggccccgatataaaactgacaagagatagactaatcaagtctctcaacccgagtctaatcttggtccccaatccaatcccgcacccaccattgcgagagatcatcagaggaccgcgtccaatcgaagcggagaggaggagaagggtgtgctgatggcgacggcggtggcggccacggccgcggcggcgggtggcagcaatgtcgagttcatccgcgcgcgcagcgacaagcgggagtaccgccgtgtggtgctcgcaaacgcgctcgagatcctactaatcagcgaccccgacactgacaaggcggcggcgtgcatggaggtcgaggtgggctcgttcagcgacccggagggactcgagggcctcgcgcacttcctcgagcacatgctattttatgccagcgagaaatatcctggagaacacgagtatacgaaatatatcacagagcacggtggctcttacaatgcatatacaagctcagagacaacaaacttctttttcgatgtcaatgtggacaattttgaagaagccttagatagatttgctcagttcttcattaagccactgatgtcacaggatgctgttcttagagagataaaagctgttgattctgaacacaagaaaaatttgttgtccgatggctggagaatgtatcagcttcaaaagcatctggcttcaaaggatcacccttaccacaaattcagtacaggaagttgggaaacactagaaactaaaccaaaagcgaggggcgtggacatcagacttgaacttctgaagttttacaagaattattcagcaaaccttatgcaccttgttgtttatggaaaggagagcctcgattacattcagggcttggttgagcgtatgtttagtgacataaaaaacactgatcagagatgcttcaaatgtccaagtcatcctctttcagaggaacatttgcagcttcttgtcaaagcactaccaatagaagaaggggactatctaagaattatatggccaattactcctagcatccagttttacaaagaaggtccttgccattatctaagtcacctcattgggcatgaaggcgaggggtccgtcttccatattataaaggaactaggatgggccatgaacttaatggctggagagagcactgacagtaatgaatattcctttttctcagtaagcatcaggctcaccgatgctggtcatgaacacatggaggatattgttgggttgatctttaaatatcttcatctattaaaagtagacggagtccacgagtggatatttaatgagcttgaagcgataaatgaaatggagttccattatcaagacaaagttgatccaataagctatgtgatgcgtactgtctcaactatgcggttgtttccaccagaagaatggctggttggagcagcattgccatcaaagtatgcaccacaaagaataaatatgatactcgatcaactatcacctgaaagatgttatgcaccttgagtccagccaatgtaacccactagtgttaggtatatgtaatacaaagatcactattaatgacttagggtttttactctccaacattggagttttttcttttgcaccttccctagccgtcgcctgcccactagggatgccaccaccatggtcgacggccctcctctccccctacgggctctcctctcctccctcattggtctttggtagatgctgggattccttccaccccaaccccaccaccatccccagcctctagttgtctg

SEQ ID NO: 78338 - DNA, 2166 bp, Zea Mays
tattgttgtggcaaatccaactgatctcgttaaagttaggttgcaagctgatggaaaggctaacacagtcaagaggagttattctggagcccttaatgtatatgctacaataatcagacatgttactttaaccatcatgggcagtaagtgtacaagattatttcttttttcgttgtccttaaaatatttcatgtttccaggaaggtattggagctttgtggactggccttggcccaaatgtcgcacacaatgtcataattaacgctgccgagttggacagctatgattagttcaaacatgtacctgttgactctaatgtctttgtggtgggcattatatttcattatcattattcattcatttgttctgttcatgtagatgtttctaaaacttcctaggtatactgataacgtgttacccatcttttagctggacttggtgctgattttttttactatttgcattggctctccgatggatgcaaataagctttgactaaatatcttactagcagttcacaaggttcagcaaaaaaaaaactaaaacaacacaattgttttgtattctttacttcaatagtcatcgagtgattcatcctccatattttgcacaaaaactaagggaacacctagcctacctaccgtggacaaataccatttgaagaattgttagataatttcacacatgtatttacatttttttcctaatgagtacgtgcaggtttatactatatattaatctaccatatctctatacacttagacatgactaattttcgactgaaattagctgcaatctcagaaaattcgttgaacattggttgttttaattttggggaaatcatgtatcttagagaacccttatttacattgcacatttgaagccatcatttaaaaaatcaaacaaattataaattaggatggatggaatatttgtttacattttccctagagggggtgaacattctgaagcattaacgaactacagcctaggaagaaatttaggtattggtacatttggaaaagtgaagattgcagagcataaccttacatgacatagggttgctataaagatcatcaactgctaccaaatgagaaatatggaaatggaagataaaaatatggtttcgggtgaaggaagttgttaatattaacaaattgttatcaacatttgggtttgtacttgccactcaaacttttatctctactaatatgaagaaggtaaggggtaggttgcctaccatggttctgcctaccccttgttctgcctcctgcgcctccacgctaggcaaccaagaatgttcttaaatgagcaactttttcatgcaatcaagaatcagaagtctgtgttggtttacatcttttctgaaagtgatttactattttatacttgagtaactttgtcctatgatatgagatatccaaattcatctaataattagttaatttgagatgagttggtcctacaagggtccataactgtattgtatgcacttgcacccacatatatctaataagtgagtctgagcagtgacatagtccattggtaccatgggttgtatggatataggtcactgcattgctgatagtgaggagcagaaagttcatgttattgctggtgtgctgacccttaccactccaattttagtccacccctattgaccacatagttgaaatgagtattataggtgtgattacatgagtcatatctgcagcatggctcatttttgaatgtttgctggtgggaggatcgtctcttctatgtctacaagaatattttgccagtgatgacggtgtttagaggatgggatccttgcaattgtcaaacaagatgagagaccccttgaattgcttgctaaagaatatgctatcaactcttttgacatagatcctcaaaacccctctcgagaaatatcctggagaacacgagtatacgaaatatatcacagagcacggtggctcttacaatgcatatacaagctcagagacaacaaacttctttttcgatgtcaatgtggacaattttgaagaagccttagatagatttgctcagttcttcattaagccactgatgtcacaggatgctgttcttagagagataaaagctgttgattctgaacacaagaaaaatttgttgtccgatggctggagaatgtatcagtttctt

SEQ ID NO: 78339 - DNA, 457 bp, Zea Mays
gtcccttcccttggctgcctctgtgtcttgtccattccagggctccagccagcaaagagctggattcttcgtatcccctaccaaaccccaccaccacgagcggccgccgcgcggcgagaccaggacgcatggcgactgcctcctccttcaccgccatctttttcagcagtgccttcgtcgcatgcttcgcggagccaaagtgcagatccagctgcaaaggaaggcaccattaccaccaccacctgtggctgcaacagccacaactgctgctggtggagggacactagccacaatcatgtgcatcgccagagaggaaggggttgtcgcgctctagaagggcgtcatccctggcctccactgtcagtttctctatgatggcctccacatcagcttgtatgatcctgtgaaggctttcttcgtcagatgtgctgttgtgggtgatgtcagtttactaagc

SEQ ID NO: 78340 - DNA, 1025 bp, Zea Mays
tgcaattagcagcatacagtgcagatgctcttccctcccaatgcaatgcaagctgtgcactttatgttgcgaagctagctatttatctccccggccccccccctgctcctctcttccacgggataacgggaggacgacatcacacagccatcgccggccggaagctctcagctctgagcagaaggaggcgggtcgtcacacggtcacacacccgtcagcatgagcgaccgcagggtactacaacaacggaccaccggtgatggcgccgccgccgtaccagtacgcagctcctccaccgccgaggagggagccgagcttccttgaaggatggtaagcagccacgcgcgcacacgatctactatctagctttggagcacgaaaactagctatacccggcccattggagagagaggggggaaaattagtatttggataaaaactaaaccatcactaaataatctgaacagttcgatgtttctcatttcactcgatcttggacacatgaatgcagtctcgccgctctgtgctgctgctgcctcatagacgagtgctgctgcgacccgtcggtgatattcgtgagctgatccggccgcagtccgcagcacatgccatgccaccgtcccagcccaagagacatgtcgcatgcatacgtgtgtgttcgcatgcacttcgcgcctctgttggtgatatatgatgtttttttcagcctatatgtgtctactacgttgaattagtacaagcggtgagttgtgcgttcagatctcggggttagagagtttgttggacatggcccgatccagaattccatatgctgatcatggatccggcgcatgtttactgcatatgcacttgtttaagcgcaacgcaacacgatgtatatgtgtgtacgaaatctttgaataaggcctcctttggttatatggactaatccttagtctcgtttattcttttttttttgtcaaacggaaggattatagtagagactaattaactttagtccttagtccttcacatgggtgttaaaa

SEQ ID NO: 78341 - DNA, 2103 bp, Zea Mays
cgggcgcgtacacagcagcccacacgtaatcctttccccctccctttcacacttaaccctctcaactcccaactccttcgcaaattcgggtctcgaggaggcgttatatacgccgtgccgtagaatttgcgtctcttccgaggggctcgtcgcgagaaggagccgcaaaactttgctacggccacacgagcagcagagcagccgcgctcggtcctgctccccgcgtctggtgtcggggaccgcccccctcctgcccggcacccgctgcggctggctctcccgatgaggccgccggaggtagcggtggcggcgcttcttctcgtggcggccgccgccgtggccgcggccgcggccgcggcggagtcggcagcgccgttaccggcggcgctgcggttgcagcgcgcggttccgcaccagggggtgcccctggaggaactcaggcggcgggacgccgcgcggcaccgggtttcgaggaggaggctgctcgggggcgtagccggcgtggtggacttccccgtcgagggctccgccaatccgtacatggtcgggctttattttacccgggtgaaattaggaaacccggcaaaggaattcttcgtccagattgacactgggagtgatatattgtgggtcacttgcagtccttgcactggttgcccgacatcaagtggactcaaatccagctagagtccttcaaccctgactcttcatcaacagcatccagaataacatgctctgatgacagatgtacagctggcttccaaacaggggaagcaatctgtcaaacctcaaattcccaaagcagcccttgtgggtacactttcacctatggtgatgggagtggcacatcagggtactatgtgtctgacacgatgtttttcgaaactgtcatgggaaacgagcagaccgccaattcgtctgcctctattgttttcggatgtagcaactcacagtcaggagacctgacaaaggcagatagggcagttgatggaatttttgggttcggacagcatcaactgtctgtaatttcgcaacttaactctcttggggtgtcccctaaggtgttctctcattgcctgaaaggttcggataatggtggtggcattcttgtgcttggtgaaattgtggagccaggattagtgtatactccacttgttccatcacagcctcattacaacttaaatctggaaagcattgctgtcaatggtcaaaagctgcccattgattcctccttgtttacaacatcaaatacacaaggaacaatcgtggattcaggaacaacattggcataccttgcagatggagcctacgatccatttgttagtgcgatagctgctgcagtctctccatctgtgcgttctctagtcagcaaaggaagccaatgctttatcacttccagcagcgttgactcatcgtttccaaccgtaaccctttattttatgggtggtgttgcgatgtcggtgaagccagagaactatcttttacagcaggcttctgttgacaacagtgtattgtggtgcattggttggcaaaggaaccagggccaagaaataactatactcggagatcttgttttaaaggataagatattcgtgtatgacttggcaaacatgcgcatgggctgggcggactacgattgttcaatgtcggtgaacgtgacgacgtcatcagggaagaaccagtacgtgaacactgggcagttcgacgtgaacggctccgcacggcgcgcatcttacaagagcttgataccagccgggatcgtcaccatgcttgtgcatatgctcattttcggcactggctcacgtagatagcaggcgagccagctgacatcgtgatttgattattattgccacggcgtattcagaggtagagacgtcgccatccctgctgcgctagtcggttagtcgtatggacgaagagttggcatggcctgagcattcttactgtacatacagaaaatgaaaggtctattgttcatgtagtacggcctccttttttttctcaaattgcagcccggttcttcttccgtctctctgtttggtcgtgctctcaaatttttatccgccataaaatttggatgctattgtttttctacagcagcag

SEQ ID NO: 78342 - DNA, 1314 bp, Zea Mays
cttgccttaaattatcacttcctcatactccactcatgtgggagccttcagcactgggtatgaaccttacctgtgggagaatgagaagcaatcttacaagcgtcatgttgttctttttggttttttggtccaactgaatcacatgtacactggtactatgcaaaaattaccaacaaaatcaaatacagattcaaatatcatgagatgctctcaggttccaagattcaagtacctaccaatcagtgctccagctatatcatcaagatcacacaaaccatcactacagtctctgtctagcgagtccacatctaaaaatccttggaaatcctattcaaatggagatagatctactacaccagagtttgatgataatgcaagtcttgttggtgctgctccattgcttaagtcatttgttactcaggtggggaccaaatttggggagaacacatcgagatggggttccatgctctctgatggacaggttggtaagctaagtgacatccttcctggaccagcagctgggtttttctcttctttcacatctggagctcgatatgattcatagtaatgcaacggtgaccattgatctttagcccttactacacgtgacacggaaacccacatgtgtcatcaaaggaagaaaaagaactgttggtcctttggaaatctattgctcactgaatgatgccacatcgctggtcccgtgttgcttggcatatctgccgtgcctattcacatcttattgtgcctagactttcatggggaagctgaggaaattataatggaaaagatgagatttattctatatcggttgcccaaggttgaatgagtggttaggaaaaatcagatttgggttcagtatgtttcttgcttgcatttgacttggtacataggacagaacaagtgcaacgatgccgctgatactagctcactttggggactcctgttgtggatacgcggcacttgaagttgtgaaaagagttttggggggtccattctttcttccttgtctttggctcggttagttggcttttttttttacatcggatcagtggtggaactgcgaggttgtggttttatcatgtaggcaaatttgccaaatgtgtacatcggaaatatgggaataaaagcctctatcaatcagcattcagcatcatgcagcgctcaagggcctgtttggttggcatgctgattgccaatttgccatagtctttctgtatttgtctacatgtctgtctgggttgaagttgttacaataggtacagttgctgattttatacgtggctaagagcatctccaaccgtcttttctaaa

SEQ ID NO: 78343 - DNA, 4029 bp, Zea Mays
cctcaccccttcctcccgatcctctctcggatctcgccgcgcgctgccgcgctcgaaggtgagcggggccgcgatgcctgcggtgcccgttcccggaggcggtggctcctccgacgccgaggagctgttccgcaccaagcgcatcccggagattcgcgcggttgagggcgccacccgacgcgagatctccgccaaggaggaggagctccggcagctcgtcgggcgcagctaccgcgacctgctcgactcagcggactccatactcctcatcaagcagtcctccgatgcaatattctacaacctcgcccgcatctccgactccttgtcgtcgctctcgcctccccctgaaccctctctcgccgtaagcgccgtatcgccgtctccgtcagctggagggcgcgcgaggctctacgcgctggccgcgcgcgccaagtacctggttgacacaccggagcacatctggggccggctcgacgagggcctgctcctggaggcggcggggcggtacctgcgggctcaggtcgtgtacgggcgactctcccgcgacgccgctgccgccgcgcggttcccactcctcgcgcaccaggcgcagctcgtggaggcgttccggccgcagatcgcccagcgagcgcgcgagcgcctcgctgaccgccgcctccctgtagcggcccacgctgacgcgcttgcggccgtggccgcgatcgacgcgccatcgcttgcccctgctccggcgctccttctcttcctcacctcgcgccgcgcttggatctcccaagacctagctggtctcgcctcggatctgtcatcctacacctctgtgctgtgcgatatagcgaggatcgtgcggatcacgcttggccacgttggacagttgtttgtgcctgcactcagtgatatgccgttgttcttcaagacggtgactgagaagacgccgcctgagcagttgttcggtggcattccggaccctgatgatgaagcacggttgtggaaggagcacatgaaccagcttgaagctataatggtgctgcttaagccagatgttgttgcagcggcctgtacggattggctcaaggaatgttgcagtgaaatttttggtgtgattgctggtgagcaaaagttggttgatgccattgggagtggggagctgcttggatcagtgcaaagacttgtacgtgatgccctagatgggagagatggattggagagaagtttggagcagtggctgaaaagtgtctttgggtcagatactgagtcgccatgggatcagatccgtgggttgatcttgaaggacgacaaggatattttcgaggattggatggaggaagcatttgtgcgacggatgaaggacatcgtgcattcagagtttgatatattgggttctagtgttaacgtgaaggaatcaattcatgctatcggtgccaatgctgatccaaaggatgctggagatttccttgcatacctgcggaaatcttcaaagggtggtggtttctggttctcagagtctaagatcaagaaaggtggagttttggcacacttgaaaccaattgctgatgaaaatgatttccgtagctgcctaacatcgtattttgggccagaagttagtcggatcaggagtgcaattgacagtaaatgcaagaatatcctggaggatctgctaagctttgtggagtcacataattcaaccacaaggctgaaggaattggtgccataccttcaggagaaatgctacaagaccatctcgggagtactgaaagaattagaagctgagctcagaaagctctctgctttgttgggaaccaaaaaggagggtaacgacatacctgcagcttctattatagcggagaggtctctcttcattggtcgtctcttgtttgcgctgagataccattcaagtcatgtacccctgatactaggttccccaagggagtgggtaaaggaggttggtggtgcagcatttgccaggttatcatcacctacagcaagacatttaagggcatcttttacacccagaaggcacacatttgacagtcccaagagtcctggaaggcaattctccgatagccccagaagacaaactattgctgctgcagtatctttgtttggagctaatgatagatctaatcctagacttgatgaactcaataagaccctgcagtcactttgcatcatggctcataatgtatggatagcatgggtgtccactgaattatctcacattctttcatatgatctcaataaagacgattcactatcctctgcaactcctttgaggatacagaattctaatcgctatagttgtgtggtttggttgcattgttagggctgggaagtcacagtaattaaacaagaggaaacaactgagggtcccttggaaatgcaaatagctcttccatcgatgccttcattgtacatcatatcctttctttatcaagcatgtttggagattcataaggttggagggcacatcctggacaggattattttgcataattttgcttgggagctactgcagaaggtcatcaatatttatgaaaattttctttcatctgttgaatctgggaattctccggtttcagagaaaggaattctgcaaatactgctagacttgcgttttattggtgatgtcctatcaggaggtacaagttcttccacaaacactactgaaatgcagacaaaacaggattctttgccaagcaccatctccaagacttccttcaggagaaaacagtcacaattacatgcagactcagctgtcatagagcctataaacaagtatgaaccttacctgtgggagaatgagaagcaatcttacaagcgtcatgttgttctttttggttttttggtccaactgaatcacatgtacactggtactatgcaaaaattaccaacaaaatcaaatacagattcaaatatcatgagatgctctcaggttccaagattcaagtacctaccaatcagtgctccagctatatcatcaagatcacacaaaccatcactacagtctctgtctagcgagtccacatctaaaaatccttggaaatcctattcaaatggagatagatctactacaccagagtttgatgataatgcaagtcttgttggtgctgctccattgcttaagtcatttgttactcaggtggggaccaaatttggggagaacacatcgagatggggttccatgctctctgatggacaggttggtaagctaagtgacatccttcctggaccagcagctgggtttttctcttctttcacatctggagctcgatatgattcatagtaatgcaacggtgaccattgatctttagcccttactacacgtgacacggaaacccacatgtgtcatcaaaggaagaaaaagaactgttggtcctttggaaatctattgctcactgaatgatgccacatcgctggtcccgtgttgcttggcatatctgccgtgcctattcacatcttattgtgcctagactttcatggggaagctgaggaaattataatggaaaagatgagatttattctatatcggttgcccaaggttgaatgagtggttaggaaaaatcagatttgggttcagtatgtttcttgcttgcatttgacttggtacataggacagaacaagtgcaacgatgccgctgatactagctcactttggggactcctgttgtggatacgcggcacttgaagttgtgaaaagagttttggggggtccattctttcttccttgtctttggctcggttagttggcttttttttttacatcggatcagtggtggaactgcgaggttgtggttttatcatgtaggcaaatttgccaaatgtgtacatcggaaatatgggaataaaagcctctatcaatcagcattcagcatcatgcagcgctcaagggcctgtttggttggcatgctgattgccaatttgccatagtctttctgtatttgtctacatgtctgtctgggttgaagttgttacaataggtacagttgctgattttatacgtggctaagagcatctccaaccgtcttttctaaa

SEQ ID NO: 78344 - DNA, 2710 bp, Zea Mays
cggtactccccgagcacgctgagatgaagcaataaaacatccacggtacttcgacgcagctcaaccacaccatggccatgccgtctctcctccgcttcctcgtcctcctcaccgcaggcgccgccgtctcgcaggtcgtcgccgcatgggtggactgcggcgacgcctcgccatcgcctcctccatattcgtcctccccttcgccgtcaccatcatcgacgcccgccaacggcagcagcaatgcgccgttccgcgcgaacctcatgacgctcctggacgcgctcccgcgcgccgcggcgcccacggggttcgcgtccctctccctcggggccggccgcgaccgcgccttcgtccggggcctctgccgtggggacttcgaccctccccggtgcctcgcggagctgcaggaggccgtgcgcaccctcggcggcagctgccccagcagcagccgccgcggcgccgtgtggctggacgtgtacgtcgcctacgccgacaccaacgtctcgaccccccgcgaggacgacgtccgcatggtcctctacgacacgcgcctggtagcccacccggccgcctacttgcaggcgtacagcgcgctgatggggaccctggtggcgcgcgcggtgggcggcggcggcggtgaggcagggacgtcgaggcagttcttcgcgaccggggaggcaaattacgccagcgacgaccccaacggcaccatgtacgggctggtgcagtgcatgagggacatcacggcggcggactgcgtgcattgcctgcaggcctcggtgccgcagctgccgtgctgcaaggggaaccaggggggcgtcgtgctggcctacaactgctacctgaggatccaggtatacacctactatgacctggcgctcgacgcgccacctccagctgctgaaccggcgccgccggtcccctcgccgccgcccgctggggaaacaagcggaacggggacgagaccaagaaacaccatcgtactccttgccgtcgtcgttccactcgggacgctactcctcctcgcgttcgtggtggctggtgtttacttgcgaaggagaagaggcgtcgtcgtcgaagagaggggacgtgagcgcgggtgcacggcggtcgaggacgagcccagcatgacctacgttcacccggagaaattcactctggcggcgctgagggtggcaaccggcaacttcgctgcgggaaacaagctgggagagggaggttttggagaagttttcaagggcaggcttgaggatggacaccccgttgcagtgaaaaggctctccaagggctcctcgcagggtttcgacgagctgaaaaacgagctcattctcgccgccaagctgaagcacaggaacctcgtccagcttcttggggtttgcctggaggaatcggagaagctggtcgtgtacgagtacgtgccaaaccggagcctggacaccgtccttttcgatgcagggagacggccgcagcaagcgctggagtggagcgagagatacaagatcatccgcgggatcgcgcgcggcctgctgtacctccacgaggagtcccggctgcggatcatccaccgggacctcaagcccagcaacgtcctgctggactccgacatgactcccaagatctcggacttcggcctggccagagcgttctggggagacgagtccagaggggtcaccagacggcctgtcggaaccctcgggtacatggccccggagtacgcgtactacggccacgtctcgaccaagtcggacatgttcagcttcggggtcatcgtcctcgagatcatgaccggccaaaggaacagcagcccgtcggttgaagacggcagcagcaacaggaacctgctgagctacgtacgtctgggaccagtggaggcgcggatccgtggcggaggtggtggacgcgtcgccgtgcgcgggcggccagtgcgccgggaccgaggcgctctcctgcgtgcagatcgggctcctgtgcgtgcagaaggaccccaggtccaggccagacgcgtcggaggtcgtcctgatgctggagggacggtgcgcgatccagcagaagccgtcaaggccggcgttctactccggccacatcagcgtcgcctcggcgcggcgtgctgcacgcggaagtgcggtgagctacgggcgtctttctgcgatcgggactgtttccgagaacggcgttacagtttcggagctcgacccgcggtagatcgtagaacacgtttaatttttcactggtaaagctgtccagagtccagacagacagctgacctgtatccttcctagccacgccggtgctgctgccatggacatcgggaccagatcgaattttcctcaaccgccctcaatgtgcacgcatcgagtcgcaacttgctgcgttcaatgcagaaaaaacatcatcggcctttttatcccaacagggggcaggcaccgttgaatgacaaccggaacttgaaatccagaagctgagggttgccaattcccgtggattagtgcaccgatttcaacgctcccgttcagatgtcgctcatctgagacaaaaaaaaaaacaaagatctactggcgtcaaactgccgtgcctactgcctacgagaaacaccaccgctcgctatatacctatccgtgttgccatctttgcacaattatgcttgtcaccatcgccatccgcgcctcgataccatgcgtgaactggcaggaggattgtgtggcctgaaagt

SEQ ID NO: 78345 - DNA, 2973 bp, Zea Mays
cgaaattaatgcccatacccctctcattgtcccatcaaactcgctactggcctcgggcccgcccgtcgtgaggtccgagctcgatgcagccgatccggcggcggcaccgaggctttgcactcctctgtctctccgccgccctcctcgctgccgccactctgctccccggcgccgccgtcgccgaaggtgtcacgccctccgaggcgcgccggctccgcgacgaggtgaaagatatgttctatcatgcgtttgatggatacatgaagtatgctttcccactcgatgagctgcggcccttaagttgccaagatcgattctttggataccttggctttactgggtgataaggagaaatttggtgctgctgtggagtgggttggtaagaatgtccactttgatattaataaaaccgtctctgtttttgaaaccaacatacgtatccttgggggtctgctatcagctcacctgattgccagtgattatgccactggtatgagaatccaatcttatgatgaccagttacttcatttagctgctgacttagctcagaggttgttgcccgcatttgacactcctacaggtattccatttggatctgttaatttattgtacggagtcgatgaaaatgaaagcaagataacatcaacggctggtggtggtactttgacactggaatttggcatattgagtcgcttgactaataatactgtttttgagcgagttacaaaaaaatcagtgcgtggaatatggtcacgcagatcaaaactcaatcttgttggtgcccatataaatgtctttactggtgaatggacacagaaggatgcaggaattggcacaagcattgattcattctatgaatatcttctaaaggcatatttattgtttggagatgaagaatacctgtacatttttcaggaggcttacaaagctgccatgcactatctccatcatgatccttggtacgtggaggttaatatgaactctggtgctactgtttggccactcttcaatagtctgcaggcattctggccagggcttcaggttttagctggagatgttgatcctgctattcgcacacatgctgccttcttcagcgtctggaaaaagtatggttttacccctgaaggttttaatcttgctacatccactgtacaggtaatgaaactgttaaactataatagtcaagagtattagcataatctcctatctaaggtttgccatttgcctctcattatccctaacaaaaacaatttttaccaaaccttatggaaggatgcactctaacccttgaacttcaaactctcatattaggcctttctacaggaaaaggattgtagataaattgtatgaatcgattgaagggttaatttttttcctgttgccctgtgatagctgggtgcacaaaagttgaaggacagaagagacttactgatttatacctgcactaatatttgctgttttcaacaattcatagaatggacaaaggagctacccgctacgaccagagttgattgaaagcacatattggttgttcaaggctaccagagattacagataccttgatgttggaagggacatattagcaagccttcaatatggtgccagatgcccttgtggttactgccacatatcagatgtggaaacccacaagcaggatgatcacatggagagttttttccttgcagaaacggtcaagtatctctggcttctttttgatttagctgctggccctgacaatattgttgaaaatggaccatataagtacatatttagtacagagggccatttgttacctgttactcctgagatagccttggaagatgaacattgttcatattttggagcattctgtaatggcggtgccgaccatggatatggtgctagtgctagttctactaagcatcgaaatggaaactatacccaattagatgatattcaaaccccttccagtcactattcaatgtccaatgtgttgtttacgccaggttacatcaagggagtttgtccaggattgactcatgcgcagaaatttgggatatcatactctgatgaagaggataactttatagagcagacttctgagagtcttgatcatcatggtgaatctgccatagaatctagcgtccaagaccaatcaagttctattatattgatctctcacccagtcgcaagccaacaggatgaggcttttgagagcgagtctggaagtcaagatcatgcaaatattgttgtaacttctgattctgattctgattccacaagccgtgataatactgttggctctcccggaatgaactcggaagaacttatggacgacatatagggcacctctagacaggacaaaagatgaagaggttgctcacagtgttgagtccaagatatcagctgaccctttgctcatgtagcaacccatttctgtggaatcttcagggtcaatggcttgccgaatgcagaacaagttagcaagcaagcaaaatgtctggtagacgattccagtatcttgccagcttcaacatcggaaattgatatttactttcagatagaatatattacagggcgtacattcactaatttgttcttttttttctgtatcgatcactaatagatattattttgattaatagagaatgcacgagttttgtacaccagatgcatatgaagaggcgcggcacacatcacaggatctatttagtgtagaacagaacagcaaacgagttttagcgtgtatcttacaagattttagattcgaaaaaatcaaggatttgaagctaacatgctcttgatagataagcagcaggagacatgttttcttttagggtgtgtttgcgaccctgtgtctggccagctcgacctgttcaactggtccagacagctcgacctgttcaactggtccaggctgaggctagactgtcctagatactgcaatttattttgtttgtgcacttgtactatatgagtctggttcatacgatc

SEQ ID NO: 78346 - DNA, 2666 bp, Zea Mays
cgaaattaatgcccatacccctctcattgtcccatcaaactcgctactggcctcgggcccgcccgtcgtgaggtccgagctcgatgcagccgatccggcggcggcaccgaggctttgcactcctctgtctctccgccgccctcctcgctgccgccactctgctccccggcgccgccgtcgccgaaggtgtcacgccctccgaggcgcgccggctccgcgacgaggtgaaagatatgttctatcatgcgtttgatggatacatgaagtatgctttcccactcgatgagctgcggcccttaagttgccaaggtgaagactcccttggtggttatgcgctcactcttatcgattctttggataccttggctttactgggtgataaggagaaatttggtgctgctgtggagtgggttgaataaaaccgtctctgtttttgaaaccaacatacgtatccttgggggtctgctatcagctcacctgattgccagtgattatgccactggtatgagaatccaatcttatgatgaccagttacttcatttagctgctgacttagctcagaggttgttgcccgcatttgacactcctacaggtattccatttggatctgttaatttattgtacggagtcgatgaaaatgaaagcaagataacatcaacggctggtggtggtactttgacactggaatttggcatattgagtcgcttgactaataatactgtttttgagcgagttacaaaaaaatcagtgcgtggaatatggtcacgcagatcaaaactcaatcttgttggtgcccatataaatgtctttactggtgaatggacacagaaggatgcaggaattggcacaagcattgattcattctatgaatatcttctaaaggcatatttattgtttggagatgaagaatacctgtacatttttcaggaggcttacaaagctgccatgcactatctccatcatgatccttggtacgtggaggttaatatgaactctggtgctactgtttggccactcttcaatagtctgcaggcattctggccagggcttcaggttttagctggagatgttgatcctgctattcgcacacatgctgccttcttcagcgtctggaaaaagtatggttttacccctgaaggttttaatcttgctacatccactgtacagaatggacaaaggagctacccgctacgaccagagttgattgaaagcacatattggttgttcaaggctaccagagattacagataccttgatgttggaagggacatattagcaagccttcaatatggtgccagatgcccttgtggttactgccacatatcagatgtggaaacccacaagcaggatgatcacatggagagttttttccttgcagaaacggtcaagtatctctggcttctttttgatttagctgctggccctgacaatattgttgaaaatggaccatataagtacatatttagtacagagggccatttgttacctgttactcctgagatagccttggaagatgaacattgttcatattttggagcattctgtaatggcggtgccgaccatggatatggtgctagtgctagttctactaagcatcgaaatggaaactatacccaattagatgatattcaaaccccttccagtcactattcaatgtccaatgtgttgtttacgccaggttacatcaagggagtttgtccaggattgactcatgcgcagaaatttgggatatcatactctgatgaagaggataactttatagagcagacttctgagagtcttgatcatcatggtgaatctgccatagaatctagcgtccaagaccaatcaagttctattatattgatctctcacccagtcgcaagccaacaggatgaggcttttgagagcgagtctggaagtcaagatcatgcaaatattgttgtaacttctgattctgattctgattccacaagccgtgataatactgttggctctcccggaatgaactcggaagaacttatggacgacatatagggcacctctagacaggacaaaagatgaagaggttgctcacagtgttgagtccaagatatcagctgaccctttgctcatgtagcaacccatttctgtggaatcttcagggtcaatggcttgccgaatgcagaacaagttagcaagcaagcaaaatgtctggtagacgattccagtatcttgccagcttcaacatcggaaattgatatttactttcagatagaatatattacagggcgtacattcactaatttgttcttttttttctgtatcgatcactaatagatattattttgattaatagagaatgcacgagttttgtacaccagatgcatatgaagaggcgcggcacacatcacaggatctatttagtgtagaacagaacagcaaacgagttttagcgtgtatcttacaagattttagattcgaaaaaatcaaggatttgaagctaacatgctcttgatagataagcagcaggagacatgttttcttttagggtgtgtttgcgaccctgtgtctggccagctcgacctgttcaactggtccagacagctcgacctgttcaactggtccaggctgaggctagactgtcctagatactgcaatttattttgtttgtgcacttgtactatatgagtctggttcatacgatc

SEQ ID NO: 78347 - DNA, 2632 bp, Zea Mays
cgaaattaatgcccatacccctctcattgtcccatcaaactcgctactggcctcgggcccgcccgtcgtgaggtccgagctcgatgcagccgatccggcggcggcaccgaggctttgcactcctctgtctctccgccgccctcctcgctgccgccactctgctccccggcgccgccgtcgccgaaggtgtcacgccctccgaggcgcgccggctccgcgacgaggtgaaagatatgttctatcatgcgtttgatggatacatgaagtatgctttcccactcgatgagctgcggcccttaagttgccaagatcgattctttggataccttggctttactgggtgataaggagaaatttggtgctgctgtggagtgggttggtaagaatgtccactttgatattaataaaaccgtctctgtttttgaaaccaacatacgtatccttgggggtctgctatcagctcacctgattgccagtgattatgccactggtatgagaatccaatcttatgatgaccagttacttcatttagctgctgacttagctcagaggtattccatttggatctgttaatttattgtacggagtcgatgaaaatgaaagcaagataacatcaacggctggtggtggtactttgacactggaatttggcatattgagtcgcttgactaataatactgtttttgagcgagttacaaaaaaatcagtgcgtggaatatggtcacgcagatcaaaactcaatcttgttggtgcccatataaatgtctttactggtgaatggacacagaaggatgcaggaattggcacaagcattgattcattctatgaatatcttctaaaggcatatttattgtttggagatgaagaatacctgtacatttttcaggaggcttacaaagctgccatgcactatctccatcatgatccttggtacgtggaggttaatatgaactctggtgctactgtttggccactcttcaatagtctgcaggcattctggccagggcttcagatttaaggttttagctggagatgttgatcctgctattcgcacacatgctgccttcttcagcgtctggaaaaagtatggttttacccctgaaggttttaatcttgctacatccactgtacagaatggacaaaggagctacccgctacgaccagagttgattgaaagcacatattggttgttcaaggctaccagagattacagataccttgatgttggaagggacatattagcaagccttcaatatggtgccagatgcccttgtggttactgccacatatcagatgtggaaacccacaagcaggatgatcacatggagagttttttccttgcagaaacggtcaagtatctctggcttctttttgatttagctgctggccctgacaatattgttgaaaatggaccatataagtacatatttagtacagagggccatttgttacctgttactcctgagatagccttggaagatgaacattgttcatattttggagcattctgtaatggcggtgccgaccatggatatggtgctagtgctagttctactaagcatcgaaatggaaactatacccaattagatgatattcaaaccccttccagtcactattcaatgtccaatgtgttgtttacgccaggttacatcaagggagtttgtccaggattgactcatgcgcagaaatttgggatatcatactctgatgaagaggataactttatagagcagacttctgagagtcttgatcatcatggtgaatctgccatagaatctagcgtccaagaccaatcaagttctattatattgatctctcacccagtcgcaagccaacaggatgaggcttttgagagcgagtctggaagtcaagatcatgcaaatattgttgtaacttctgattctgattctgattccacaagccgtgataatactgttggctctcccggaatgaactcggaagaacttatggacgacatatagggcacctctagacaggacaaaagatgaagaggttgctcacagtgttgagtccaagatatcagctgaccctttgctcatgtagcaacccatttctgtggaatcttcagggtcaatggcttgccgaatgcagaacaagttagcaagcaagcaaaatgtctggtagacgattccagtatcttgccagcttcaacatcggaaattgatatttactttcagatagaatatattacagggcgtacattcactaatttgttcttttttttctgtatcgatcactaatagatattattttgattaatagagaatgcacgagttttgtacaccagatgcatatgaagaggcgcggcacacatcacaggatctatttagtgtagaacagaacagcaaacgagttttagcgtgtatcttacaagattttagattcgaaaaaatcaaggatttgaagctaacatgctcttgatagataagcagcaggagacatgttttcttttagggtgtgtttgcgaccctgtgtctggccagctcgacctgttcaactggtccagacagctcgacctgttcaactggtccaggctgaggctagactgtcctagatactgcaatttattttgtttgtgcacttgtactatatgagtctggttcatacgatc

SEQ ID NO: 78348 - DNA, 2659 bp, Zea Mays
cgaaattaatgcccatacccctctcattgtcccatcaaactcgctactggcctcgggcccgcccgtcgtgaggtccgagctcgatgcagccgatccggcggcggcaccgaggctttgcactcctctgtctctccgccgccctcctcgctgccgccactctgctccccggcgccgccgtcgccgaaggtgtcacgccctccgaggcgcgccggctccgcgacgaggtgaaagatatgttctatcatgcgtttgatggatacatgaagtatgctttcccactcgatgagctgcggcccttaagttgccaaggtgaagactcccttggtggttatgcgctcactcttatcgattctttggataccttggctttactgggtgataaggagaaatttggtgctgctgtggagtgggttgaataaaaccgtctctgtttttgaaaccaacatacgtatccttgggggtctgctatcagctcacctgattgccagtgattatgccactggtatgagaatccaatcttatgatgaccagttacttcatttagctgctgacttagctcagaggttgttgcccgcatttgacactcctacaggtattccatttggatctgttaatttattgtacggagtcgatgaaaatgaaagcaagataacatcaacggctggtggtggtactttgacactggaatttggcatattgagtcgcttgactaataatactgtttttgagcgagttacaaaaaaatcagtgcgtggaatatggtcacgcagatcaaaactcaatcttgttggtgcccatataaatgtctttactggtgaatggacacagaaggatgcaggaattggcacaagcattgattcattctatgaatatcttctaaaggcatatttattgtttggagatgaagaatacctgtacatttttcaggaggcttacaaagctgccatgcactatctccatcatgatccttggtacgtggaggttaatatgaactctggtgctactgtttggccactcttcaatagtctgcaggcattctggccagggcttcagctggagatgttgatcctgctattcgcacacatgctgccttcttcagcgtctggaaaaagtatggttttacccctgaaggttttaatcttgctacatccactgtacagaatggacaaaggagctacccgctacgaccagagttgattgaaagcacatattggttgttcaaggctaccagagattacagataccttgatgttggaagggacatattagcaagccttcaatatggtgccagatgcccttgtggttactgccacatatcagatgtggaaacccacaagcaggatgatcacatggagagttttttccttgcagaaacggtcaagtatctctggcttctttttgatttagctgctggccctgacaatattgttgaaaatggaccatataagtacatatttagtacagagggccatttgttacctgttactcctgagatagccttggaagatgaacattgttcatattttggagcattctgtaatggcggtgccgaccatggatatggtgctagtgctagttctactaagcatcgaaatggaaactatacccaattagatgatattcaaaccccttccagtcactattcaatgtccaatgtgttgtttacgccaggttacatcaagggagtttgtccaggattgactcatgcgcagaaatttgggatatcatactctgatgaagaggataactttatagagcagacttctgagagtcttgatcatcatggtgaatctgccatagaatctagcgtccaagaccaatcaagttctattatattgatctctcacccagtcgcaagccaacaggatgaggcttttgagagcgagtctggaagtcaagatcatgcaaatattgttgtaacttctgattctgattctgattccacaagccgtgataatactgttggctctcccggaatgaactcggaagaacttatggacgacatatagggcacctctagacaggacaaaagatgaagaggttgctcacagtgttgagtccaagatatcagctgaccctttgctcatgtagcaacccatttctgtggaatcttcagggtcaatggcttgccgaatgcagaacaagttagcaagcaagcaaaatgtctggtagacgattccagtatcttgccagcttcaacatcggaaattgatatttactttcagatagaatatattacagggcgtacattcactaatttgttcttttttttctgtatcgatcactaatagatattattttgattaatagagaatgcacgagttttgtacaccagatgcatatgaagaggcgcggcacacatcacaggatctatttagtgtagaacagaacagcaaacgagttttagcgtgtatcttacaagattttagattcgaaaaaatcaaggatttgaagctaacatgctcttgatagataagcagcaggagacatgttttcttttagggtgtgtttgcgaccctgtgtctggccagctcgacctgttcaactggtccagacagctcgacctgttcaactggtccaggctgaggctagactgtcctagatactgcaatttattttgtttgtgcacttgtactatatgagtctggttcatacgatc

SEQ ID NO: 78349 - DNA, 2624 bp, Zea Mays
cgaaattaatgcccatacccctctcattgtcccatcaaactcgctactggcctcgggcccgcccgtcgtgaggtccgagctcgatgcagccgatccggcggcggcaccgaggctttgcactcctctgtctctccgccgccctcctcgctgccgccactctgctccccggcgccgccgtcgccgaaggtgtcacgccctccgaggcgcgccggctccgcgacgaggtgaaagatatgttctatcatgcgtttgatggatacatgaagtatgctttcccactcgatgagctgcggcccttaagttgccaagatcgattctttggataccttggctttactgggtgataaggagaaatttggtgctgctgtggagtgggttgaataaaaccgtctctgtttttgaaaccaacatacgtatccttgggggtctgctatcagctcacctgattgccagtgattatgccactggtatgagaatccaatcttatgatgaccagttacttcatttagctgctgacttagctcagaggttgttgcccgcatttgacactcctacaggtattccatttggatctgttaatttattgtacggagtcgatgaaaatgaaagcaagataacatcaacggctggtggtggtactttgacactggaatttggcatattgagtcgcttgactaataatactgtttttgagcgagttacaaaaaaatcagtgcgtggaatatggtcacgcagatcaaaactcaatcttgttggtgcccatataaatgtctttactggtgaatggacacagaaggatgcaggaattggcacaagcattgattcattctatgaatatcttctaaaggcatatttattgtttggagatgaagaatacctgtacatttttcaggaggcttacaaagctgccatgcactatctccatcatgatccttggtacgtggaggttaatatgaactctggtgctactgtttggccactcttcaatagtctgcaggcattctggccagggcttcagctggagatgttgatcctgctattcgcacacatgctgccttcttcagcgtctggaaaaagtatggttttacccctgaaggttttaatcttgctacatccactgtacagaatggacaaaggagctacccgctacgaccagagttgattgaaagcacatattggttgttcaaggctaccagagattacagataccttgatgttggaagggacatattagcaagccttcaatatggtgccagatgcccttgtggttactgccacatatcagatgtggaaacccacaagcaggatgatcacatggagagttttttccttgcagaaacggtcaagtatctctggcttctttttgatttagctgctggccctgacaatattgttgaaaatggaccatataagtacatatttagtacagagggccatttgttacctgttactcctgagatagccttggaagatgaacattgttcatattttggagcattctgtaatggcggtgccgaccatggatatggtgctagtgctagttctactaagcatcgaaatggaaactatacccaattagatgatattcaaaccccttccagtcactattcaatgtccaatgtgttgtttacgccaggttacatcaagggagtttgtccaggattgactcatgcgcagaaatttgggatatcatactctgatgaagaggataactttatagagcagacttctgagagtcttgatcatcatggtgaatctgccatagaatctagcgtccaagaccaatcaagttctattatattgatctctcacccagtcgcaagccaacaggatgaggcttttgagagcgagtctggaagtcaagatcatgcaaatattgttgtaacttctgattctgattctgattccacaagccgtgataatactgttggctctcccggaatgaactcggaagaacttatggacgacatatagggcacctctagacaggacaaaagatgaagaggttgctcacagtgttgagtccaagatatcagctgaccctttgctcatgtagcaacccatttctgtggaatcttcagggtcaatggcttgccgaatgcagaacaagttagcaagcaagcaaaatgtctggtagacgattccagtatcttgccagcttcaacatcggaaattgatatttactttcagatagaatatattacagggcgtacattcactaatttgttcttttttttctgtatcgatcactaatagatattattttgattaatagagaatgcacgagttttgtacaccagatgcatatgaagaggcgcggcacacatcacaggatctatttagtgtagaacagaacagcaaacgagttttagcgtgtatcttacaagattttagattcgaaaaaatcaaggatttgaagctaacatgctcttgatagataagcagcaggagacatgttttcttttagggtgtgtttgcgaccctgtgtctggccagctcgacctgttcaactggtccagacagctcgacctgttcaactggtccaggctgaggctagactgtcctagatactgcaatttattttgtttgtgcacttgtactatatgagtctggttcatacgatc

SEQ ID NO: 78350 - DNA, 3061 bp, Zea Mays
cgaaattaatgcccatacccctctcattgtcccatcaaactcgctactggcctcgggcccgcccgtcgtgaggtccgagctcgatgcagccgatccggcggcggcaccgaggctttgcactcctctgtctctccgccgccctcctcgctgccgccactctgctccccggcgccgccgtcgccgaaggtgtcacgccctccgaggcgcgccggctccgcgacgaggtgaaagatatgttctatcatgcgtttgatggatacatgaagtatgctttcccactcgatgagctgcggcccttaagttgccaaggtgaagactcccttggtggttatgcgctcactcttatcgattctttggataccttggctttactgggtgataaggagaaatttggtgctgctgtggagtgggttggtaagaatgtccactttgatattaataaaaccgtctctgtttttgaaaccaacatacgtatccttgggggtctgctatcagctcacctgattgccagtgattatgccactggtatgagaatccaatcttatgatgaccagttacttcatttagctgctgacttagctcagaggtattccatttggatctgttaatttattgtacggagtcgatgaaaatgaaagcaagataacatcaacggctggtggtggtactttgacactggaatttggcatattgagtcgcttgactaataatactgtttttgagcgagttacaaaaaaatcagtgcgtggaatatggtcacgcagatcaaaactcaatcttgttggtgcccatataaatgtctttactggtgaatggacacagaaggatgcaggaattggcacaagcattgattcattctatgaatatcttctaaaggcatatttattgtttggagatgaagaatacctgtacatttttcaggaggcttacaaagctgccatgcactatctccatcatgatccttggtacgtggaggttaatatgaactctggtgctactgtttggccactcttcaatagtctgcaggcattctggccagggcttcaggtttggttacacatatttctgataattgatgtggctttgtcgcacatattctagatgattgcttatgctgcttagatttaaggttttagctggagatgttgatcctgctattcgcacacatgctgccttcttcagcgtctggaaaaagtatggttttacccctgaaggttttaatcttgctacatccactgtacaggtaatgaaactgttaaactataatagtcaagagtattagcataatctcctatctaaggtttgccatttgcctctcattatccctaacaaaaacaatttttaccaaaccttatggaaggatgcactctaacccttgaacttcaaactctcatattaggcctttctacaggaaaaggattgtagataaattgtatgaatcgattgaagggttaatttttttcctgttgccctgtgatagctgggtgcacaaaagttgaaggacagaagagacttactgatttatacctgcactaatatttgctgttttcaacaattcatagaatggacaaaggagctacccgctacgaccagagttgattgaaagcacatattggttgttcaaggctaccagagattacagataccttgatgttggaagggacatattagcaagccttcaatatggtgccagatgcccttgtggttactgccacatatcagatgtggaaacccacaagcaggatgatcacatggagagttttttccttgcagaaacggtcaagtatctctggcttctttttgatttagctgctggccctgacaatattgttgaaaatggaccatataagtacatatttagtacagagggccatttgttacctgttactcctgagatagccttggaagatgaacattgttcatattttggagcattctgtaatggcggtgccgaccatggatatggtgctagtgctagttctactaagcatcgaaatggaaactatacccaattagatgatattcaaaccccttccagtcactattcaatgtccaatgtgttgtttacgccaggttacatcaagggagtttgtccaggattgactcatgcgcagaaatttgggatatcatactctgatgaagaggataactttatagagcagacttctgagagtcttgatcatcatggtgaatctgccatagaatctagcgtccaagaccaatcaagttctattatattgatctctcacccagtcgcaagccaacaggatgaggcttttgagagcgagtctggaagtcaagatcatgcaaatattgttgtaacttctgattctgattctgattccacaagccgtgataatactgttggctctcccggaatgaactcggaagaacttatggacgacatatagggcacctctagacaggacaaaagatgaagaggttgctcacagtgttgagtccaagatatcagctgaccctttgctcatgtagcaacccatttctgtggaatcttcagggtcaatggcttgccgaatgcagaacaagttagcaagcaagcaaaatgtctggtagacgattccagtatcttgccagcttcaacatcggaaattgatatttactttcagatagaatatattacagggcgtacattcactaatttgttcttttttttctgtatcgatcactaatagatattattttgattaatagagaatgcacgagttttgtacaccagatgcatatgaagaggcgcggcacacatcacaggatctatttagtgtagaacagaacagcaaacgagttttagcgtgtatcttacaagattttagattcgaaaaaatcaaggatttgaagctaacatgctcttgatagataagcagcaggagacatgttttcttttagggtgtgtttgcgaccctgtgtctggccagctcgacctgttcaactggtccagacagctcgacctgttcaactggtccaggctgaggctagactgtcctagatactgcaatttattttgtttgtgcacttgtactatatgagtctggttcatacgatc

SEQ ID NO: 78351 - DNA, 2980 bp, Zea Mays
cgaaattaatgcccatacccctctcattgtcccatcaaactcgctactggcctcgggcccgcccgtcgtgaggtccgagctcgatgcagccgatccggcggcggcaccgaggctttgcactcctctgtctctccgccgccctcctcgctgccgccactctgctccccggcgccgccgtcgccgaaggtgtcacgccctccgaggcgcgccggctccgcgacgaggtgaaagatatgttctatcatgcgtttgatggatacatgaagtatgctttcccactcgatgagctgcggcccttaagttgccaagatcgattctttggataccttggctttactgggtgataaggagaaatttggtgctgctgtggagtgggttggtaagaatgtccactttgatattaataaaaccgtctctgtttttgaaaccaacatacgtatccttgggggtctgctatcagctcacctgattgccagtgattatgccactggtatgagaatccaatcttatgatgaccagttacttcatttagctgctgacttagctcagaggttgttgcccgcatttgacactcctacaggtattccatttggatctgttaatttattgtacggagtcgatgaaaatgaaagcaagataacatcaacggctggtggtggtactttgacactggaatttggcatattgagtcgcttgactaataatactgtttttgagcgagttacaaaaaaatcagtgcgtggaatatggtcacgcagatcaaaactcaatcttgttggtgcccatataaatgtctttactggtgaatggacacagaaggatgcaggaattggcacaagcattgattcattctatgaatatcttctaaaggcatatttattgtttggagatgaagaatacctgtacatttttcaggaggcttacaaagctgccatgcactatctccatcatgatccttggtacgtggaggttaatatgaactctggtgctactgtttggccactcttcaatagtctgcaggcattctggccagggcttcagatttaaggttttagctggagatgttgatcctgctattcgcacacatgctgccttcttcagcgtctggaaaaagtatggttttacccctgaaggttttaatcttgctacatccactgtacaggtaatgaaactgttaaactataatagtcaagagtattagcataatctcctatctaaggtttgccatttgcctctcattatccctaacaaaaacaatttttaccaaaccttatggaaggatgcactctaacccttgaacttcaaactctcatattaggcctttctacaggaaaaggattgtagataaattgtatgaatcgattgaagggttaatttttttcctgttgccctgtgatagctgggtgcacaaaagttgaaggacagaagagacttactgatttatacctgcactaatatttgctgttttcaacaattcatagaatggacaaaggagctacccgctacgaccagagttgattgaaagcacatattggttgttcaaggctaccagagattacagataccttgatgttggaagggacatattagcaagccttcaatatggtgccagatgcccttgtggttactgccacatatcagatgtggaaacccacaagcaggatgatcacatggagagttttttccttgcagaaacggtcaagtatctctggcttctttttgatttagctgctggccctgacaatattgttgaaaatggaccatataagtacatatttagtacagagggccatttgttacctgttactcctgagatagccttggaagatgaacattgttcatattttggagcattctgtaatggcggtgccgaccatggatatggtgctagtgctagttctactaagcatcgaaatggaaactatacccaattagatgatattcaaaccccttccagtcactattcaatgtccaatgtgttgtttacgccaggttacatcaagggagtttgtccaggattgactcatgcgcagaaatttgggatatcatactctgatgaagaggataactttatagagcagacttctgagagtcttgatcatcatggtgaatctgccatagaatctagcgtccaagaccaatcaagttctattatattgatctctcacccagtcgcaagccaacaggatgaggcttttgagagcgagtctggaagtcaagatcatgcaaatattgttgtaacttctgattctgattctgattccacaagccgtgataatactgttggctctcccggaatgaactcggaagaacttatggacgacatatagggcacctctagacaggacaaaagatgaagaggttgctcacagtgttgagtccaagatatcagctgaccctttgctcatgtagcaacccatttctgtggaatcttcagggtcaatggcttgccgaatgcagaacaagttagcaagcaagcaaaatgtctggtagacgattccagtatcttgccagcttcaacatcggaaattgatatttactttcagatagaatatattacagggcgtacattcactaatttgttcttttttttctgtatcgatcactaatagatattattttgattaatagagaatgcacgagttttgtacaccagatgcatatgaagaggcgcggcacacatcacaggatctatttagtgtagaacagaacagcaaacgagttttagcgtgtatcttacaagattttagattcgaaaaaatcaaggatttgaagctaacatgctcttgatagataagcagcaggagacatgttttcttttagggtgtgtttgcgaccctgtgtctggccagctcgacctgttcaactggtccagacagctcgacctgttcaactggtccaggctgaggctagactgtcctagatactgcaatttattttgtttgtgcacttgtactatatgagtctggttcatacgatc

SEQ ID NO: 78352 - DNA, 3038 bp, Zea Mays
cgaaattaatgcccatacccctctcattgtcccatcaaactcgctactggcctcgggcccgcccgtcgtgaggtccgagctcgatgcagccgatccggcggcggcaccgaggctttgcactcctctgtctctccgccgccctcctcgctgccgccactctgctccccggcgccgccgtcgccgaaggtgtcacgccctccgaggcgcgccggctccgcgacgaggtgaaagatatgttctatcatgcgtttgatggatacatgaagtatgctttcccactcgatgagctgcggcccttaagttgccaaggtgaagactcccttggtggttatgcgctcactcttatcgattctttggataccttggctttactgggtgataaggagaaatttggtgctgctgtggagtgggttgaataaaaccgtctctgtttttgaaaccaacatacgtatccttgggggtctgctatcagctcacctgattgccagtgattatgccactggtatgagaatccaatcttatgatgaccagttacttcatttagctgctgacttagctcagaggtattccatttggatctgttaatttattgtacggagtcgatgaaaatgaaagcaagataacatcaacggctggtggtggtactttgacactggaatttggcatattgagtcgcttgactaataatactgtttttgagcgagttacaaaaaaatcagtgcgtggaatatggtcacgcagatcaaaactcaatcttgttggtgcccatataaatgtctttactggtgaatggacacagaaggatgcaggaattggcacaagcattgattcattctatgaatatcttctaaaggcatatttattgtttggagatgaagaatacctgtacatttttcaggaggcttacaaagctgccatgcactatctccatcatgatccttggtacgtggaggttaatatgaactctggtgctactgtttggccactcttcaatagtctgcaggcattctggccagggcttcaggtttggttacacatatttctgataattgatgtggctttgtcgcacatattctagatgattgcttatgctgcttagatttaaggttttagctggagatgttgatcctgctattcgcacacatgctgccttcttcagcgtctggaaaaagtatggttttacccctgaaggttttaatcttgctacatccactgtacaggtaatgaaactgttaaactataatagtcaagagtattagcataatctcctatctaaggtttgccatttgcctctcattatccctaacaaaaacaatttttaccaaaccttatggaaggatgcactctaacccttgaacttcaaactctcatattaggcctttctacaggaaaaggattgtagataaattgtatgaatcgattgaagggttaatttttttcctgttgccctgtgatagctgggtgcacaaaagttgaaggacagaagagacttactgatttatacctgcactaatatttgctgttttcaacaattcatagaatggacaaaggagctacccgctacgaccagagttgattgaaagcacatattggttgttcaaggctaccagagattacagataccttgatgttggaagggacatattagcaagccttcaatatggtgccagatgcccttgtggttactgccacatatcagatgtggaaacccacaagcaggatgatcacatggagagttttttccttgcagaaacggtcaagtatctctggcttctttttgatttagctgctggccctgacaatattgttgaaaatggaccatataagtacatatttagtacagagggccatttgttacctgttactcctgagatagccttggaagatgaacattgttcatattttggagcattctgtaatggcggtgccgaccatggatatggtgctagtgctagttctactaagcatcgaaatggaaactatacccaattagatgatattcaaaccccttccagtcactattcaatgtccaatgtgttgtttacgccaggttacatcaagggagtttgtccaggattgactcatgcgcagaaatttgggatatcatactctgatgaagaggataactttatagagcagacttctgagagtcttgatcatcatggtgaatctgccatagaatctagcgtccaagaccaatcaagttctattatattgatctctcacccagtcgcaagccaacaggatgaggcttttgagagcgagtctggaagtcaagatcatgcaaatattgttgtaacttctgattctgattctgattccacaagccgtgataatactgttggctctcccggaatgaactcggaagaacttatggacgacatatagggcacctctagacaggacaaaagatgaagaggttgctcacagtgttgagtccaagatatcagctgaccctttgctcatgtagcaacccatttctgtggaatcttcagggtcaatggcttgccgaatgcagaacaagttagcaagcaagcaaaatgtctggtagacgattccagtatcttgccagcttcaacatcggaaattgatatttactttcagatagaatatattacagggcgtacattcactaatttgttcttttttttctgtatcgatcactaatagatattattttgattaatagagaatgcacgagttttgtacaccagatgcatatgaagaggcgcggcacacatcacaggatctatttagtgtagaacagaacagcaaacgagttttagcgtgtatcttacaagattttagattcgaaaaaatcaaggatttgaagctaacatgctcttgatagataagcagcaggagacatgttttcttttagggtgtgtttgcgaccctgtgtctggccagctcgacctgttcaactggtccagacagctcgacctgttcaactggtccaggctgaggctagactgtcctagatactgcaatttattttgtttgtgcacttgtactatatgagtctggttcatacgatc

SEQ ID NO: 78353 - DNA, 2598 bp, Zea Mays
cgaaattaatgcccatacccctctcattgtcccatcaaactcgctactggcctcgggcccgcccgtcgtgaggtccgagctcgatgcagccgatccggcggcggcaccgaggctttgcactcctctgtctctccgccgccctcctcgctgccgccactctgctccccggcgccgccgtcgccgaaggtgtcacgccctccgaggcgcgccggctccgcgacgaggtgaaagatatgttctatcatgcgtttgatggatacatgaagtatgctttcccactcgatgagctgcggcccttaagttgccaagatcgattctttggataccttggctttactgggtgataaggagaaatttggtgctgctgtggagtgggttggtaagaatgtccactttgatattaataaaaccgtctctgtttttgaaaccaacatacgtatccttgggggtctgctatcagctcacctgattgccagtgattatgccactggtatgagaatccaatcttatgatgaccagttacttcatttagctgctgacttagctcagaggttgttgcccgcatttgacactcctacagataacatcaacggctggtggtggtactttgacactggaatttggcatattgagtcgcttgactaataatactgtttttgagcgagttacaaaaaaatcagtgcgtggaatatggtcacgcagatcaaaactcaatcttgttggtgcccatataaatgtctttactggtgaatggacacagaaggatgcaggaattggcacaagcattgattcattctatgaatatcttctaaaggcatatttattgtttggagatgaagaatacctgtacatttttcaggaggcttacaaagctgccatgcactatctccatcatgatccttggtacgtggaggttaatatgaactctggtgctactgtttggccactcttcaatagtctgcaggcattctggccagggcttcaggttttagctggagatgttgatcctgctattcgcacacatgctgccttcttcagcgtctggaaaaagtatggttttacccctgaaggttttaatcttgctacatccactgtacagaatggacaaaggagctacccgctacgaccagagttgattgaaagcacatattggttgttcaaggctaccagagattacagataccttgatgttggaagggacatattagcaagccttcaatatggtgccagatgcccttgtggttactgccacatatcagatgtggaaacccacaagcaggatgatcacatggagagttttttccttgcagaaacggtcaagtatctctggcttctttttgatttagctgctggccctgacaatattgttgaaaatggaccatataagtacatatttagtacagagggccatttgttacctgttactcctgagatagccttggaagatgaacattgttcatattttggagcattctgtaatggcggtgccgaccatggatatggtgctagtgctagttctactaagcatcgaaatggaaactatacccaattagatgatattcaaaccccttccagtcactattcaatgtccaatgtgttgtttacgccaggttacatcaagggagtttgtccaggattgactcatgcgcagaaatttgggatatcatactctgatgaagaggataactttatagagcagacttctgagagtcttgatcatcatggtgaatctgccatagaatctagcgtccaagaccaatcaagttctattatattgatctctcacccagtcgcaagccaacaggatgaggcttttgagagcgagtctggaagtcaagatcatgcaaatattgttgtaacttctgattctgattctgattccacaagccgtgataatactgttggctctcccggaatgaactcggaagaacttatggacgacatatagggcacctctagacaggacaaaagatgaagaggttgctcacagtgttgagtccaagatatcagctgaccctttgctcatgtagcaacccatttctgtggaatcttcagggtcaatggcttgccgaatgcagaacaagttagcaagcaagcaaaatgtctggtagacgattccagtatcttgccagcttcaacatcggaaattgatatttactttcagatagaatatattacagggcgtacattcactaatttgttcttttttttctgtatcgatcactaatagatattattttgattaatagagaatgcacgagttttgtacaccagatgcatatgaagaggcgcggcacacatcacaggatctatttagtgtagaacagaacagcaaacgagttttagcgtgtatcttacaagattttagattcgaaaaaatcaaggatttgaagctaacatgctcttgatagataagcagcaggagacatgttttcttttagggtgtgtttgcgaccctgtgtctggccagctcgacctgttcaactggtccagacagctcgacctgttcaactggtccaggctgaggctagactgtcctagatactgcaatttattttgtttgtgcacttgtactatatgagtctggttcatacgatc

SEQ ID NO: 78354 - DNA, 3015 bp, Zea Mays
cgaaattaatgcccatacccctctcattgtcccatcaaactcgctactggcctcgggcccgcccgtcgtgaggtccgagctcgatgcagccgatccggcggcggcaccgaggctttgcactcctctgtctctccgccgccctcctcgctgccgccactctgctccccggcgccgccgtcgccgaaggtgtcacgccctccgaggcgcgccggctccgcgacgaggtgaaagatatgttctatcatgcgtttgatggatacatgaagtatgctttcccactcgatgagctgcggcccttaagttgccaaggtgaagactcccttggtggttatgcgctcactcttatcgattctttggataccttggctttactgggtgataaggagaaatttggtgctgctgtggagtgggttggtaagaatgtccactttgatattaataaaaccgtctctgtttttgaaaccaacatacgtatccttgggggtctgctatcagctcacctgattgccagtgattatgccactggtatgagaatccaatcttatgatgaccagttacttcatttagctgctgacttagctcagaggttgttgcccgcatttgacactcctacaggtattccatttggatctgttaatttattgtacggagtcgatgaaaatgaaagcaagataacatcaacggctggtggtggtactttgacactggaatttggcatattgagtcgcttgactaataatactgtttttgagcgagttacaaaaaaatcagtgcgtggaatatggtcacgcagatcaaaactcaatcttgttggtgcccatataaatgtctttactggtgaatggacacagaaggatgcaggaattggcacaagcattgattcattctatgaatatcttctaaaggcatatttattgtttggagatgaagaatacctgtacatttttcaggaggcttacaaagctgccatgcactatctccatcatgatccttggtacgtggaggttaatatgaactctggtgctactgtttggccactcttcaatagtctgcaggcattctggccagggcttcagatttaaggttttagctggagatgttgatcctgctattcgcacacatgctgccttcttcagcgtctggaaaaagtatggttttacccctgaaggttttaatcttgctacatccactgtacaggtaatgaaactgttaaactataatagtcaagagtattagcataatctcctatctaaggtttgccatttgcctctcattatccctaacaaaaacaatttttaccaaaccttatggaaggatgcactctaacccttgaacttcaaactctcatattaggcctttctacaggaaaaggattgtagataaattgtatgaatcgattgaagggttaatttttttcctgttgccctgtgatagctgggtgcacaaaagttgaaggacagaagagacttactgatttatacctgcactaatatttgctgttttcaacaattcatagaatggacaaaggagctacccgctacgaccagagttgattgaaagcacatattggttgttcaaggctaccagagattacagataccttgatgttggaagggacatattagcaagccttcaatatggtgccagatgcccttgtggttactgccacatatcagatgtggaaacccacaagcaggatgatcacatggagagttttttccttgcagaaacggtcaagtatctctggcttctttttgatttagctgctggccctgacaatattgttgaaaatggaccatataagtacatatttagtacagagggccatttgttacctgttactcctgagatagccttggaagatgaacattgttcatattttggagcattctgtaatggcggtgccgaccatggatatggtgctagtgctagttctactaagcatcgaaatggaaactatacccaattagatgatattcaaaccccttccagtcactattcaatgtccaatgtgttgtttacgccaggttacatcaagggagtttgtccaggattgactcatgcgcagaaatttgggatatcatactctgatgaagaggataactttatagagcagacttctgagagtcttgatcatcatggtgaatctgccatagaatctagcgtccaagaccaatcaagttctattatattgatctctcacccagtcgcaagccaacaggatgaggcttttgagagcgagtctggaagtcaagatcatgcaaatattgttgtaacttctgattctgattctgattccacaagccgtgataatactgttggctctcccggaatgaactcggaagaacttatggacgacatatagggcacctctagacaggacaaaagatgaagaggttgctcacagtgttgagtccaagatatcagctgaccctttgctcatgtagcaacccatttctgtggaatcttcagggtcaatggcttgccgaatgcagaacaagttagcaagcaagcaaaatgtctggtagacgattccagtatcttgccagcttcaacatcggaaattgatatttactttcagatagaatatattacagggcgtacattcactaatttgttcttttttttctgtatcgatcactaatagatattattttgattaatagagaatgcacgagttttgtacaccagatgcatatgaagaggcgcggcacacatcacaggatctatttagtgtagaacagaacagcaaacgagttttagcgtgtatcttacaagattttagattcgaaaaaatcaaggatttgaagctaacatgctcttgatagataagcagcaggagacatgttttcttttagggtgtgtttgcgaccctgtgtctggccagctcgacctgttcaactggtccagacagctcgacctgttcaactggtccaggctgaggctagactgtcctagatactgcaatttattttgtttgtgcacttgtactatatgagtctggttcatacgatc

SEQ ID NO: 78355 - DNA, 3008 bp, Zea Mays
cgaaattaatgcccatacccctctcattgtcccatcaaactcgctactggcctcgggcccgcccgtcgtgaggtccgagctcgatgcagccgatccggcggcggcaccgaggctttgcactcctctgtctctccgccgccctcctcgctgccgccactctgctccccggcgccgccgtcgccgaaggtgtcacgccctccgaggcgcgccggctccgcgacgaggtgaaagatatgttctatcatgcgtttgatggatacatgaagtatgctttcccactcgatgagctgcggcccttaagttgccaaggtgaagactcccttggtggttatgcgctcactcttatcgattctttggataccttggctttactgggtgataaggagaaatttggtgctgctgtggagtgggttggtaagaatgtccactttgatattaataaaaccgtctctgtttttgaaaccaacatacgtatccttgggggtctgctatcagctcacctgattgccagtgattatgccactggtatgagaatccaatcttatgatgaccagttacttcatttagctgctgacttagctcagaggttgttgcccgcatttgacactcctacaggtattccatttggatctgttaatttattgtacggagtcgatgaaaatgaaagcaagataacatcaacggctggtggtggtactttgacactggaatttggcatattgagtcgcttgactaataatactgtttttgagcgagttacaaaaaaatcagtgcgtggaatatggtcacgcagatcaaaactcaatcttgttggtgcccatataaatgtctttactggtgaatggacacagaaggatgcaggaattggcacaagcattgattcattctatgaatatcttctaaaggcatatttattgtttggagatgaagaatacctgtacatttttcaggaggcttacaaagctgccatgcactatctccatcatgatccttggtacgtggaggttaatatgaactctggtgctactgtttggccactcttcaatagtctgcaggcattctggccagggcttcaggttttagctggagatgttgatcctgctattcgcacacatgctgccttcttcagcgtctggaaaaagtatggttttacccctgaaggttttaatcttgctacatccactgtacaggtaatgaaactgttaaactataatagtcaagagtattagcataatctcctatctaaggtttgccatttgcctctcattatccctaacaaaaacaatttttaccaaaccttatggaaggatgcactctaacccttgaacttcaaactctcatattaggcctttctacaggaaaaggattgtagataaattgtatgaatcgattgaagggttaatttttttcctgttgccctgtgatagctgggtgcacaaaagttgaaggacagaagagacttactgatttatacctgcactaatatttgctgttttcaacaattcatagaatggacaaaggagctacccgctacgaccagagttgattgaaagcacatattggttgttcaaggctaccagagattacagataccttgatgttggaagggacatattagcaagccttcaatatggtgccagatgcccttgtggttactgccacatatcagatgtggaaacccacaagcaggatgatcacatggagagttttttccttgcagaaacggtcaagtatctctggcttctttttgatttagctgctggccctgacaatattgttgaaaatggaccatataagtacatatttagtacagagggccatttgttacctgttactcctgagatagccttggaagatgaacattgttcatattttggagcattctgtaatggcggtgccgaccatggatatggtgctagtgctagttctactaagcatcgaaatggaaactatacccaattagatgatattcaaaccccttccagtcactattcaatgtccaatgtgttgtttacgccaggttacatcaagggagtttgtccaggattgactcatgcgcagaaatttgggatatcatactctgatgaagaggataactttatagagcagacttctgagagtcttgatcatcatggtgaatctgccatagaatctagcgtccaagaccaatcaagttctattatattgatctctcacccagtcgcaagccaacaggatgaggcttttgagagcgagtctggaagtcaagatcatgcaaatattgttgtaacttctgattctgattctgattccacaagccgtgataatactgttggctctcccggaatgaactcggaagaacttatggacgacatatagggcacctctagacaggacaaaagatgaagaggttgctcacagtgttgagtccaagatatcagctgaccctttgctcatgtagcaacccatttctgtggaatcttcagggtcaatggcttgccgaatgcagaacaagttagcaagcaagcaaaatgtctggtagacgattccagtatcttgccagcttcaacatcggaaattgatatttactttcagatagaatatattacagggcgtacattcactaatttgttcttttttttctgtatcgatcactaatagatattattttgattaatagagaatgcacgagttttgtacaccagatgcatatgaagaggcgcggcacacatcacaggatctatttagtgtagaacagaacagcaaacgagttttagcgtgtatcttacaagattttagattcgaaaaaatcaaggatttgaagctaacatgctcttgatagataagcagcaggagacatgttttcttttagggtgtgtttgcgaccctgtgtctggccagctcgacctgttcaactggtccagacagctcgacctgttcaactggtccaggctgaggctagactgtcctagatactgcaatttattttgtttgtgcacttgtactatatgagtctggttcatacgatc

SEQ ID NO: 78356 - DNA, 2821 bp, Zea Mays
cgaaattaatgcccatacccctctcattgtcccatcaaactcgctactggcctcgggcccgcccgtcgtgaggtccgagctcgatgcagccgatccggcggcggcaccgaggctttgcactcctctgtctctccgccgccctcctcgctgccgccactctgctccccggcgccgccgtcgccgaaggtgtcacgccctccgaggcgcgccggctccgcgacgagaataaaaccgtctctgtttttgaaaccaacatacgtatccttgggggtctgctatcagctcacctgattgccagtgattatgccactggtatgagaatccaatcttatgatgaccagttacttcatttagctgctgacttagctcagaggttgttgcccgcatttgacactcctacagataacatcaacggctggtggtggtactttgacactggaatttggcatattgagtcgcttgactaataatactgtttttgagcgagttacaaaaaaatcagtgcgtggaatatggtcacgcagatcaaaactcaatcttgttggtgcccatataaatgtctttactggtgaatggacacagaaggatgcaggaattggcacaagcattgattcattctatgaatatcttctaaaggcatatttattgtttggagatgaagaatacctgtacatttttcaggaggcttacaaagctgccatgcactatctccatcatgatccttggtacgtggaggttaatatgaactctggtgctactgtttggccactcttcaatagtctgcaggcattctggccagggcttcaggtttggttacacatatttctgataattgatgtggctttgtcgcacatattctagatgattgcttatgctgcttagatttaaggttttagctggagatgttgatcctgctattcgcacacatgctgccttcttcagcgtctggaaaaagtatggttttacccctgaaggttttaatcttgctacatccactgtacaggtaatgaaactgttaaactataatagtcaagagtattagcataatctcctatctaaggtttgccatttgcctctcattatccctaacaaaaacaatttttaccaaaccttatggaaggatgcactctaacccttgaacttcaaactctcatattaggcctttctacaggaaaaggattgtagataaattgtatgaatcgattgaagggttaatttttttcctgttgccctgtgatagctgggtgcacaaaagttgaaggacagaagagacttactgatttatacctgcactaatatttgctgttttcaacaattcatagaatggacaaaggagctacccgctacgaccagagttgattgaaagcacatattggttgttcaaggctaccagagattacagataccttgatgttggaagggacatattagcaagccttcaatatggtgccagatgcccttgtggttactgccacatatcagatgtggaaacccacaagcaggatgatcacatggagagttttttccttgcagaaacggtcaagtatctctggcttctttttgatttagctgctggccctgacaatattgttgaaaatggaccatataagtacatatttagtacagagggccatttgttacctgttactcctgagatagccttggaagatgaacattgttcatattttggagcattctgtaatggcggtgccgaccatggatatggtgctagtgctagttctactaagcatcgaaatggaaactatacccaattagatgatattcaaaccccttccagtcactattcaatgtccaatgtgttgtttacgccaggttacatcaagggagtttgtccaggattgactcatgcgcagaaatttgggatatcatactctgatgaagaggataactttatagagcagacttctgagagtcttgatcatcatggtgaatctgccatagaatctagcgtccaagaccaatcaagttctattatattgatctctcacccagtcgcaagccaacaggatgaggcttttgagagcgagtctggaagtcaagatcatgcaaatattgttgtaacttctgattctgattctgattccacaagccgtgataatactgttggctctcccggaatgaactcggaagaacttatggacgacatatagggcacctctagacaggacaaaagatgaagaggttgctcacagtgttgagtccaagatatcagctgaccctttgctcatgtagcaacccatttctgtggaatcttcagggtcaatggcttgccgaatgcagaacaagttagcaagcaagcaaaatgtctggtagacgattccagtatcttgccagcttcaacatcggaaattgatatttactttcagatagaatatattacagggcgtacattcactaatttgttcttttttttctgtatcgatcactaatagatattattttgattaatagagaatgcacgagttttgtacaccagatgcatatgaagaggcgcggcacacatcacaggatctatttagtgtagaacagaacagcaaacgagttttagcgtgtatcttacaagattttagattcgaaaaaatcaaggatttgaagctaacatgctcttgatagataagcagcaggagacatgttttcttttagggtgtgtttgcgaccctgtgtctggccagctcgacctgttcaactggtccagacagctcgacctgttcaactggtccaggctgaggctagactgtcctagatactgcaatttattttgtttgtgcacttgtactatatgagtctggttcatacgatc

SEQ ID NO: 78357 - DNA, 2928 bp, Zea Mays
cgaaattaatgcccatacccctctcattgtcccatcaaactcgctactggcctcgggcccgcccgtcgtgaggtccgagctcgatgcagccgatccggcggcggcaccgaggctttgcactcctctgtctctccgccgccctcctcgctgccgccactctgctccccggcgccgccgtcgccgaaggtgtcacgccctccgaggcgcgccggctccgcgacgaggtgaaagatatgttctatcatgcgtttgatggatacatgaagtatgctttcccactcgatgagctgcggcccttaagttgccaagatcgattctttggataccttggctttactgggtgataaggagaaatttggtgctgctgtggagtgggttggtaagaatgtccactttgatattaataaaaccgtctctgtttttgaaaccaacatacgtatccttgggggtctgctatcagctcacctgattgccagtgattatgccactggtatgagaatccaatcttatgatgaccagttacttcatttagctgctgacttagctcagaggttgttgcccgcatttgacactcctacaggtattccatttggatctgttaatttattgtacggagtcgatgaaaatgaaagcaagataacatcaacggctggtggtggtactttgacactggaatttggcatattgagtcgcttgactaataatactgtttttgagcgagttacaaaaaaatcagtgcgtggaatatggtcacgcagatcaaaactcaatcttgttggtgcccatataaatgtctttactggtgaatggacacagaaggatgcaggaattggcacaagcattgattcattctatgaatatcttctaaaggaggcttacaaagctgccatgcactatctccatcatgatccttggtacgtggaggttaatatgaactctggtgctactgtttggccactcttcaatagtctgcaggcattctggccagggcttcaggttttagctggagatgttgatcctgctattcgcacacatgctgccttcttcagcgtctggaaaaagtatggttttacccctgaaggttttaatcttgctacatccactgtacaggtaatgaaactgttaaactataatagtcaagagtattagcataatctcctatctaaggtttgccatttgcctctcattatccctaacaaaaacaatttttaccaaaccttatggaaggatgcactctaacccttgaacttcaaactctcatattaggcctttctacaggaaaaggattgtagataaattgtatgaatcgattgaagggttaatttttttcctgttgccctgtgatagctgggtgcacaaaagttgaaggacagaagagacttactgatttatacctgcactaatatttgctgttttcaacaattcatagaatggacaaaggagctacccgctacgaccagagttgattgaaagcacatattggttgttcaaggctaccagagattacagataccttgatgttggaagggacatattagcaagccttcaatatggtgccagatgcccttgtggttactgccacatatcagatgtggaaacccacaagcaggatgatcacatggagagttttttccttgcagaaacggtcaagtatctctggcttctttttgatttagctgctggccctgacaatattgttgaaaatggaccatataagtacatatttagtacagagggccatttgttacctgttactcctgagatagccttggaagatgaacattgttcatattttggagcattctgtaatggcggtgccgaccatggatatggtgctagtgctagttctactaagcatcgaaatggaaactatacccaattagatgatattcaaaccccttccagtcactattcaatgtccaatgtgttgtttacgccaggttacatcaagggagtttgtccaggattgactcatgcgcagaaatttgggatatcatactctgatgaagaggataactttatagagcagacttctgagagtcttgatcatcatggtgaatctgccatagaatctagcgtccaagaccaatcaagttctattatattgatctctcacccagtcgcaagccaacaggatgaggcttttgagagcgagtctggaagtcaagatcatgcaaatattgttgtaacttctgattctgattctgattccacaagccgtgataatactgttggctctcccggaatgaactcggaagaacttatggacgacatatagggcacctctagacaggacaaaagatgaagaggttgctcacagtgttgagtccaagatatcagctgaccctttgctcatgtagcaacccatttctgtggaatcttcagggtcaatggcttgccgaatgcagaacaagttagcaagcaagcaaaatgtctggtagacgattccagtatcttgccagcttcaacatcggaaattgatatttactttcagatagaatatattacagggcgtacattcactaatttgttcttttttttctgtatcgatcactaatagatattattttgattaatagagaatgcacgagttttgtacaccagatgcatatgaagaggcgcggcacacatcacaggatctatttagtgtagaacagaacagcaaacgagttttagcgtgtatcttacaagattttagattcgaaaaaatcaaggatttgaagctaacatgctcttgatagataagcagcaggagacatgttttcttttagggtgtgtttgcgaccctgtgtctggccagctcgacctgttcaactggtccagacagctcgacctgttcaactggtccaggctgaggctagactgtcctagatactgcaatttattttgtttgtgcacttgtactatatgagtctggttcatacgatc

SEQ ID NO: 78358 - DNA, 2992 bp, Zea Mays
cgaaattaatgcccatacccctctcattgtcccatcaaactcgctactggcctcgggcccgcccgtcgtgaggtccgagctcgatgcagccgatccggcggcggcaccgaggctttgcactcctctgtctctccgccgccctcctcgctgccgccactctgctccccggcgccgccgtcgccgaaggtgtcacgccctccgaggcgcgccggctccgcgacgaggtgaaagatatgttctatcatgcgtttgatggatacatgaagtatgctttcccactcgatgagctgcggcccttaagttgccaaggtgaagactcccttggtggttatgcgctcactcttatcgattctttggataccttggctttactgggtgataaggagaaatttggtgctgctgtggagtgggttgaataaaaccgtctctgtttttgaaaccaacatacgtatccttgggggtctgctatcagctcacctgattgccagtgattatgccactggtatgagaatccaatcttatgatgaccagttacttcatttagctgctgacttagctcagaggttgttgcccgcatttgacactcctacaggtattccatttggatctgttaatttattgtacggagtcgatgaaaatgaaagcaagataacatcaacggctggtggtggtactttgacactggaatttggcatattgagtcgcttgactaataatactgtttttgagcgagttacaaaaaaatcagtgcgtggaatatggtcacgcagatcaaaactcaatcttgttggtgcccatataaatgtctttactggtgaatggacacagaaggatgcaggaattggcacaagcattgattcattctatgaatatcttctaaaggcatatttattgtttggagatgaagaatacctgtacatttttcaggaggcttacaaagctgccatgcactatctccatcatgatccttggtacgtggaggttaatatgaactctggtgctactgtttggccactcttcaatagtctgcaggcattctggccagggcttcagatttaaggttttagctggagatgttgatcctgctattcgcacacatgctgccttcttcagcgtctggaaaaagtatggttttacccctgaaggttttaatcttgctacatccactgtacaggtaatgaaactgttaaactataatagtcaagagtattagcataatctcctatctaaggtttgccatttgcctctcattatccctaacaaaaacaatttttaccaaaccttatggaaggatgcactctaacccttgaacttcaaactctcatattaggcctttctacaggaaaaggattgtagataaattgtatgaatcgattgaagggttaatttttttcctgttgccctgtgatagctgggtgcacaaaagttgaaggacagaagagacttactgatttatacctgcactaatatttgctgttttcaacaattcatagaatggacaaaggagctacccgctacgaccagagttgattgaaagcacatattggttgttcaaggctaccagagattacagataccttgatgttggaagggacatattagcaagccttcaatatggtgccagatgcccttgtggttactgccacatatcagatgtggaaacccacaagcaggatgatcacatggagagttttttccttgcagaaacggtcaagtatctctggcttctttttgatttagctgctggccctgacaatattgttgaaaatggaccatataagtacatatttagtacagagggccatttgttacctgttactcctgagatagccttggaagatgaacattgttcatattttggagcattctgtaatggcggtgccgaccatggatatggtgctagtgctagttctactaagcatcgaaatggaaactatacccaattagatgatattcaaaccccttccagtcactattcaatgtccaatgtgttgtttacgccaggttacatcaagggagtttgtccaggattgactcatgcgcagaaatttgggatatcatactctgatgaagaggataactttatagagcagacttctgagagtcttgatcatcatggtgaatctgccatagaatctagcgtccaagaccaatcaagttctattatattgatctctcacccagtcgcaagccaacaggatgaggcttttgagagcgagtctggaagtcaagatcatgcaaatattgttgtaacttctgattctgattctgattccacaagccgtgataatactgttggctctcccggaatgaactcggaagaacttatggacgacatatagggcacctctagacaggacaaaagatgaagaggttgctcacagtgttgagtccaagatatcagctgaccctttgctcatgtagcaacccatttctgtggaatcttcagggtcaatggcttgccgaatgcagaacaagttagcaagcaagcaaaatgtctggtagacgattccagtatcttgccagcttcaacatcggaaattgatatttactttcagatagaatatattacagggcgtacattcactaatttgttcttttttttctgtatcgatcactaatagatattattttgattaatagagaatgcacgagttttgtacaccagatgcatatgaagaggcgcggcacacatcacaggatctatttagtgtagaacagaacagcaaacgagttttagcgtgtatcttacaagattttagattcgaaaaaatcaaggatttgaagctaacatgctcttgatagataagcagcaggagacatgttttcttttagggtgtgtttgcgaccctgtgtctggccagctcgacctgttcaactggtccagacagctcgacctgttcaactggtccaggctgaggctagactgtcctagatactgcaatttattttgtttgtgcacttgtactatatgagtctggttcatacgatc

SEQ ID NO: 78359 - DNA, 2687 bp, Zea Mays
atgcgtattaaggacgaaattaatgcccatacccctctcattgtcccatcaaactcgctactggcctcgggcccgcccgtcgtgaggtccgagctcgatgcagccgatccggcggcggcaccgaggctttgcactcctctgtctctccgccgccctcctcgctgccgccactctgctccccggcgccgccgtcgccgaaggtgtcacgccctccgaggcgcgccggctccgcgacgaggtgaaagatatgttctatcatgcgtttgatggatacatgaagtatgctttcccactcgatgagctgcggcccttaagttgccaaggtgaagactcccttggtggttatgcgctcactcttatcgattctttggataccttggctttactgggtgataaggagaaatttggtgctgctgtggagtgggttgaataaaaccgtctctgtttttgaaaccaacatacgtatccttgggggtctgctatcagctcacctgattgccagtgattatgccactggtatgagaatccaatcttatgatgaccagttacttcatttagctgctgacttagctcagaggttgttgcccgcatttgacactcctacaggtattccatttggatctgttaatttattgtacggagtcgatgaaaatgaaagcaagataacatcaacggctggtggtggtactttgacactggaatttggcatattgagtcgcttgactaataatactgtttttgagcgagttacaaaaaaatcagtgcgtggaatatggtcacgcagatcaaaactcaatcttgttggtgcccatataaatgtctttactggtgaatggacacagaaggatgcaggaattggcacaagcattgattcattctatgaatatcttctaaaggcatatttattgtttggagatgaagaatacctgtacatttttcaggaggcttacaaagctgccatgcactatctccatcatgatccttggtacgtggaggttaatatgaactctggtgctactgtttggccactcttcaatagtctgcaggcattctggccagggcttcagatttaaggttttagctggagatgttgatcctgctattcgcacacatgctgccttcttcagcgtctggaaaaagtatggttttacccctgaaggttttaatcttgctacatccactgtacagaatggacaaaggagctacccgctacgaccagagttgattgaaagcacatattggttgttcaaggctaccagagattacagataccttgatgttggaagggacatattagcaagccttcaatatggtgccagatgcccttgtggttactgccacatatcagatgtggaaacccacaagcaggatgatcacatggagagttttttccttgcagaaacggtcaagtatctctggcttctttttgatttagctgctggccctgacaatattgttgaaaatggaccatataagtacatatttagtacagagggccatttgttacctgttactcctgagatagccttggaagatgaacattgttcatattttggagcattctgtaatggcggtgccgaccatggatatggtgctagtgctagttctactaagcatcgaaatggaaactatacccaattagatgatattcaaaccccttccagtcactattcaatgtccaatgtgttgtttacgccaggttacatcaagggagtttgtccaggattgactcatgcgcagaaatttgggatatcatactctgatgaagaggataactttatagagcagacttctgagagtcttgatcatcatggtgaatctgccatagaatctagcgtccaagaccaatcaagttctattatattgatctctcacccagtcgcaagccaacaggatgaggcttttgagagcgagtctggaagtcaagatcatgcaaatattgttgtaacttctgattctgattctgattccacaagccgtgataatactgttggctctcccggaatgaactcggaagaacttatggacgacatatagggcacctctagacaggacaaaagatgaagaggttgctcacagtgttgagtccaagatatcagctgaccctttgctcatgtagcaacccatttctgtggaatcttcagggtcaatggcttgccgaatgcagaacaagttagcaagcaagcaaaatgtctggtagacgattccagtatcttgccagcttcaacatcggaaattgatatttactttcagatagaatatattacagggcgtacattcactaatttgttcttttttttctgtatcgatcactaatagatattattttgattaatagagaatgcacgagttttgtacaccagatgcatatgaagaggcgcggcacacatcacaggatctatttagtgtagaacagaacagcaaacgagttttagcgtgtatcttacaagattttagattcgaaaaaatcaaggatttgaagctaacatgctcttgatagataagcagcaggagacatgttttcttttagggtgtgtttgcgaccctgtgtctggccagctcgacctgttcaactggtccagacagctcgacctgttcaactggtccaggctgaggctagactgtcctagatactgcaatttattttgtttgtgcacttgtactatatgagtctggttcatacgatc

SEQ ID NO: 78360 - DNA, 1836 bp, Zea Mays
ccgcgtcgactgcgtcatccccgacgacccaccctcttcctcctccgcgggcgccgcaccgggctccccgccgcaccaggcgccggcgccaaccgcgcgcgggcgcggcgcgctcgcgcgcgtcgcgcgcgccctgctcggcggcgtcgctaggcccatccacgcgctcggccagatcctctcctccgccgcggcgaccgtctcccggcgctccgagccacttcccgcttccccgccgcccgcgcccgttgcggacgtctcccaccactcgccctccgaggtgctccgctccttcagggagctgcggcgccttcacatcgagctgcccacgggcgagctcggcattgacgacggcgtgctccttaagtggaaggccgacttcggctccaccctcggcagctgcgtgatcctcggcgcctcgtcggtctcgtccaaatcgccggcagggtccgctcaggcggaaactgctgcggccgacagcgcggccgccgctcccgataccggtagggagactgaagagccggggagcctgcctgattctctctacacaaatggagggcttaagctccgcgttgtctggaccatcagctccctgattgccgcgtcggcgaggcattacttgctgcacccgattatctgtaatcacggaacgcttgagagcttggacctgacagatgccgacgggcaaggggtgctcaccatggacaagaggcagctgcaggaactgcgggtgcggcccgtctctccatcagggagctcgcaccgcacactcatgccggcactcagtatgcgtctgcactacgcaccactcattgaactgcctgggggaacgctgctgaaaggtgcaacactagtggcgatcagaccaagcgaggatgccttgagggagggccaaggggttgcaggtcctgctggtacatgctggatttcagaggcctttgaggagccatatcggactgcggcaaaggtgctcctcaagagaagggcatattgccttgaaatgaactcgttctgagcaccagggattcacttccacagagttctacccatctgacaggatgggggaagtgagatgcccttcggttaatatatgggaattcatcattcagtgcaaaaattggaccaactctccccatcattaatttatctgatctcggtgaagagatgacttcgtgtacctgtacctttagggttgtaattacagatacgtatttgtgctggactactacacgcggaacggaatgctatttggccgattcccacagagtgtcccatgaagagaagccgtatcacttgagcgtttgagcgtgacgctcctgggccaagctggcattatacttcttttctcaaaggaagcaccagagatttcgtttttagcagggcctttttgcttaaatcttaccgagtcatgctcctagcactgcaatactgcgtcaatttatactcattgttataaaaaaattatagactcgaatataatgtcccttttaagaaaaattatagtgcactctcttttttctaatgctttgtgtgcaccagatgaccagactgccatgagctcaccctcacctagggttaaatgtttcggtagggatttgtcaggaagcccaggtcgcagcagcagaagcggcatgtccaagtaaatgtggagcgtgagaaggaagaagtggttcaagacaacgattcgctgatgggccgtggccgtcgagtccgcaggcccagtgggcgctttccatctgatgtgtggaccaattgagtccttgtaattggcttataactggagaacagccaaaggaagaacttacgatgatgctaatggaaatttccccacccgac

SEQ ID NO: 78361 - DNA, 2458 bp, Zea Mays
atttgctggaagcatggccgacacctatgacctatccatgtagagcaccggcccagaaactcctactgctcttcttagctcgccgaaatgacgcacggcctcgccgtcggcttcggctccctccgctgcggtccctccgtgtcgtcgtcctctgccaccattcatcgcaccctggtcgctccccctcgtcgaagcttacggatatgctcctcgaccttccctcctccacccgcgcccgccatcgagggtcgtgacgtcagcctctcggtgaccacgcggcggggcagggtgttgccggtgcttaagggatgctccctccttgtcccgcccgggcagctctggatgctcctcggccccaacggctgcggcaagtccacgctgctcaaggttttagcaggttttcagaatccaacggccggtacagtgtatataaacagaccatgcagctatgtcttccaaaatcctgatcaccaggtggtaaaacttctctttctttaatagttctctaactggtctgttgtcaggtctcacaatagattttaagtggaatctgtagtatactagtatgccaacacaattaactcacatagcatctattgagttcagtttcagtgttacctgtatcagcttatgtgttaaactcagcatctattggctattttactttgtattggacaagtaaataatgtatttggttaaatgatataaattgatgcttgtgattatacatttaatcatgtggctcggtatatgagatatgtcattaggcatggacaatttgtcacaaaaacttttccatgcataccctgctagtgctccaattcatacaatatccacttaaatgcattcggagcatagttttaggtgagtcatgcaatctgattataatattcttgtaccatgctagagaaaaggtgccatcacttgtggtctagttgttccttagtacccttatttgttggggacataacatttataggagtcttgttgaatcaaatctaacttattgtctgctaaaccatgaactttatgatcttcatttttttagttttgacaaaacatttatgttgacaactcaatactcaaatgaacacattggaatcaaacaagttatagcgtgtacgaaagcttccacatggcggtcaagccaataactgcaaccccagactgttcatgtgcccaagtctttataccatgtctttatatggaagaacgactgtgattttcttagttgtgtcctttggatgcaggttgtgatgcctacagtgggatctgatgtagcatttggtctcggtaagctcaaacttccgttagatgaggtcaggttaagggtatcaaaatctttggatgccgttgggatgttgagctactctcagaggccaatccaaactctgagtggtgggcagaaacagagagttgcaattgctggtgcgttagctgaagcatccaaagtattactgctggacgaactgaccacattcttagatgaacatgaccagataggcgtgataaatgcagtgagggactctgtggctgccgatggggaggtcgccgcattatgggtgactcatcggttggaagagctgaaatatgcagatggtgccatctatatggaagatggccagataatcattcaaggcgacgtctctaccatatcaaaatttataaagaaaaaacaggatgggggaagtgagatgcccttcggttaatatatgggaattcatcattcagtgcaaaaattggaccaactctccccatcattaatttatctgatctcggtgaagagatgacttcgtgtacctgtacctttagggttgtaattacagatacgtatttgtgctggactactacacgcggaacggaatgctatttggccgattcccacagagtgtcccatgaagagaagccgtatcacttgagcgtttgagcgtgacgctcctgggccaagctggcattatacttcttttctcaaaggaagcaccagagatttcgtttttagcagggcctttttgcttaaatcttaccgagtcatgctcctagcactgcaatactgcgtcaatttatactcattgttataaaaaaattatagactcgaatataatgtcccttttaagaaaaattatagtgcactctcttttttctaatgctttgtgtgcaccagatgaccagactgccatgagctcaccctcacctagggttaaatgtttcggtagggatttgtcaggaagcccaggtcgcagcagcagaagcggcatgtccaagtaaatgtggagcgtgagaaggaagaagtggttcaagacaacgattcgctgatgggccgtggccgtcgagtccgcaggcccagtgggcgctttccatctgatgtgtggaccaattgagtccttgtaattggcttataactggagaacagccaaaggaagaacttacgatgatgctaatggaaatttccccacccgac

SEQ ID NO: 78362 - DNA, 2511 bp, Zea Mays
atttgctggaagcatggccgacacctatgacctatccatgtagagcaccggcccagaaactcctactgctcttcttagctcgccgaaatgacgcacggcctcgccgtcggcttcggctccctccgctgcggtccctccgtgtcgtcgtcctctgccaccattcatcgcaccctggtcgctccccctcgtcgaagcttacggatatgctcctcgaccttccctcctccacccgcgcccgccatcgagggtcgtgacgtcagcctctcggtgaccacgcggcggggcagggtgttgccggtgcttaagggatgctccctccttgtcccgcccgggcagctctggatgctcctcggccccaacggctgcggcaagtccacgctgctcaaggcctgagaattgaaattggaactgaatttatgagactggtgattgccttaagagattggtttagcacatctgttatcttcattcaatagtaaaacgtggaatgcaccctgtttccgccaattttgaaacgtagaaaatagttttctgctgtgtagtggctaattcacttggtagatatgaggtagactggcagatactgtcaattatgtctgacattgtttggttttttttcgattggaaatgtaagtaggatgcggtatggatagaatcaagatccagcccatcaacctcgtgagtcgcgagtacagttttttggggagaatgggtagttgaacttcatgaaaatgttcagacaagtcgttgtaccgttttggggacccaaaattctcaggaaaggtttcgataacttgtgaatgtgcatatcattttctatagaaagtccacattaaaagccaataagaaaatctaataaaacctttgttacagatgtcacaaatgtcaattctgcatctcttttgaggtatggtgcatcatcacaaagcaataaagggttgagtcctggagtacaaatggcagtacacagagttaatttgcacccattgtttttggaccagaatatagtttctgttaattataaaaaagatctagtggctgttacattcatgtggaagaaacaaacatgaattggttttatctacttatgcttgtaaagttgttagctacatgcattgtgctcatttctgattactaggtaacaaaactttgagaatttatttgtccatttcttatcactgtcactgggaataaatgtcaacgccgtgttttttaggttttagcaggttttcagaatccaacggccggtacagtgtatataaacagaccatgcagctatgtcttccaaaatcctgatcaccaggttgtgatgcctacagtgggatctgatgtagcatttggtctcggtaagctcaaacttccgttagatgaggtcaggttaagggtatcaaaatctttggatgccgttgggatgttgagctactctcagaggccaatccaaactctgagtggtgggcagaaacagagagttgcaattgctggtgcgttagctgaagcatccaaagtattactgctggacgaactgaccacattcttagatgaacatgaccagataggcgtgataaatgcagtgagggactctgtggctgccgatggggaggtcgccgcattatgggtgactcatcggttggaagagctgaaatatgcagatggtgccatctatatggaagatggccagataatcattcaaggcgacgtctctaccatatcaaaatttataaagaaaaaacaggatgggggaagtgagatgcccttcggttaatatatgggaattcatcattcagtgcaaaaattggaccaactctccccatcattaatttatctgatctcggtgaagagatgacttcgtgtacctgtacctttagggttgtaattacagatacgtatttgtgctggactactacacgcggaacggaatgctatttggccgattcccacagagtgtcccatgaagagaagccgtatcacttgagcgtttgagcgtgacgctcctgggccaagctggcattatacttcttttctcaaaggaagcaccagagatttcgtttttagcagggcctttttgcttaaatcttaccgagtcatgctcctagcactgcaatactgcgtcaatttatactcattgttataaaaaaattatagactcgaatataatgtcccttttaagaaaaattatagtgcactctcttttttctaatgctttgtgtgcaccagatgaccagactgccatgagctcaccctcacctagggttaaatgtttcggtagggatttgtcaggaagcccaggtcgcagcagcagaagcggcatgtccaagtaaatgtggagcgtgagaaggaagaagtggttcaagacaacgattcgctgatgggccgtggccgtcgagtccgcaggcccagtgggcgctttccatctgatgtgtggaccaattgagtccttgtaattggcttataactggagaacagccaaaggaagaacttacgatgatgctaatggaaatttccccacccgac

SEQ ID NO: 78363 - DNA, 1175 bp, Zea Mays
atttgctggaagcatggccgacacctatgacctatccatgtagagcaccggcccagaaactcctactgctcttcttagctcgccgaaatgacgcacggcctcgccgtcggcttcggctccctccgctgcggtccctccgtgtcgtcgtcctctgccaccattcatcgcaccctggtcgctccccctcgtcgaagcttacggatatgctcctcgaccttccctcctccacccgcgcccgccatcgagggtcgtgacgtcagcctctcggtgaccacgcggcggggcagggtgttgccggtgcttaagggatgctccctccttgtcccgcccgggcagctctggatgctcctcggccccaacggctgcggcaagtccacgctgctcaaggttttcagaatccaacggccggtacagtgtatataaacagaccatgcagctatgtcttccaaaatcctgatcaccaggttgtgatgcctacagtgggatctgatgtagcatttggtctcggtaagctcaaacttccgttagatgaggtcaggttaagggtatcaaaatctttggatgccgttgggatgttgagctactctcagaggccaatccaaactctgagtggtgggcagaaacagagagttgcaattgctggtgcgttagctgaagcatccaaagtattactgctggacgaactgaccacattcttagatgaacatgaccagataggcgtgataaatgcagtgagggactctgtggctgccgatggggaggtcgccgcattatgggtgactcatcggttggaagagctgaaatatgcagatggtgccatctatatggaagatggccagataatcattcaaggcgacgtctctaccatatcaaaatttataaagaaaaaacaggcacgctactttggtcattttgaactctaaatccccaaagttttttggcaaagcttatcttgtgtatatggattaattccaaagcaacttattttgttgttgtcaactgtagttttgctggaacttctattttagtcatttttcaaagcaaattatgtgcgacatgcttgtctgcttgcattgcaatgttgagtgtttgcctgtgattcgattcacttgcaggcatatatgaatacggcctggcctgggaaaagcttggtccctgctgcctatactagattg

SEQ ID NO: 78364 - DNA, 805 bp, Zea Mays
cgccctcctatcactgccacgtcaccgcatttgcacccagctttcctcccatcccatggcttccctcctctgccccgcctcttcctgcccctctgcttcactgcgccgcacagccgcctcccccgctgcaccatccttcgcctcaagtcggcactacggagccccgcttacgttccgagtcgcctctcagccgccgcaggcccttgccgcggccccttacggctacggcagcgacctgctcaggcccatcgacacacagacgatcatcatagccgccgccgtcgtatccgcagtctccctctctctcgtcctcggcctcaagggcgacccggtgccgtgcgacaggtgcgctgggaatgtgtgtgttctgcaacgatggcaaaatgaaggtggaaaatggagtcgttgagtgccgtgtatgcagaggagcagggctaatactttgcaagaagtgtgctggttctggatactccaagcggttgtagcggaatcccggtttgactggcattctgtgcagtttgacatccgaaagatggactttgtacagatgtatatacactcttctcttctctatcagcaaatatgtatgtccaggcagagatgagcttgaagggaagctgatttacagtctgctgatatattatcagttgcagttcatttatcatgcgcttcttctctgtttatcaaactgttcacacaagtctgctgatatattttattagcgtgcggcttcgtaatcataacgttataagcagaaccgatcgtccggttttgaatgtctacaaccagagcgtgatcccggccc

SEQ ID NO: 78365 - DNA, 805 bp, Zea Mays
caacgccctcctatcactgccacgtcaccgcatttgcacccagctttcctcccatcccatggcttccctcctctgccccgcctcttcctgcccctctgcttcactgcgccgcacagccgcctcccccgctgcaccatccttcgcctcaagtcggcactacggagccccgcttacgttccgagtcgcctctcagccgccgcaggcccttgccgcggccccttacggctacggcagcgacctgctcaggcccatcgacacacagacgatcatcatagccgccgccgtcgtatccgcagtctccctctctctcgtcctcggcctcaagggcgacccggtgccgtgcgacagggggcacgaagtgtgtgttctgcaacgatggcaaaatgaaggtggaaaatggagtcgttgagtgccgtgtatgcagaggagcagggctaatactttgcaagaagtgtgctggttctggatactccaagcggttgtagcggaatcccggtttgactggcattctgtgcagtttgacatccgaaagatggactttgtacagatgtatatacactcttctcttctctatcagcaaatatgtatgtccaggcagagatgagcttgaagggaagctgatttacagtctgctgatatattatcagttgcagttcatttatcatgcgcttcttctctgtttatcaaactgttcacacaagtctgctgatatattttattagcgtgcggcttcgtaatcataacgttataagcagaaccgatcgtccggttttgaatgtctacaaccagagcgtgatcccggccc

SEQ ID NO: 78366 - DNA, 267 bp, Zea Mays
gtggaattcatgtacttagccaagtggaaggattaaggggactgatcagatatcagctgcttaaaagttcccctctatttccttgtcttcttcagttgctcggcttcgtctccggtaatggttttgttggggaaactgacaaaaacaatgagaaacctttacactcacaagaacattattactcacaagaacattgttgttaaatacagtggtaacaaggaaggttttgtatataaccttaaaaggtaactgagacctatatgttgg

SEQ ID NO: 78367 - DNA, 1904 bp, Zea Mays
gtttctaccaatccagctcttgttcttttgcttatcaagtctcccaatgcgaaaaagtgggacctgacgtggctgtggaagctatgatgtcaaacactggccatgtgttctacggggatctcagaagccatgagagggtgtctgtttcattctccacgttcattcagtcgtgcaagtcttacctggatcatatgaatgcagctagtgattcatccaaagagcagggaatgcttggggagccagctagttcaagggagacatgttcgaacagttcagagaacttggagcaagtctatttggcacagagaacaaagaaggatgctcattacaagttctggaaggcgacatccaagaggtctaaactagttttgccttttagtcaaatagtctactctccacatgactttcaagtggcacatcgaagttcattgttctattaatttgtttctctttactgctacagcctatatttctgagaggaaaatcattttcgtcaataaacttttggatgaataagggtcacttgagatcaagtactcattacgatccccaccataaccttctctgtgtggtatctggtcgcaaaaaagttactttgtggcctccatctgcatccccattcttatacccgttgcctgtgtatggcgaggcctccaaccacagctctgttagtgtggaggagccagattattcaatatatacaagggcaagatacatgaaggaatattctgaaacagtaattctaaactgcagcgatgttgttttcataccagaaggctggtatcaccaagttgacagtgacgacttaacaatagcagttaacttttggtggaagtcaagaataatgactcaaatgttagaacatatggatgcctactatctacgccgaattatgagcagtgaagattggtggaccaggagatgagcataatggcgcagaagagtccttttggtcatttgaaagattgcacggatattcagcatatggccaaaacattgacaggtttccagctattcaatttgcaaaaagattcaccactacgaactctggaaccctccactctgcaagcactctatgaactcatctcactggtccatgatggtgctgaagcggttagccaaatggacaaaatagaagccacatcccagaataaatcctccaaccaaagagatgacacagatacgagtgctgctgcagacgattcatccctcttggacaaagatcctgttgcaaaaatcattttgccagttgaaccacttgaattgcggactatgctgcttgcaatggtgcatactttcccaaggacgttagaaaatttgattctcaacatgcttggggtaggagcagagatactgactaggaagtttgatgagatggatcaacaaacaacaaaagaagaacagtctgagttctacaagatattctatagcgtgtttgacgaccagtacgctgcaatggatgcgcttctgaacgggaaggaattgttttcttttcagatattccagaatgtcctggacaagtatctcggggtgcatgttgaccgacccagcagatttgttactcgtacaaaccaatgaaatggagcgcctctaccctctagtatacaaaacctgaatcggcttgttgagccaagccaatgaagaacgtattatgctgattactgatgtttgagcgtctcgatagataatgtgtttttattggcttgcaaccatattttagggattttttttggacgaaggcggcagtaactgagagcggtgcgcatatgtgagatgcgtgactgctcttgaatgcgatgattacaaacgaaaattaccgttacgcctcgtttggattcatggaatcgaatttcattctaataatattaattctaacgatattaatttaggcatatataaggaag

SEQ ID NO: 78368 - DNA, 2095 bp, Zea Mays
ggcattgattgcatctctagtgcccgtcctccgtcctccggagcggctatgggcgaagagagggagttcgtgggcgctaggttggacgccggcctccgcgctgcccgcttctcgtcgccgccgtctgccgacgagtttgcggcagatgtcgagcccaagaacgtccctgcggtctttcgcggcgtggttaaggagtgggcggcctcctcccgttgggatcctctacatggcggcctcgattacctgctggaaaaagtgggacctgacgtggctgtggaagctatgatgtcaaacactggccatgtgttctacggggatctcagaagccatgagagggtgtctgtttcattctccacgttcattcagtcgtgcaagtcttacctggatcatatgaatgcagctagtgattcatccaaagagcagggaatgcttggggagccagctagttcaagggagacatgttcgaacagttcagagaacttggagcaagtctatttggcacagagaacaaagaaggatgctcattacaagttctggaaggcgacatccaagaggtctaaactagttttgccttttagtcaaatagtctactctccacatgactttcaagtggcacatcgaagttcattgttctattaatttgtttctctttactgctacagcctatatttctgagaggaaaatcattttcgtcaataaacttttggatgaataagggtcacttgagatcaagtactcattacgatccccaccataaccttctctgtgtggtatctggtcgcaaaaaagttactttgtggcctccatctgcatccccattcttatacccgttgcctgtgtatggcgaggcctccaaccacagctctgttagtgtggaggagccagattattcaatatatacaagggcaagatacatgaaggaatattctgaaacagtaattctaaactgcagcgatgttgttttcataccagaaggctggtatcaccaagttgacagtgacgacttaacaatagcagttaacttttggtggaagtcaagaataatgactcaaatgttagaacatatggatgcctactatctacgccgaattatgagcagattggtggaccaggagatgagcataatggcgcagaagagtccttttggtcatttgaaagattgcacggatattcagcatatggccaaaacattgacaggtttccagctattcaatttgcaaaaagattcaccactacgaactctggaaccctccactctgcaagcactctatgaactcatctcactggtccatgatggtgctgaagcggttagccaaatggacaaaatagaagccacatcccagaataaatcctccaaccaaagagatgacacagatacgagtgctgctgcagacgattcatccctcttggacaaagatcctgttgcaaaaatcattttgccagttgaaccacttgaattgcggactatgctgcttgcaatgcatactttcccaaggacgttagaaaatttgattctcaacatgcttggggtaggagcagagatactgactaggaagtttgatgagatggatcaacaaacaacaaaagaagaacagtctgagttctacaagatattctatagcgtgtttgacgaccagtacgctgcaatggatgcgcttctgaacgggaaggaattgttttcttttcagatattccagaatgtcctggacaagtatctcggggtgcatgttgaccgacccagcagatttgttactcgtacaaaccaatgaaatggagcgcctctaccctctagtatacaaaacctgaatcggcttgttgagccaagccaatgaagaacgtattatgctgattactgatgtttgagcgtctcgatagataatgtgtttttattggcttgcaaccatattttagggattttttttggacgaaggcggcagtaactgagagcggtgcgcatatgtgagatgcgtgactgctcttgaatgcgatgattacaaacgaaaattaccgttacgcctcgtttggattcatggaatcgaatttcattctaataatattaattctaacgatattaatttaggcatatataaggaag

SEQ ID NO: 78369 - DNA, 1990 bp, Zea Mays
ggcattgattgcatctctagtgcccgtcctccgtcctccggagcggctatgggcgaagagagggagttcgtgggcgctaggttggacgccggcctccgcgctgcccgcttctcgtcgccgccgtctgccgacgagtttgcggcagatgtcgagcccaagaacgtccctgcggtctttcgcggcgtggttaaggagtgggcggcctcctcccgttgggatcctctacatggcggcctcgattacctgctggaaaaagtgggacctgacgtggctgtggaagctatgatgtcaaacactggccatgtgttctacggggatctcagaagccatgagagggtgtctgtttcattctccacgttcattcagtcgtgcaagtcttacctggatcatatgaatgcagctagtgattcatccaaagagcagggaatgcttggggagccagctagttcaagggagacatgttcgaacagttcagagaacttggagcaagtctatttggcacaggtatctattatgaatgcagagaacaaagaaggatgctcattacaagttctggaaggcgacatccaagagcctatatttctgagaggaaaatcattttcgtcaataaacttttggatgaataagggtcacttgagatcaagtactcattacgatccccaccataaccttctctgtgtggtatctggtcgcaaaaaagttactttgtggcctccatctgcatccccattcttatacccgttgcctgtgtatggcgaggcctccaaccacagctctgttagtgtggaggagccagattattcaatatatacaagggcaagatacatgaaggaatattctgaaacagtaattctaaactgcagcgatgttgttttcataccagaaggctggtatcaccaagttgacagtgacgacttaacaatagcagttaacttttggtggaagtcaagaataatgactcaaatgttagaacatatggatgcctactatctacgccgaattatgagcagagcataatggcgcagaagagtccttttggtcatttgaaagattgcacggatattcagcatatggccaaaacattgacaggtttccagctattcaatttgcaaaaagattcaccactacgaactctggaaccctccactctgcaagcactctatgaactcatctcactggtccatgatggtgctgaagcggttagccaaatggacaaaatagaagccacatcccagaataaatcctccaaccaaagagatgacacagatacgagtgctgctgcagacgattcatccctcttggacaaagatcctgttgcaaaaatcattttgccagttgaaccacttgaattgcggactatgctgcttgcaatggtgcatactttcccaaggacgttagaaaatttgattctcaacatgcttggggtaggagcagagatactgactaggaagtttgatgagatggatcaacaaacaacaaaagaagaacagtctgagttctacaagatattctatagcgtgtttgacgaccagtacgctgcaatggatgcgcttctgaacgggaaggaattgttttcttttcagatattccagaatgtcctggacaagtatctcggggtgcatgttgaccgacccagcagatttgttactcgtacaaaccaatgaaatggagcgcctctaccctctagtatacaaaacctgaatcggcttgttgagccaagccaatgaagaacgtattatgctgattactgatgtttgagcgtctcgatagataatgtgtttttattggcttgcaaccatattttagggattttttttggacgaaggcggcagtaactgagagcggtgcgcatatgtgagatgcgtgactgctcttgaatgcgatgattacaaacgaaaattaccgttacgcctcgtttggattcatggaatcgaatttcattctaataatattaattctaacgatattaatttaggcatatataaggaag

SEQ ID NO: 78370 - DNA, 1956 bp, Zea Mays
ggcattgattgcatctctagtgcccgtcctccgtcctccggagcggctatgggcgaagagagggagttcgtgggcgctaggttggacgccggcctccgcgctgcccgcttctcgtcgccgccgtctgccgacgagtttgcggcagatgtcgagcccaagaacgtccctgcggtctttcgcggcgtggttaaggagtgggcggcctcctcccgttgggatcctctacatggcggcctcgattacctgctggaaaaagtgggacctgacgtggctgtggaagctatgatgtcaaacactggccatgtgttctacggggatctcagaagccatgagagggtgtctgtttcattctccacgttcattcagtcgtgcaagtcttacctggatcatatgaatgcagctagtgattcatccaaagagcagggaatgcttggggagccagctagttcaagggagacatgttcgaacagttcagagaacttggagcaagtctatttggcacaggtatctattatgaatgcagagaacaaagaaggatgctcattacaagttctggaaggcgacatccaagagcctatatttctgagaggaaaatcattttcgtcaataaacttttggatgaataagggtcacttgagatcaagtactcattacgatccccaccataaccttctctgtgtggtatctggtcgcaaaaaagttactttgtggcctccatctgcatccccattcttatacccgttgcctgtgtatggcgaggcctccaaccacagctctgttagtgtggaggagccagattattcaatatatacaagggcaagatacatgaaggaatattctgaaacagtaattctaaactgcagcgatgttgttttcataccagaaggctggtatcaccaagttgacagtgacgacttaacaatagcagttaacttttggtggaagtcaagaataatgactcaaatgttagaacatatggatgcctactatctacgccgaattatgagcagtgaagattggtggaccaggagatgagcataatggcgcagaagagtccttttggtcatttgaaagattgcacggatattcagcatatggccaaaacattgacaggtttccagctattcaatttgcaaaaagattcaccactacgaactctggaaccctccactctgcaagcactctatgaactcatctcactggtccatgatggtgctgaagcggttagccaaatggacaaaatagaagccacatcccagaataaatcctccaaccaaagagatgacacagatacgagtgctgctgcagacgattcatccctcttggacaaagatcctgttgcaaaaatcattttgccagttgaaccacttgaattgcggactatgctgcttgcaatggtgagatactgactaggaagtttgatgagatggatcaacaaacaacaaaagaagaacagtctgagttctacaagatattctatagcgtgtttgacgaccagtacgctgcaatggatgcgcttctgaacgggaaggaattgttttcttttcagatattccagaatgtcctggacaagtatctcggggtgcatgttgaccgacccagcagatttgttactcgtacaaaccaatgaaatggagcgcctctaccctctagtatacaaaacctgaatcggcttgttgagccaagccaatgaagaacgtattatgctgattactgatgtttgagcgtctcgatagataatgtgtttttattggcttgcaaccatattttagggattttttttggacgaaggcggcagtaactgagagcggtgcgcatatgtgagatgcgtgactgctcttgaatgcgatgattacaaacgaaaattaccgttacgcctcgtttggattcatggaatcgaatttcattctaataatattaattctaacgatattaatttaggcatatataaggaag

SEQ ID NO: 78371 - DNA, 2219 bp, Zea Mays
ggcattgattgcatctctagtgcccgtcctccgtcctccggagcggctatgggcgaagagagggagttcgtgggcgctaggttggacgccggcctccgcgctgcccgcttctcgtcgccgccgtctgccgacgagtttgcggcagatgtcgagcccaagaacgtccctgcggtctttcgcggcgtggttaaggagtgggcggcctcctcccgttgggatcctctacatggcggcctcgattacctgctggaaaaagtgggacctgacgtggctgtggaagctatgatgtcaaacactggccatgtgttctacggggatctcagaagccatgagagggtgtctgtttcattctccacgttcattcagtcgtgcaagtcttacctggatcatatgaatgcagctagtgattcatccaaagagcagggaatgcttggggagccagctagttcaagggagacatgttcgaacagttcagagaacttggagcaagtctatttggcacagagaacaaagaaggatgctcattacaagttctggaaggcgacatccaagaggtctaaactagttttgccttttagtcaaatagtctactctccacatgactttcaagtggcacatcgaagttcattgttctattaatttgtttctctttactgctacagcctatatttctgagaggaaaatcattttcgtcaataaacttttggatgaataagggtcacttgagatcaagtactcattacgatccccaccataaccttctctgtgtggtatctggtcgcaaaaaagttactttgtggcctccatctgcatccccattcttatacccgttgcctgtgtatggcgaggcctccaaccacagctctgttagtgtggaggagccagattattcaatatatacaagggcaagatacatgaaggaatattctgaaacagtaattctaaactgcagcgatgttgttttcataccagaaggctggtatcaccaagttgacagtgacgacttaacaatagcagttaacttttggtggaagtcaagaataatgactcaaatgttagaacatatggatgcctactatctacgccgaattatgagcagagcataatggcgcagaagagtccttttggtcatttgaaagattgcacggatattcagcatatggccaaaacattgacaggtttccagctattcaatttgcaaaaagattcaccactacgaactctggaaccctccactctgcaagcactctatgaactcatctcactggtccatgatggtgctgaagcggttagccaaatggacaaaatagaagccacatcccagaataaatcctccaaccaaagagatgacacagatacgagtgctgctgcagacgattcatccctcttggacaaagatcctgttgcaaaaatcattttgccagttgaaccacttgaattgcggactatgctgcttgcaatggtggtatgcattacaaagttaaaaacaatcgattgatattgttgcatttcttttatttttccgaatccaatctgtgcacgactgcacgctgcaacgatattttgttgttaagcggagcactcctaaacttctatggttttcagcatactttcccaaggacgttagaaaatttgattctcaacatgcttggggtaggagcagagatactgactaggaagtttgatgagatggatcaacaaacaacaaaagaagaacagtctgagttctacaagatattctatagcgtgtttgacgaccagtacgctgcaatggatgcgcttctgaacgggaaggaattgttttcttttcagatattccagaatgtcctggacaagtatctcggggtgcatgttgaccgacccagcagatttgttactcgtacaaaccaatgaaatggagcgcctctaccctctagtatacaaaacctgaatcggcttgttgagccaagccaatgaagaacgtattatgctgattactgatgtttgagcgtctcgatagataatgtgtttttattggcttgcaaccatattttagggattttttttggacgaaggcggcagtaactgagagcggtgcgcatatgtgagatgcgtgactgctcttgaatgcgatgattacaaacgaaaattaccgttacgcctcgtttggattcatggaatcgaatttcattctaataatattaattctaacgatattaatttaggcatatataaggaag

SEQ ID NO: 78372 - DNA, 2005 bp, Zea Mays
ttttgcactaggcattgattgcatctctagtgcccgtcctccgtcctccggagcggctatgggcgaagagagggagttcgtgggcgctaggttggacgccggcctccgcgctgcccgcttctcgtcgccgccgtctgccgacgagtttgcggcagatgtcgagcccaagaacgtccctgcggtctttcgcggcgtggttaaggagtgggcggcctcctcccgttgggatcctctacatggcggcctcgattacctgctggaaaaagtgggacctgacgtggctgtggaagctatgatgtcaaacactggccatgtgttctacggggatctcagaagccatgagagggtgtctgtttcattctccacgttcattcagtcgtgcaagtcttacctggatcatatgaatgcagctagtgattcatccaaagagcagggaatgcttggggagccagctagttcaagggagacatgttcgaacagttcagagaacttggagcaagtctatttggcacagagaacaaagaaggatgctcattacaagttctggaaggcgacatccaagagcctatatttctgagaggaaaatcattttcgtcaataaacttttggatgaataagggtcacttgagatcaagtactcattacgatccccaccataaccttctctgtgtggtatctggtcgcaaaaaagttactttgtggcctccatctgcatccccattcttatacccgttgcctgtgtatggcgaggcctccaaccacagctctgttagtgtggaggagccagattattcaatatatacaagggcaagatacatgaaggaatattctgaaacagtaattctaaactgcagcgatgttgttttcataccagaaggctggtatcaccaagttgacagtgacgacttaacaatagcagttaacttttggtggaagtcaagaataatgactcaaatgttagaacatatggatgcctactatctacgccgaattatgagcagtgaagattggtggaccaggagatgagcataatggcgcagaagagtccttttggtcatttgaaagattgcacggatattcagcatatggccaaaacattgacaggtttccagctattcaatttgcaaaaagattcaccactacgaactctggaaccctccactctgcaagcactctatgaactcatctcactggtccatgatggtgctgaagcggttagccaaatggacaaaatagaagccacatcccagaataaatcctccaaccaaagagatgacacagatacgagtgctgctgcagacgattcatccctcttggacaaagatcctgttgcaaaaatcattttgccagttgaaccacttgaattgcggactatgctgcttgcaatggtgcatactttcccaaggacgttagaaaatttgattctcaacatgcttggggtaggagcagagatactgactaggaagtttgatgagatggatcaacaaacaacaaaagaagaacagtctgagttctacaagatattctatagcgtgtttgacgaccagtacgctgcaatggatgcgcttctgaacgggaaggaattgttttcttttcagatattccagaatgtcctggacaagtatctcggggtgcatgttgaccgacccagcagatttgttactcgtacaaaccaatgaaatggagcgcctctaccctctagtatacaaaacctgaatcggcttgttgagccaagccaatgaagaacgtattatgctgattactgatgtttgagcgtctcgatagataatgtgtttttattggcttgcaaccatattttagggattttttttggacgaaggcggcagtaactgagagcggtgcgcatatgtgagatgcgtgactgctcttgaatgcgatgattacaaacgaaaattaccgttacgcctcgtttggattcatggaatcgaatttcattctaataatattaattctaacgatattaatttaggcatatataaggaag

SEQ ID NO: 78373 - DNA, 2025 bp, Zea Mays
gttttgcactaggcattgattgcatctctagtgcccgtcctccgtcctccggagcggctatgggcgaagagagggagttcgtgggcgctaggttggacgccggcctccgcgctgcccgcttctcgtcgccgccgtctgccgacgagtttgcggcagatgtcgagcccaagaacgtccctgcggtctttcgcggcgtggttaaggagtgggcggcctcctcccgttgggatcctctacatggcggcctcgattacctgctggaaaaagtgggacctgacgtggctgtggaagctatgatgtcaaacactggccatgtgttctacggggatctcagaagccatgagagggtgtctgtttcattctccacgttcattcagtcgtgcaagtcttacctggatcatatgaatgcagctagtgattcatccaaagagcagggaatgcttggggagccagctagttcaagggagacatgttcgaacagttcagagaacttggagcaagtctatttggcacaggtatctattatgaatgcagagaacaaagaaggatgctcattacaagttctggaaggcgacatccaagagcctatatttctgagaggaaaatcattttcgtcaataaacttttggatgaataagggtcacttgagatcaagtactcattacgatccccaccataaccttctctgtgtggtatctggtcgcaaaaaagttactttgtggcctccatctgcatccccattcttatacccgttgcctgtgtatggcgaggcctccaaccacagctctgttagtgtggaggagccagattattcaatatatacaagggcaagatacatgaaggaatattctgaaacagtaattctaaactgcagcgatgttgttttcataccagaaggctggtatcaccaagttgacagtgacgacttaacaatagcagttaacttttggtggaagtcaagaataatgactcaaatgttagaacatatggatgcctactatctacgccgaattatgagcagtgaagattggtggaccaggagatgagcataatggcgcagaagagtccttttggtcatttgaaagattgcacggatattcagcatatggccaaaacattgacaggtttccagctattcaatttgcaaaaagattcaccactacgaactctggaaccctccactctgcaagcactctatgaactcatctcactggtccatgatggtgctgaagcggttagccaaatggacaaaatagaagccacatcccagaataaatcctccaaccaaagagatgacacagatacgagtgctgctgcagacgattcatccctcttggacaaagatcctgttgcaaaaatcattttgccagttgaaccacttgaattgcggactatgctgcttgcaatggtgcatactttcccaaggacgttagaaaatttgattctcaacatgcttggggtaggagcagagatactgactaggaagtttgatgagatggatcaacaaacaacaaaagaagaacagtctgagttctacaagatattctatagcgtgtttgacgaccagtacgctgcaatggatgcgcttctgaacgggaaggaattgttttcttttcagatattccagaatgtcctggacaagtatctcggggtgcatgttgaccgacccagcagatttgttactcgtacaaaccaatgaaatggagcgcctctaccctctagtatacaaaacctgaatcggcttgttgagccaagccaatgaagaacgtattatgctgattactgatgtttgagcgtctcgatagataatgtgtttttattggcttgcaaccatattttagggattttttttggacgaaggcggcagtaactgagagcggtgcgcatatgtgagatgcgtgactgctcttgaatgcgatgattacaaacgaaaattaccgttacgcctcgtttggattcatggaatcgaatttcattctaataatattaattctaacgatattaatttaggcatatataaggaag

SEQ ID NO: 78374 - DNA, 2106 bp, Zea Mays
gttttgcactaggcattgattgcatctctagtgcccgtcctccgtcctccggagcggctatgggcgaagagagggagttcgtgggcgctaggttggacgccggcctccgcgctgcccgcttctcgtcgccgccgtctgccgacgagtttgcggcagatgtcgagcccaagaacgtccctgcggtctttcgcggcgtggttaaggagtgggcggcctcctcccgttgggatcctctacatggcggcctcgattacctgctggaaaaagtgggacctgacgtggctgtggaagctatgatgtcaaacactggccatgtgttctacggggatctcagaagccatgagagggctggtttttgctcgggacttgcaaattataaatccagccatatggatggtttgcaattgaggcactaatgctacgtttcctccacgcaggtgtctgtttcattctccacgttcattcagtcgtgcaagtcttacctggatcatatgaatgcagctagtgattcatccaaagagcagggaatgcttggggagccagctagttcaagggagacatgttcgaacagttcagagaacttggagcaagtctatttggcacaggtatctattatgaatgcagagaacaaagaaggatgctcattacaagttctggaaggcgacatccaagagcctatatttctgagaggaaaatcattttcgtcaataaacttttggatgaataagggtcacttgagatcaagtactcattacgatccccaccataaccttctctgtgtggtatctggtcgcaaaaaagttactttgtggcctccatctgcatccccattcttatacccgttgcctgtgtatggcgaggcctccaaccacagctctgttagtgtggaggagccagattattcaatatatacaagggcaagatacatgaaggaatattctgaaacagtaattctaaactgcagcgatgttgttttcataccagaaggtatcaccaagttgacagtgacgacttaacaatagcagttaacttttggtggaagtcaagaataatgactcaaatgttagaacatatggatgcctactatctacgccgaattatgagcagattggtggaccaggagatgagcataatggcgcagaagagtccttttggtcatttgaaagattgcacggatattcagcatatggccaaaacattgacaggtttccagctattcaatttgcaaaaagattcaccactacgaactctggaaccctccactctgcaagcactctatgaactcatctcactggtccatgatggtgctgaagcggttagccaaatggacaaaatagaagccacatcccagaataaatcctccaaccaaagagatgacacagatacgagtgctgctgcagacgattcatccctcttggacaaagatcctgttgcaaaaatcattttgccagttgaaccacttgaattgcggactatgctgcttgcaatggtgcatactttcccaaggacgttagaaaatttgattctcaacatgcttggggtaggagcagagatactgactaggaagtttgatgagatggatcaacaaacaacaaaagaagaacagtctgagttctacaagatattctatagcgtgtttgacgaccagtacgctgcaatggatgcgcttctgaacgggaaggaattgttttcttttcagatattccagaatgtcctggacaagtatctcggggtgcatgttgaccgacccagcagatttgttactcgtacaaaccaatgaaatggagcgcctctaccctctagtatacaaaacctgaatcggcttgttgagccaagccaatgaagaacgtattatgctgattactgatgtttgagcgtctcgatagataatgtgtttttattggcttgcaaccatattttagggattttttttggacgaaggcggcagtaactgagagcggtgcgcatatgtgagatgcgtgactgctcttgaatgcgatgattacaaacgaaaattaccgttacgcctcgtttggattcatggaatcgaatttcattctaataatattaattctaacgatattaatttaggcatatataaggaag

SEQ ID NO: 78375 - DNA, 1937 bp, Zea Mays
gcagttttgcactaggcattgattgcatctctagtgcccgtcctccgtcctccggagcggctatgggcgaagagagggagttcgtgggcgctaggttggacgccggcctccgcgctgcccgcttctcgtcgccgccgtctgccgacgagtttgcggcagatgtcgagcccaagaacgtccctgcggtctttcgcggcgtggttaaggagtgggcggcctcctcccgttgggatcctctacatggcggcctcgattacctgctggaaaaagtgggacctgacgtggctgtggaagctatgatgtcaaacactggccatgtgttctacggggatctcagaagccatgagaggctagtgattcatccaaagagcagggaatgcttggggagccagctagttcaagggagacatgttcgaacagttcagagaacttggagcaagtctatttggcacagagaacaaagaaggatgctcattacaagttctggaaggcgacatccaagagcctatatttctgagaggaaaatcattttcgtcaataaacttttggatgaataagggtcacttgagatcaagtactcattacgatccccaccataaccttctctgtgtggtatctggtcgcaaaaaagttactttgtggcctccatctgcatccccattcttatacccgttgcctgtgtatggcgaggcctccaaccacagctctgttagtgtggaggagccagattattcaatatatacaagggcaagatacatgaaggaatattctgaaacagtaattctaaactgcagcgatgttgttttcataccagaaggctggtatcaccaagttgacagtgacgacttaacaatagcagttaacttttggtggaagtcaagaataatgactcaaatgttagaacatatggatgcctactatctacgccgaattatgagcagattggtggaccaggagatgagcataatggcgcagaagagtccttttggtcatttgaaagattgcacggatattcagcatatggccaaaacattgacaggtttccagctattcaatttgcaaaaagattcaccactacgaactctggaaccctccactctgcaagcactctatgaactcatctcactggtccatgatggtgctgaagcggttagccaaatggacaaaatagaagccacatcccagaataaatcctccaaccaaagagatgacacagatacgagtgctgctgcagacgattcatccctcttggacaaagatcctgttgcaaaaatcattttgccagttgaaccacttgaattgcggactatgctgcttgcaatgcatactttcccaaggacgttagaaaatttgattctcaacatgcttggggtaggagcagagatactgactaggaagtttgatgagatggatcaacaaacaacaaaagaagaacagtctgagttctacaagatattctatagcgtgtttgacgaccagtacgctgcaatggatgcgcttctgaacgggaaggaattgttttcttttcagatattccagaatgtcctggacaagtatctcggggtgcatgttgaccgacccagcagatttgttactcgtacaaaccaatgaaatggagcgcctctaccctctagtatacaaaacctgaatcggcttgttgagccaagccaatgaagaacgtattatgctgattactgatgtttgagcgtctcgatagataatgtgtttttattggcttgcaaccatattttagggattttttttggacgaaggcggcagtaactgagagcggtgcgcatatgtgagatgcgtgactgctcttgaatgcgatgattacaaacgaaaattaccgttacgcctcgtttggattcatggaatcgaatttcattctaataatattaattctaacgatattaatttaggcatatataaggaag

SEQ ID NO: 78376 - DNA, 2005 bp, Zea Mays
tgcagttttgcactaggcattgattgcatctctagtgcccgtcctccgtcctccggagcggctatgggcgaagagagggagttcgtgggcgctaggttggacgccggcctccgcgctgcccgcttctcgtcgccgccgtctgccgacgagtttgcggcagatgtcgagcccaagaacgtccctgcggtctttcgcggcgtggttaaggagtgggcggcctcctcccgttgggatcctctacatggcggcctcgattacctgctggaaaaagtgggacctgacgtggctgtggaagctatgatgtcaaacactggccatgtgttctacggggatctcagaagccatgagagggtgtctgtttcattctccacgttcattcagtcgtgcaagtcttacctggatcatatgaatgcagctagtgattcatccaaagagcagggaatgcttggggagccagctagttcaagggagacatgttcgaacagttcagagaacttggagcaagtctatttggcacagagaacaaagaaggatgctcattacaagttctggaaggcgacatccaagagcctatatttctgagaggaaaatcattttcgtcaataaacttttggatgaataagggtcacttgagatcaagtactcattacgatccccaccataaccttctctgtgtggtatctggtcgcaaaaaagttactttgtggcctccatctgcatccccattcttatacccgttgcctgtgtatggcgaggcctccaaccacagctctgttagtgtggaggagccagattattcaatatatacaagggcaagatacatgaaggaatattctgaaacagtaattctaaactgcagcgatgttgttttcataccagaaggctggtatcaccaagttgacagtgacgacttaacaatagcagttaacttttggtggaagtcaagaataatgactcaaatgttagaacatatggatgcctactatctacgccgaattatgagcagattggtggaccaggagatgagcataatggcgcagaagagtccttttggtcatttgaaagattgcacggatattcagcatatggccaaaacattgacaggtttccagctattcaatttgcaaaaagattcaccactacgaactctggaaccctccactctgcaagcactctatgaactcatctcactggtccatgatggtgctgaagcggttagccaaatggacaaaatagaagccacatcccagaataaatcctccaaccaaagagatgacacagatacgagtgctgctgcagacgattcatccctcttggacaaagatcctgttgcaaaaatcattttgccagttgaaccacttgaattgcggactatgctgcttgcaatggtgcatactttcccaaggacgttagaaaatttgattctcaacatgcttggggtaggagcagagatactgactaggaagtttgatgagatggatcaacaaacaacaaaagaagaacagtctgagttctacaagatattctatagcgtgtttgacgaccagtacgctgcaatggatgcgcttctgaacgggaaggaattgttttcttttcagatattccagaatgtcctggacaagtatctcggggtgcatgttgaccgacccagcagatttgttactcgtacaaaccaatgaaatggagcgcctctaccctctagtatacaaaacctgaatcggcttgttgagccaagccaatgaagaacgtattatgctgattactgatgtttgagcgtctcgatagataatgtgtttttattggcttgcaaccatattttagggattttttttggacgaaggcggcagtaactgagagcggtgcgcatatgtgagatgcgtgactgctcttgaatgcgatgattacaaacgaaaattaccgttacgcctcgtttggattcatggaatcgaatttcattctaataatattaattctaacgatattaatttaggcatatataaggaag

SEQ ID NO: 78377 - DNA, 2149 bp, Zea Mays
ataaatagtagagaatgtgacataccatgagataatttgcttgcagttttgataatttgcttgcagttttgcactaggcattgattgcatctctagtgcccgtcctccgtcctccggagcggctatgggcgaagagagggagttcgtgggcgctaggttggacgccggcctccgcgctgcccgcttctcgtcgccgccgtctgccgacgagtttgcggcagatgtcgagcccaagaacgtccctgcggtctttcgcggcgtggttaaggagtgggcggcctcctcccgttgggatcctctacatggcggcctcgattacctgctggaaaaagtgggacctgacgtggctgtggaagctatgatgtcaaacactggccatgtgttctacggggatctcagaagccatgagagggtgtctgtttcattctccacgttcattcagtcgtgcaagtcttacctggatcatatgaatgcagctagtgattcatccaaagagcagggaatgcttggggagccagctagttcaagggagacatgttcgaacagttcagagaacttggagcaagtctatttggcacaggtatctattatgaatgcagagaacaaagaaggatgctcattacaagttctggaaggcgacatccaagaggtctaaactagttttgccttttagtcaaatagtctactctccacatgactttcaagtggcacatcgaagttcattgttctattaatttgtttctctttactgctacagcctatatttctgagaggaaaatcattttcgtcaataaacttttggatgaataagggtcacttgagatcaagtactcattacgatccccaccataaccttctctgtgtggtatctggtcgcaaaaaagttactttgtggcctccatctgcatccccattcttatacccgttgcctgtgtatggcgaggcctccaaccacagctctgttagtgtggaggagccagattattcaatatatacaagggcaagatacatgaaggaatattctgaaacagtatcaccaagttgacagtgacgacttaacaatagcagttaacttttggtggaagtcaagaataatgactcaaatgttagaacatatggatgcctactatctacgccgaattatgagcagattggtggaccaggagatgagcataatggcgcagaagagtccttttggtcatttgaaagattgcacggatattcagcatatggccaaaacattgacaggtttccagctattcaatttgcaaaaagattcaccactacgaactctggaaccctccactctgcaagcactctatgaactcatctcactggtccatgatggtgctgaagcggttagccaaatggacaaaatagaagccacatcccagaataaatcctccaaccaaagagatgacacagatacgagtgctgctgcagacgattcatccctcttggacaaagatcctgttgcaaaaatcattttgccagttgaaccacttgaattgcggactatgctgcttgcaatggtgcatactttcccaaggacgttagaaaatttgattctcaacatgcttggggtaggagcagagatactgactaggaagtttgatgagatggatcaacaaacaacaaaagaagaacagtctgagttctacaagatattctatagcgtgtttgacgaccagtacgctgcaatggatgcgcttctgaacgggaaggaattgttttcttttcagatattccagaatgtcctggacaagtatctcggggtgcatgttgaccgacccagcagatttgttactcgtacaaaccaatgaaatggagcgcctctaccctctagtatacaaaacctgaatcggcttgttgagccaagccaatgaagaacgtattatgctgattactgatgtttgagcgtctcgatagataatgtgtttttattggcttgcaaccatattttagggattttttttggacgaaggcggcagtaactgagagcggtgcgcatatgtgagatgcgtgactgctcttgaatgcgatgattacaaacgaaaattaccgttacgcctcgtttggattcatggaatcgaatttcattctaataatattaattctaacgatattaatttaggcatatataaggaag

SEQ ID NO: 78378 - DNA, 2002 bp, Zea Mays
ataaatagtagagaatgtgacataccatgagataatttgcttgcagttttgataatttgcttgcagttttgcactaggcattgattgcatctctagtgcccgtcctccgtcctccggagcggctatgggcgaagagagggagttcgtgggcgctaggttggacgccggcctccgcgctgcccgcttctcgtcgccgccgtctgccgacgagtttgcggcagatgtcgagcccaagaacgtccctgcggtctttcgcggcgtggttaaggagtgggcggcctcctcccgttgggatcctctacatggcggcctcgattacctgctggaaaaagtgggacctgacgtggctgtggaagctatgatgtcaaacactggccatgtgttctacggggatctcagaagccatgagaggctagtgattcatccaaagagcagggaatgcttggggagccagctagttcaagggagacatgttcgaacagttcagagaacttggagcaagtctatttggcacagagaacaaagaaggatgctcattacaagttctggaaggcgacatccaagagcctatatttctgagaggaaaatcattttcgtcaataaacttttggatgaataagggtcacttgagatcaagtactcattacgatccccaccataaccttctctgtgtggtatctggtcgcaaaaaagttactttgtggcctccatctgcatccccattcttatacccgttgcctgtgtatggcgaggcctccaaccacagctctgttagtgtggaggagccagattattcaatatatacaagggcaagatacatgaaggaatattctgaaacagtaattctaaactgcagcgatgttgttttcataccagaaggctggtatcaccaagttgacagtgacgacttaacaatagcagttaacttttggtggaagtcaagaataatgactcaaatgttagaacatatggatgcctactatctacgccgaattatgagcagattggtggaccaggagatgagcataatggcgcagaagagtccttttggtcatttgaaagattgcacggatattcagcatatggccaaaacattgacaggtttccagctattcaatttgcaaaaagattcaccactacgaactctggaaccctccactctgcaagcactctatgaactcatctcactggtccatgatggtgctgaagcggttagccaaatggacaaaatagaagccacatcccagaataaatcctccaaccaaagagatgacacagatacgagtgctgctgcagacgattcatccctcttggacaaagatcctgttgcaaaaatcattttgccagttgaaccacttgaattgcggactatgctgcttgcaatggtgcatactttcccaaggacgttagaaaatttgattctcaacatgcttggggtaggagcagagatactgactaggaagtttgatgagatggatcaacaaacaacaaaagaagaacagtctgagttctacaagatattctatagcgtgtttgacgaccagtacgctgcaatggatgcgcttctgaacgggaaggaattgttttcttttcagatattccagaatgtcctggacaagtatctcggggtgcatgttgaccgacccagcagatttgttactcgtacaaaccaatgaaatggagcgcctctaccctctagtatacaaaacctgaatcggcttgttgagccaagccaatgaagaacgtattatgctgattactgatgtttgagcgtctcgatagataatgtgtttttattggcttgcaaccatattttagggattttttttggacgaaggcggcagtaactgagagcggtgcgcatatgtgagatgcgtgactgctcttgaatgcgatgattacaaacgaaaattaccgttacgcctcgtttggattcatggaatcgaatttcattctaataatattaattctaacgatattaatttaggcatatataaggaag

SEQ ID NO: 78379 - DNA, 1967 bp, Zea Mays
ctctctctacacacaagaatgaaaggcatctccccccccaacaaaaaaaaggatgtgaggcagctgaagataatgttgacatcataagtttgtccattactcctaatcggaggccacctggactcgcaacattcttcaatccaatagatatggcactcttgtcagctgttaaagctggcatatttgtggtgcaagctgcaggaaatactggcccttcccctaagagtatgtcttcatatagtccttggatatttactgttggagcttctgcccatgacagggtatacaacaactacattgtacttggcaacaatttgaccattcaaggagttggtcttgcccctggaacggatgatgattgcatgtatactttagttgctgcgccgcatgcactgaagaacaatacagtcagtcctactgaattgtcctttggggaatgccaagattcgagtcgcctagatgcagatttgataagaggaaagatactagtgtgcagctattctataagatttgtgcttggtctttcttctgtgaaacaagctctagatacagcaaataatgtcagcgccgcaggagttatattctatttagacccatttgttcttgggttccagctgaacccaactccaatgcgcatgcctggacttataataccatcatctgatgactctaaggtatttctcgcttactacaatgactccctagtgagagatgagacatcaggccaagttgttagctttggcggagttgctaaaatattaggggggctaaatccagattatggaaattctgcaccaaaagtaatgttctattctgctaggggtcctgaccctgaggacaatacactgtcaaatgctgatatcttgaaacccaatctagtagcacccggaaattcgatttggggtgcttggagttcacttggattggattctgctgaattttctggtgaaagtttcgcgatgctctctggcacaagtatggctgcaccccatgttgctggcctggctgctctaatcaagcagaagtttccttcttttagcccagcagctatagcttctgcattgtctacaaccacaactcttagtgacaggcaagggaaaccaatcatggcgcagcgaacatacagcaacccagactcgacgcaatctccagcgacagcttttgatatggggaatggttttgtaaacgctaccgctgctttagacccggggctcgtatttgattgcagttatgatgatttcttctcctttctttgcggcataaacgggtctagcccagtcgtgacaaactacactggcaacagctgcgtggcctccgccatgacaggagcagatctaaacctaccatcaatcaccatagccgtgctcaaccagacaagaagcataacgagaacggtgaccaacgtggcggccgacgagagctacaccgtcagttacagcgctccctatggaactgcaatctccgtggtaccgatgcattttcttattccaagcgggcagaagcagcttgtgaccttcgttgtgaacgccaccatgaacagctccagcgcaagctttgggaacgtcggtttctatggtgacaagggccacagggcgatcatcccattctctgtgatctccaaggctgtgtacagttcctgacgactgatgagccgagctgatgcagtggatgcaaatgcaatgcagaccagggcctgactgatccagccagcgtatgcagtggtgacttaactgcatggagccatggaggtggagcttacctttgactaggatttttttgttgttggttgtggtgtgtacactctgaagcatgttgatgtaagtagctgagtgattaaccagtaactgtaaaaagaatgtactaccagaatgttgccatgaatgggaaaaccttctgccaccagaatgttaaacagcactctgcttgatttaccgatgtgaatgtgatgtttgtgtgatagcatcgtg

SEQ ID NO: 78380 - DNA, 2365 bp, Zea Mays
ctccccctcgccattaatttgctgcctgccatcccggtagcgcttcgctgcgcagcctgcgcctgaagacagggttcacccaaacctatgaattatggctcttatattgtccacctccaaaattcattattgaagaggactctaaggggagagcgttatataaagctgtacagctaccgctacttgattaatggttttgctgttgtcatcactcctctacaggcagataagctatctaggagaaaagaagtagcaaatgtgatgctggattactcagttaggacagcaacaactcatacccctgaattccttggactgccgcaaggagcctgggtgcaagaaggtggtccgcaattcgcgggtcagggtgtcgtcattggcctcatcgacacaggaatagatccaacccaccctagctttgcagatgatctatcaactgatagttatccagtacctgctcactactctggcatttgtgaggttacaaatgatttcccatctggatcctgcaatagaaagctcgtgggggctcggcattttgcagcatctgcaataactagaggagtcttcaatgcgtctcaagatcttgcttcaccatctgatagtgatggccatgggacgcatacggcatccattgctgctggaaatcacggaattcctgttgctgtgtctgggcatcaatttggaaatgcaagtggcatggctcctcgtgcacacattgctgtctataaagctctttataaaagctttggtggttttgctgctgatgtagtagctgcaatagatcaggcagctgaagataatgttgacatcataagtttgtccattactcctaatcggaggccacctggactcgcaacattcttcaatccaatagatatggcactcttgtcagctgttaaagctggcatatttgtggtgcaagctgcaggaaatactggcccttcccctaagagtatgtcttcatatagtccttggatatttactgttggagcttctgcccatgacagggtatacaacaactacattgtacttggcaacaatttgaccattcaaggagttggtcttgcccgtatttctcgcttactacaatgactccctagtgagagatgagacatcaggccaagttgttagctttggcggagttgctaaaatattaggggggctaaatccagattatggaaattctgcaccaaaagtaatgttctattctgctaggggtcctgaccctgaggacaatacactgtcaaatgctgatatcttgaaacccaatctagtagcacccggaaattcgatttggggtgcttggagttcacttggattggattctgctgaattttctggtgaaagtttcgcgatgctctctggcacaagtatggctgcaccccatgttgctggcctggctgctctaatcaagcagaagtttccttcttttagcccagcagctatagcttctgcattgtctacaaccacaactcttagtgacaggcaagggaaaccaatcatggcgcagcgaacatacagcaacccagactcgacgcaatctccagcgacagcttttgatatggggaatggttttgtaaacgctaccgctgctttagacccggggctcgtatttgattgcagttatgatgatttcttctcctttctttgcggcataaacgggtctagcccagtcgtgacaaactacactggcaacagctgcgtggcctccgccatgacaggagcagatctaaacctaccatcaatcaccatagccgtgctcaaccagacaagaagcataacgagaacggtgaccaacgtggcggccgacgagagctacaccgtcagttacagcgctccctatggaactgcaatctccgtggtaccgatgcattttcttattccaagcgggcagaagcagcttgtgaccttcgttgtgaacgccaccatgaacagctccagcgcaagctttgggaacgtcggtttctatggtgacaagggccacagggcgatcatcccattctctgtgatctccaaggctgtgtacagttcctgacgactgatgagccgagctgatgcagtggatgcaaatgcaatgcagaccagggcctgactgatccagccagcgtatgcagtggtgacttaactgcatggagccatggaggtggagcttacctttgactaggatttttttgttgttggttgtggtgtgtacactctgaagcatgttgatgtaagtagctgagtgattaaccagtaactgtaaaaagaatgtactaccagaatgttgccatgaatgggaaaaccttctgccaccagaatgttaaacagcactctgcttgatttaccgatgtgaatgtgatgtttgtgtgatagcatcgtg

SEQ ID NO: 78381 - DNA, 2802 bp, Zea Mays
ctttctcctctagcctcgcaaagtcgcactctactgggcgctctcgcttcctccttgagcggcgcagccgcgggcgcgtagtgcacatctctctctctcccccctctccccctcgccattaatttgctgcctgccatcccggtagcgcttcgctgcgcagcctgcgcctgaagacagggttcacccaaacctatgaattatggctcttatattgtccacctccaaaattcattattgaagaggactctaaggggagagcgttatataaagctgtacagctaccgctacttgattaatggttttgctgttgtcatcactcctctacaggcagataagctatctaggagaaaagaagtagcaaatgtgatgctggattactcagttaggacagcaacaactcatacccctgaattccttggactgccgcaaggagcctgggtgcaagaaggtggtccgcaattcgcgggtcagggtgtcgtcattggcctcatcgacacaggaatagatccaacccaccctagctttgcagatgatctatcaactgatagttatccagtacctgctcactactctggcatttgtgaggttacaaatgatttcccatctggatcctgcaatagaaagctcgtgggggctcggcattttgcagcatctgcaataactagaggagtcttcaatgcgtctcaagatcttgcttcaccatctgatagtgatggccatgggacgcatacggcatccattgctgctggaaatcacggaattcctgttgctgtgtctgggcatcaatttggaaatgcaagtggcatggctcctcgtgcacacattgctgtctataaagctctttataaaagctttggtggttttgctgctgatgtagtagctgcaatagatcaggcagctgaagataatgttgacatcataagtttgtccattactcctaatcggaggccacctggactcgcaacattcttcaatccaatagatatggcactcttgtcagctgttaaagctggcatatttgtggtgcaagctgcaggaaatactggcccttcccctaagagtatgtcttcatatagtccttggatatttactgttggagcttctgcccatgacagggtatacaacaactacattgtacttggcaacaatttgaccattcaaggagttggtcttgcccctggaacggatgatgattgcatgtatactttagttgctgcgccgcatgcactgaagaacaatacagtcagtcctactgaattgtcctttggggaatgccaagattcgagtcgcctagatgcagatttgataagaggaaagatactagtgtgcagctattctataagatttgtgcttggtctttcttctgtgaaacaagctctagatacagcaaataatgtcagcgccgcaggagttatattctatttagacccatttgttcttgggttccagctgaacccaactccaatgcgcatgcctggacttataataccatcatctgatgactctaaggtatttctcgcttactacaatgactccctagtgagagatgagacatcaggccaagttgttagctttggcggagttgctaaaatattaggggggctaaatccagattatggaaattctgcaccaaaagtaatgttctattctgctaggggtcctgaccctgaggacaatacactgtcaaatgctgatatcttgaaacccaatctagtagcacccggaaattcgatttggggtgcttggagttcacttggattggattctgctgaattttctggtgaaagtttcgcgatgctctctggcacaagtatggctgcaccccatgttgctggcctggctgctctaatcaagcagaagtttccttcttttagcccagcagctatagcttctgcattgtctacaaccacaactcttagtgacaggcaagggaaaccaatcatggcgcagcgaacatacagcaacccagactcgacgcaatctccagcgacagcttttgatatggggaatggttttgtaaacgctaccgctgctttagacccggggctcgtatttgattgcagttatgatgatttcttctcctttctttgcggcataaacgggtctagcccagtcgtgacaaactacactggcaacagctgcgtggcctccgccatgacaggagcagatctaaacctaccatcaatcaccatagccgtgctcaaccagacaagaagcataacgagaacggtgaccaacgtggcggccgacgagagctacaccgtcagttacagcgctccctatggaactgcaatctccgtggtaccgatgcattttcttattccaagcgggcagaagcagcttgtgaccttcgttgtgaacgccaccatgaacagctccagcgcaagctttgggaacgtcggtttctatggtgacaagggccacagggcgatcatcccattctctgtgatctccaaggctgtgtacagttcctgacgactgatgagccgagctgatgcagtggatgcaaatgcaatgcagaccagggcctgactgatccagccagcgtatgcagtggtgacttaactgcatggagccatggaggtggagcttacctttgactaggatttttttgttgttggttgtggtgtgtacactctgaagcatgttgatgtaagtagctgagtgattaaccagtaactgtaaaaagaatgtactaccagaatgttgccatgaatgggaaaaccttctgccaccagaatgttaaacagcactctgcttgatttaccgatgtgaatgtgatgtttgtgtgatagcatcgtg

SEQ ID NO: 78382 - DNA, 3361 bp, Zea Mays
cacaacacaacactggccgcaaactgcagtgcgagcagccgagctgagtgaagaggggtttggacgtttggtagacacggagggttttgctgggggaggagcattgcaagtaggactgtaggagtatttctccgctctcttcctgcttgatccatccctttctcctctagcctcgcaaagtcgcactctactgggcgctctcgcttcctccttgagcggcgcagccgcgggcgcgtagtgcacatctctctctctcccccctctccccctcgccattaatttgctgcctgccatcccggtagcgcttcgctgcgcagcctgcgcctgaaggttcgatctttcactcccatgggcggtggacgcaactagtctttctttcttggtgtttcttggcgcctcgtgggaggtgagcgccgaggagcttcgagggaatgagggtgacgcggagggatgagcaccgggccgccgccgccgcgttcctgtacgcggtgacggttcttggggtgttggcgggcagcgccggcgtccgcgctttcgatgatggcacagcggtgtacattgtcaccatgaagcaggcgccggttttccacaggcgccttaacttggagaagttcgggagcagcagggttgctaatgctgccggccgcggcggcggcgggggaggaggaggaggaggaggaggaggaggaggaggagcaggagacaccccgaccaccagcgtcctcaggaagccgagacagggttcacccaaacctatgaattatggctcttatattgtccacctccaaaattcattattgaagaggactctaaggggagagcgttatataaagctgtacagctaccgctacttgattaatggttttgctgttgtcatcactcctctacagataagctatctaggagaaaagaagtagcaaatgtgatgctggattactcagttaggacagcaacaactcatacccctgaattccttggactgccgcaaggagcctgggtgcaagaaggtggtccgcaattcgcgggtcagggtgtcgtcattggcctcatcgacacaggaatagatccaacccaccctagctttgcagatgatctatcaactgatagttatccagtacctgctcactactctggcatttgtgaggttacaaatgatttcccatctggatcctgcaatagaaagctcgtgggggctcggcattttgcagcatctgcaataactagaggagtcttcaatgcgtctcaagatcttgcttcaccatctgatagtgatggccatgggacgcatacggcatccattgctgctggaaatcacggaattcctgttgctgtgtctgggcatcaatttggaaatgcaagtggcatggctcctcgtgcacacattgctgtctataaagctctttataaaagctttggtggttttgctgctgatgtagtagctgcaatagatcaggcagctgaagataatgttgacatcataagtttgtccattactcctaatcggaggccacctggactcgcaacattcttcaatccaatagatatggcactcttgtcagctgttaaagctggcatatttgtggtgcaagctgcaggaaatactggcccttcccctaagagtatgtcttcatatagtccttggatatttactgttggagcttctgcccatgacagggtatacaacaactacattgtacttggcaacaatttgaccattcaaggagttggtcttgcccctggaacggatgatgattgcatgtatactttagttgctgcgccgcatgcactgaagaacaatacagtcagtcctactgaattgtcctttggggaatgccaagattcgagtcgcctagatgcagatttgataagaggaaagatactagtgtgcagctattctataagatttgtgcttggtctttcttctgtgaaacaagctctagatacagcaaataatgtcagcgccgcaggagttatattctatttagacccatttgttcttgggttccagctgaacccaactccaatgcgcatgcctggacttataataccatcatctgatgactctaaggtatttctcgcttactacaatgactccctagtgagagatgagacatcaggccaagttgttagctttggcggagttgctaaaatattaggggggctaaatccagattatggaaattctgcaccaaaagtaatgttctattctgctaggggtcctgaccctgaggacaatacactgtcaaatgctgatatcttgaaacccaatctagtagcacccggaaattcgatttggggtgcttggagttcacttggattggattctgctgaattttctggtgaaagtttcgcgatgctctctggcacaagtatggctgcaccccatgttgctggcctggctgctctaatcaagcagaagtttccttcttttagcccagcagctatagcttctgcattgtctacaaccacaactcttagtgacaggcaagggaaaccaatcatggcgcagcgaacatacagcaacccagactcgacgcaatctccagcgacagcttttgatatggggaatggttttgtaaacgctaccgctgctttagacccggggctcgtatttgattgcagttatgatgatttcttctcctttctttgcggcataaacgggtctagcccagtcgtgacaaactacactggcaacagctgcgtggcctccgccatgacaggagcagatctaaacctaccatcaatcaccatagccgtgctcaaccagacaagaagcataacgagaacggtgaccaacgtggcggccgacgagagctacaccgtcagttacagcgctccctatggaactgcaatctccgtggtaccgatgcattttcttattccaagcgggcagaagcagcttgtgaccttcgttgtgaacgccaccatgaacagctccagcgcaagctttgggaacgtcggtttctatggtgacaagggccacagggcgatcatcccattctctgtgatctccaaggctgtgtacagttcctgacgactgatgagccgagctgatgcagtggatgcaaatgcaatgcagaccagggcctgactgatccagccagcgtatgcagtggtgacttaactgcatggagccatggaggtggagcttacctttgactaggatttttttgttgttggttgtggtgtgtacactctgaagcatgttgatgtaagtagctgagtgattaaccagtaactgtaaaaagaatgtactaccagaatgttgccatgaatgggaaaaccttctgccaccagaatgttaaacagcactctgcttgatttaccgatgtgaatgtgatgtttgtgtgatagcatcgtg

SEQ ID NO: 78383 - DNA, 3365 bp, Zea Mays
cacaacacaacactggccgcaaactgcagtgcgagcagccgagctgagtgaagaggggtttggacgtttggtagacacggagggttttgctgggggaggagcattgcaagtaggactgtaggagtatttctccgctctcttcctgcttgatccatccctttctcctctagcctcgcaaagtcgcactctactgggcgctctcgcttcctccttgagcggcgcagccgcgggcgcgtagtgcacatctctctctctcccccctctccccctcgccattaatttgctgcctgccatcccggtagcgcttcgctgcgcagcctgcgcctgaaggttcgatctttcactcccatgggcggtggacgcaactagtctttctttcttggtgtttcttggcgcctcgtgggaggtgagcgccgaggagcttcgagggaatgagggtgacgcggagggatgagcaccgggccgccgccgccgcgttcctgtacgcggtgacggttcttggggtgttggcgggcagcgccggcgtccgcgctttcgatgatggcacagcggtgtacattgtcaccatgaagcaggcgccggttttccacaggcgccttaacttggagaagttcgggagcagcagggttgctaatgctgccggccgcggcggcggcgggggaggaggaggaggaggaggaggaggaggaggaggagcaggagacaccccgaccaccagcgtcctcaggaagccgagacagggttcacccaaacctatgaattatggctcttatattgtccacctccaaaattcattattgaagaggactctaaggggagagcgttatataaagctgtacagctaccgctacttgattaatggttttgctgttgtcatcactcctctacaggcagataagctatctaggagaaaagaagtagcaaatgtgatgctggattactcagttaggacagcaacaactcatacccctgaattccttggactgccgcaaggagcctgggtgcaagaaggtggtccgcaattcgcgggtcagggtgtcgtcattggcctcatcgacacaggaatagatccaacccaccctagctttgcagatgatctatcaactgatagttatccagtacctgctcactactctggcatttgtgaggttacaaatgatttcccatctggatcctgcaatagaaagctcgtgggggctcggcattttgcagcatctgcaataactagaggagtcttcaatgcgtctcaagatcttgcttcaccatctgatagtgatggccatgggacgcatacggcatccattgctgctggaaatcacggaattcctgttgctgtgtctgggcatcaatttggaaatgcaagtggcatggctcctcgtgcacacattgctgtctataaagctctttataaaagctttggtggttttgctgctgatgtagtagctgcaatagatcaggcagctgaagataatgttgacatcataagtttgtccattactcctaatcggaggccacctggactcgcaacattcttcaatccaatagatatggcactcttgtcagctgttaaagctggcatatttgtggtgcaagctgcaggaaatactggcccttcccctaagagtatgtcttcatatagtccttggatatttactgttggagcttctgcccatgacagggtatacaacaactacattgtacttggcaacaatttgaccattcaaggagttggtcttgcccctggaacggatgatgattgcatgtatactttagttgctgcgccgcatgcactgaagaacaatacagtcagtcctactgaattgtcctttggggaatgccaagattcgagtcgcctagatgcagatttgataagaggaaagatactagtgtgcagctattctataagatttgtgcttggtctttcttctgtgaaacaagctctagatacagcaaataatgtcagcgccgcaggagttatattctatttagacccatttgttcttgggttccagctgaacccaactccaatgcgcatgcctggacttataataccatcatctgatgactctaaggtatttctcgcttactacaatgactccctagtgagagatgagacatcaggccaagttgttagctttggcggagttgctaaaatattaggggggctaaatccagattatggaaattctgcaccaaaagtaatgttctattctgctaggggtcctgaccctgaggacaatacactgtcaaatgctgatatcttgaaacccaatctagtagcacccggaaattcgatttggggtgcttggagttcacttggattggattctgctgaattttctggtgaaagtttcgcgatgctctctggcacaagtatggctgcaccccatgttgctggcctggctgctctaatcaagcagaagtttccttcttttagcccagcagctatagcttctgcattgtctacaaccacaactcttagtgacaggcaagggaaaccaatcatggcgcagcgaacatacagcaacccagactcgacgcaatctccagcgacagcttttgatatggggaatggttttgtaaacgctaccgctgctttagacccggggctcgtatttgattgcagttatgatgatttcttctcctttctttgcggcataaacgggtctagcccagtcgtgacaaactacactggcaacagctgcgtggcctccgccatgacaggagcagatctaaacctaccatcaatcaccatagccgtgctcaaccagacaagaagcataacgagaacggtgaccaacgtggcggccgacgagagctacaccgtcagttacagcgctccctatggaactgcaatctccgtggtaccgatgcattttcttattccaagcgggcagaagcagcttgtgaccttcgttgtgaacgccaccatgaacagctccagcgcaagctttgggaacgtcggtttctatggtgacaagggccacagggcgatcatcccattctctgtgatctccaaggctgtgtacagttcctgacgactgatgagccgagctgatgcagtggatgcaaatgcaatgcagaccagggcctgactgatccagccagcgtatgcagtggtgacttaactgcatggagccatggaggtggagcttacctttgactaggatttttttgttgttggttgtggtgtgtacactctgaagcatgttgatgtaagtagctgagtgattaaccagtaactgtaaaaagaatgtactaccagaatgttgccatgaatgggaaaaccttctgccaccagaatgttaaacagcactctgcttgatttaccgatgtgaatgtgatgtttgtgtgatagcatcgtg

SEQ ID NO: 78384 - DNA, 1368 bp, Zea Mays
cacaacacaacactggccgcaaactgcagtgcgagcagccgagctgagtgaagaggggtttggacgtttggtagacacggagggttttgctgggggaggagcattgcaagtaggactgtaggagtatttctccgctctcttcctgcttgatccatccctttctcctctagcctcgcaaagtcgcactctactgggcgctctcgcttcctccttgagcggcgcagccgcgggcgcgtagtgcacatctctctctctcccccctctccccctcgccattaatttgctgcctgccatcccggtagcgcttcgctgcgcagcctgcgcctgaaggttcgatctttcactcccatgggcggtggacgcaactagtctttctttcttggtgtttcttggcgcctcgtgggaggtgagcgccgaggagcttcgagggaatgagggtgacgcggagggatgagcaccgggccgccgccgccgcgttcctgtacgcggtgacggttcttggggtgttggcgggcagcgccggcgtccgcgctttcgatgatggcacagcggtgtacattgtcaccatgaagcaggcgccggttttccacaggcgccttaacttggagaagttcgggagcagcagggttgctaatgctgccggccgcggcggcggcgggggaggaggaggaggaggaggaggaggaggaggaggagcaggagacaccccgaccaccagcgtcctcaggaagccgagacagggttcacccaaacctatgaattatggctcttatattgtccacctccaaaattcattattgaagaggactctaaggggagagcgttatataaagctgtacagctaccgctacttgattaatggttttgctgttgtcatcactcctctacaggcagataagctatctaggagaaaagaagtagcaaatgtgatgctggattactcagttaggacagcaacaactcatacccctgaattccttggactgccgcaaggagcctgggtgcaagaaggtggtccgcaattcgcgggtcagggtgtcgtcattggcctcatcgacacaggaatagatccaacccaccctagctttgcagatgatctatcaactgatagttatccagtacctgctcactactctggcatttgtgaggttacaaatgatttcccatctggatcctgcaatagaaagctcgtgggggctcggcattttgcagcatctgcaataactagaggagtcttcaatgcgtctcaagatcttgcttcaccatctgatagtgatggccatgggacgtcagctattgctgcatatgcgagcactcccttggatgcatttttagttctaattaaaaccaaatgcgttgaaaaagaaa

SEQ ID NO: 78385 - DNA, 975 bp, Zea Mays
cttcctgcctggttgatcatctgcagattagaaactagtagattatgtcgtgctaaccagtgtcgatagagatgacttacctgatggtggaagtagccattttgctcaaacagtgaaagctttaaaggagctcaaacctggaatactggtggagtgcttaacctcagattttcgaggtgacctggaggccatctcatctttggctaactctggcctagatgtttatgcgcacaacattgaaactgtgaggagtctgcagaggattgtgagggatccccgggcagggtatgatcagagcttggcagttctcaagcatgcaaaagcttgcagggagggcatggttacaaagtcttctatcatgcttggtcttggagagactgatgaagaggtgaaacaagccatgatggatctgcgggcaatcggtgttgacatccttactttgggccagtacttgcagccaacagaaagacatctaacagtaagagagtatgtgactcctgaaaagttccagttttggaaggagtatggggaatcggtcggtttccgatatgttgctagcggacccttggttcggtcatcctaccgtgcaggagagctctttgtccaaaatctggtcagaaacaacaaaactgggtcttcctcatcttagagcacattgtatccgtagtacgttgagagcagcaaaacaagagtagaacagcataaacatctggatcctccgaaagctgagacacagctctttttttccttttcttttcggatagtatgcacagatttgctctctgctgttagttgcccctgttgaatagagaaagaaaaagaggacgccggttcttttctgtatacacgaaaagctgttcaagtatagtggcctgtatgtttttggtcttctggatgattacacattgctttgttcaccatttcttttgatggaaagagagagagagagaaagaaagaaagcgaggaaagctgtc

SEQ ID NO: 78386 - DNA, 1549 bp, Zea Mays
ggaaatgtttgagttgttccttgttgatcatgttctgccggtcttcctttcatcagattccccaacattccttgcggaatgtggagctgtttgccttaggcaactgtgcgatttccagcttagatcacttatcaaagaaatgttagttcgtgagctacgagcacccgcacccgctgacccacgtcgattttgacccaattcatcgcaacgacttcggtaggcagaggtaggcgaggcgaagaaagaccaaccttggtatcatcgccggcctaatatcgaccccctgttctactacacaaggggtgaaacgggaacgcttacccgtcctccccgcctggaacccatcgcctccactgtgcccgacgccgcgcccgattccaccgctcaacaccgtctgcgtcgaggcacagtgccccaacatcggcgagtgttggaacggaggtggaggggccggcggcgaaggggacggcatcgccacggccaccatcatggtgcttggtgacacctgcacgcgcgggtgtcgattctgcgctgtgaagaccagcaacaagccaccgccgccggatcccctggagcctctaaacacggctttggctgttgcaagctggggagtagattatgtcgtgctaaccagtgtcgatagagatgacttacctgatggtggaagtagccattttgctcaaacagtgaaagctttaaaggagctcaaacctggaatactggtggagtgcttaacctcagattttcgaggtgacctggaggccatctcatctttggctaactctggcctagatgtttatgcgcacaacattgaaactgtgaggagtctgcagaggattgtgagggatccccgggcagggtatgatcagagcttggcagttctcaagcatgcaaaagcttgcagggagggcatggttacaaagtcttctatcatgcttggtcttggagagactgatgaagaggtgaaacaagccatgatggatctgcgggcaatcggtgttgacatccttactttgggccagtacttgcagccaacagaaagacatctaacagtaagagagtatgtgactcctgaaaagttccagttttggaaggagtatggggaatcggtcggtttccgatatgttgctagcggacccttggttcggtcatcctaccgtgcaggagagctctttgtccaaaatctggtcagaaacaacaaaactgggtcttcctcatcttagagcacattgtatccgtagtacgttgagagcagcaaaacaagagtagaacagcataaacatctggatcctccgaaagctgagacacagctctttttttccttttcttttcggatagtatgcacagatttgctctctgctgttagttgcccctgttgaatagagaaagaaaaagaggacgccggttcttttctgtatacacgaaaagctgttcaagtatagtggcctgtatgtttttggtcttctggatgattacacattgctttgttcaccatttcttttgatggaaagagagagagagagaaagaaagaaagcgaggaaagctgtc

SEQ ID NO: 78387 - DNA, 1909 bp, Zea Mays
gccgaagacctagtctaatctccgtacctatagaccagcagatatacgcagcagacatactgttattgagctactcttgagtcttgggctcttggccgctagtcttggtggaaatgtttgagttgttccttgttgatcatgttctgccggtcttcctttcatcagattccccaacattccttgcggaatgtggagctgtttgccttaggcaactgtgcgatttccagcttagatcacttatcaaagaaatgttagttcgtgagctacgagcacccgcacccgctgacccacgtcgattttgacccaattcatcgcaacgacttcggtaggcagaggtaggcgaggcgaagaaagaccaaccttggtatcatcgccggcctaatatcgaccccctgttctactacacaaggggtgaaacgggaacgcttacccgtcctccccgcctggaacccatcgcctccactgtgcccgacgccgcgcccgattccaccggccgacaacgatgcagagctccctcgcgcggccgctgcggcctccggtactggccggacgcggcggtagacggggcctggtagccgtggcacggtgccacgctgaggcggcgccaccggtggggacggcgtctagggcgcccgcggggccgtacaccgggagggatccggaggtgaagaagcccgcttggctgcggcagcgcgctgcgcagggcgagaagtacgctcgcctgcgggagtccatcggcgagctcaagctcaacaccgtctgcgtcgaggcacagtgccccaacatcggcgagtgttggaacggaggtggaggggccggcggcgaaggggacggcatcgccacggccaccatcatggtgcttggtgacacctgcacgcgcgggtgtcgattctgcgctgtgaagaccagcaacaagccaccgccgccggatcccctggagcctctaaacacggctttggctgttgcaagctggggattatgtcgtgctaaccagtgtcgatagagatgacttacctgatggtggaagtagccattttgctcaaacagtgaaagctttaaaggagctcaaacctggaatactggtggagtgcttaacctcagattttcgaggtgacctggaggccatctcatctttggctaactctggcctagatgtttatgcgcacaacattgaaactgtgaggagtctgcagaggattgtgagggatccccgggcagggtatgatcagagcttggcagttctcaagcatgcaaaagcttgcagggagggcatggttacaaagtcttctatcatgcttggtcttggagagactgatgaagaggtgaaacaagccatgatggatctgcgggcaatcggtgttgacatccttactttgggccagtacttgcagccaacagaaagacatctaacagtaagagagtatgtgactcctgaaaagttccagttttggaaggagtatggggaatcggtcggtttccgatatgttgctagcggacccttggttcggtcatcctaccgtgcaggagagctctttgtccaaaatctggtcagaaacaacaaaactgggtcttcctcatcttagagcacattgtatccgtagtacgttgagagcagcaaaacaagagtagaacagcataaacatctggatcctccgaaagctgagacacagctctttttttccttttcttttcggatagtatgcacagatttgctctctgctgttagttgcccctgttgaatagagaaagaaaaagaggacgccggttcttttctgtatacacgaaaagctgttcaagtatagtggcctgtatgtttttggtcttctggatgattacacattgctttgttcaccatttcttttgatggaaagagagagagagagaaagaaagaaagcgaggaaagctgtc

SEQ ID NO: 78388 - DNA, 2339 bp, Zea Mays
cactcgtccccttcctccccttccgtctcgcaacaggcgaggcgagagaactcgtcgtcgaagcgaaatatagccagcgcaccaatcccaattcccaacccgacgcaacgcaacgcaacgcacctcatcccggttgcttgcgccaacgtaggggatcgcccggccccgccccgctccgcttcgcgcccctccttcctgcctgccgtaaccgcgccgtgcaactgtgcaagggggacatcacagattctttggtatcttcctggaaatttccatcaattgttttctcctcaaccattgctggtcatgttgtttgtagtgattgtctgtcaggtgaaacatgttgtgtttggtgatgttcttactagcattcaaatgactcaagatacattagttatttgtcagttgttttgtatctgatggaccaatatatgctcaggattcatatttgggcacttgaggtgaaaaccatcttattcgattttgttgaactgtgataccactcattcttaatgaaatggatcatttccctttgccagtatcttgttgctttatttgcacccttgactatagttagtatagtttcagtattcgaggtgttgtcctatttgcaatatcaaacaggaagcataagataagagaaaagtgtatgtggcttcattgttagatttaaaatattgatactgtctaagtgattgtcaagctaggttgtcatatccatatggttcctcattacacatttaattgtgggatctgtatggtttcacagacgcatttataacattcattgtgcgtttcatggatcattatttaattgttgtatattaatgctccatttcttagggcatttctgcattcatgtgggcaagctggatgattcaaagttgttgatatgtggtggtagccatttattgtgcttatatgccctatggttgaatggtgtgcttcatttatctgacttgtctctttcactaggttcagtaggttgttgagtctagataccagatgatggacctgtccacgacttcagtgctggcagctaaagcttacaaatacaaagcagaatcacttgttaaggagtaccttcttgcagattcgtatgtttcatacactgctgtacttggtgggatcctgatgtgcaagatggcttatgacataacaagcataatcagctcattgtactacaagggttatggttcacttacaaaaacccaaaagcttgagtggaacaacaggggcatgtccactatccatgcgatattcatcacagtggtgtcagtgtacctggttttcttctccaacctattctctgatgagctggatggactagtaacttatcggagttcaaatctatccaatttcactttgggggtttctgttgggtatttcatcactgaccttgctatgatattatgggcttatccttctcttggtggaatggagtccttcaccatatgctgtcgcttatttctatagtctatgctatgtattctggggaaggacagttgtacacatacatggttctcatctctgaaacaaccacacctggaatcaacctccgatggttccttgataccgctggactgaaaaaatccaaggcctatcttgtcaatggtgttacgatgtttattgcatggctggtggcacggatcattttgttcgtctacttgttttaccacatttacttccactatgatcaggtcaagcagatgcatacgtttagctgcattctgatatttgctgtgcctacaatactgctcgtcatgaacacaatgtggtttgccaagatcttgagaggccttaaaaagacgctagccaagaggcagtgaaaagaagaatggtaaaacaagctcaaggacatcgatagccaaaatccatcccctcgtacagtcactttacagttacatgcacttcccgagtaaagccgtcagtgcagctcgtagcacaagctaaagcccttgcacatgatcctgaaatacgctaaacacagctcatttttttccctggatgctctgccttgtacatacggccgtctgtattgggtgcttacaccttgagggatcgtttggtgaccaggaaaatagatgggaaagaaatccctttgttacggcctcgttcgtttcaactggtttggctttggcccgtttccggcctcattccgggtggaaatggaatttggttgtttctctatgagctgttcgatggctgagtctgacgattgcgctgttgcgtttgtcttttctatttcttccgatcttaaatatacgaggatgtttactttttttttaaaaaaaaactttgatcactcgtcttattcaaaatatttattcaaaaatgcaaac

SEQ ID NO: 78389 - DNA, 1829 bp, Zea Mays
cactcgtccccttcctccccttccgtctcgcaacaggcgaggcgagagaactcgtcgtcgaagcgaaatatagccagcgcaccaatcccaattcccaacccgacgcaacgcaacgcaacgcacctcatcccggttgcttgcgccaacgtaggggatcgcccggccccgccccgctccgcttcgcgcccctccttcctgcctgccgtaaccgcgccgtgcaactgtgcaagggggacatcacagattctttggtatcttcctggaaatttccatcaattgttttctcctcaaccattgctggtcatgttgtttgtagtgattgtctgtcaggtgaaacatgttgtgtttggtgatgttcttactagcattcaaatgactcaagatacattagttatttgtcagttgttttgtatctgatggaccaatatatgctcaggattcatatttgggcacttgaggttcagtaggttgttgagtctagataccagatgatggacctgtccacgacttcagtgctggcagctaaagcttacaaatacaaagcagaatcacttgttaaggagtaccttcttgcagattcgtatgtttcatacactgctgtacttggtgggatcctgatgtgcaagatggcttatgacataacaagcataatcagctcattgtactacaagggttatggttcacttacaaaaacccaaaagcttgagtggaacaacaggggcatgtccactatccatgcgatattcatcacagtggtgtcagtgtacctggttttcttctccaacctattctctgatgagctggatggactagtaacttatcggagttcaaatctatccaatttcactttgggggtttctgttgggtatttcatcactgaccttgctatgatattatgggcttatccttctcttggtggaatggagtatgtccttcaccatatgctgtcgcttatttctatagtctatgctatgtattctggggaaggacagttgtacacatacatggttctcatctctgaaacaaccacacctggaatcaacctccgatggttccttgataccgctggactgaaaaaatccaaggcctatcttgtcaatggtgttacgatgtttattgcatggctggtggcacggatcattttgttcgtctacttgttttaccacatttacttccactatgatcaggtcaagcagatgcatacgtttagctgcattctgatatttgctgtgcctacaatactgctcgtcatgaacacaatgtggtttgccaagatcttgagaggccttaaaaagacgctagccaagaggcagtgaaaagaagaatggtaaaacaagctcaaggacatcgatagccaaaatccatcccctcgtacagtcactttacagttacatgcacttcccgagtaaagccgtcagtgcagctcgtagcacaagctaaagcccttgcacatgatcctgaaatacgctaaacacagctcatttttttccctggatgctctgccttgtacatacggccgtctgtattgggtgcttacaccttgagggatcgtttggtgaccaggaaaatagatgggaaagaaatccctttgttacggcctcgttcgtttcaactggtttggctttggcccgtttccggcctcattccgggtggaaatggaatttggttgtttctctatgagctgttcgatggctgagtctgacgattgcgctgttgcgtttgtcttttctatttcttccgatcttaaatatacgaggatgtttactttttttttaaaaaaaaactttgatcactcgtcttattcaaaatatttattcaaaaatgcaaac

SEQ ID NO: 78390 - DNA, 1603 bp, Zea Mays
ctccattccactcgtccccttcctccccttccgtctcgcaacaggcgaggcgagagaactcgtcgtcgaagcgaaatatagccagcgcaccaatcccaattcccaacccgacgcaacgcaacgcaacgcacctcatcccggttgcttgcgccaacgtaggggatcgcccggccccgccccgctccgcttcgcgcccctccttcctgcctgccgtaaccgcgccgtgcaactgtgcaagtaggttgttgagtctagataccagatgatggacctgtccacgacttcagtgctggcagctaaagcttacaaatacaaagcagaatcacttgttaaggagtaccttcttgcagattcgtatgtttcatacactgctgtacttggtgggatcctgatgtgcaagatggcttatgacataacaagcataatcagctcattgtactacaagggttatggttcacttacaaaaacccaaaagcttgagtggaacaacaggggcatgtccactatccatgcgatattcatcacagtggtgtcagtgtacctggttttcttctccaacctattctctgatgagctggatggactagtaacttatcggagttcaaatctatccaatttcactttgggggtttctgttgggtatttcatcactgaccttgctatgatattatgggcttatccttctcttggtggaatggagtatgtccttcaccatatgctgtcgcttatttctatagtctatgctatgtattctggggaaggacagttgtacacatacatggttctcatctctgaaacaaccacacctggaatcaacctccgatggttccttgataccgctggactgaaaaaatccaaggcctatcttgtcaatggtgttacgatgtttattgcatggctggtggcacggatcattttgttcgtctacttgttttaccacatttacttccactatgatcaggtcaagcagatgcatacgtttagctgcattctgatatttgctgtgcctacaatactgctcgtcatgaacacaatgtggtttgccaagatcttgagaggccttaaaaagacgctagccaagaggcagtgaaaagaagaatggtaaaacaagctcaaggacatcgatagccaaaatccatcccctcgtacagtcactttacagttacatgcacttcccgagtaaagccgtcagtgcagctcgtagcacaagctaaagcccttgcacatgatcctgaaatacgctaaacacagctcatttttttccctggatgctctgccttgtacatacggccgtctgtattgggtgcttacaccttgagggatcgtttggtgaccaggaaaatagatgggaaagaaatccctttgttacggcctcgttcgtttcaactggtttggctttggcccgtttccggcctcattccgggtggaaatggaatttggttgtttctctatgagctgttcgatggctgagtctgacgattgcgctgttgcgtttgtcttttctatttcttccgatcttaaatatacgaggatgtttactttttttttaaaaaaaaactttgatcactcgtcttattcaaaatatttattcaaaaatgcaaac

SEQ ID NO: 78391 - DNA, 2821 bp, Zea Mays
gccgttattattgtactcccttctccattccactcgtccccttcctccccttccgtctcgcaacaggcgaggcgagagaactcgtcgtcgaagcgaaatatagccagcgcaccaatcccaattcccaacccgacgcaacgcaacgcaacgcacctcatcccggttgcttgcgccaacgtaggggatcgcccggccccgccccgctccgcttcgcgcccctccttcctgcctgccgtaaccgcgccgtgcaactgtgcaagggtggggtggtggtgccatggcgagcacggtgtggagggaaggcggttgtggccagcatgtacttttctgtttcggtactctggttcgatcctgatggggttttcgtccatcgatcgcgtctcggtcctgcacgcaatgcagagggggttacggttctttctgttcttcctccccgcggtccgcgtcgggatgctggtctggtcgatgctttttttggcttaccgcggacgcgacgggatgcttcggccgttgttttcttttgatctctgtgacccttctgggaatcgattccatgccggattggtcgcaatgtgcgggaggttttttcttgtcctgttttttcctcgctggctggttggattctgccgcgaaaagttctcccccttatgcacctttcccccccccctcaagatatctttattcgtcgttttcgtggttccttatgggtgcttgggttcccttgtgtggttaaaaggccaataagctgcagtgtttttgttctcaagagttctttccttgtgacagggggacatcacagattctttggtatcttcctggaaatttccatcaattgttttctcctcaaccattgctggtcatgttgtttgtagtgattgtctgtcaggtgaaacatgttgtgtttggtgatgttcttactagcattcaaatgactcaagatacattagttatttgtcagttgttttgtatctgatggaccaatatatgctcaggattcatatttgggcacttgaggtgaaaaccatcttattcgattttgttgaactgtgataccactcattcttaatgaaatggatcatttccctttgccagtatcttgttgctttatttgcacccttgactatagttagtatagtttcagtattcgaggtgttgtcctatttgcaatatcaaacaggaagcataagataagagaaaagtgtatgtggcttcattgttagatttaaaatattgatactgtctaagtgattgtcaagctaggttgtcatatccatatggttcctcattacacatttaattgtgggatctgtatggtttcacagacgcatttataacattcattgtgcgtttcatggatcattatttaattgttgtatattaatgctccatttcttagggcatttctgcattcatgtgggcaagctggatgattcaaagttgttgatatgtggttcagtaggttgttgagtctagataccagatgatggacctgtccacgacttcagtgctggcagctaaagcttacaaatacaaagcagaatcacttgttaaggagtaccttcttgcagattcgtatgtttcatacactgctgtacttggtgggatcctgatgtgcaagatggcttatgacataacaagcataatcagctcattgtactacaagggttatggttcacttacaaaaacccaaaagcttgagtggaacaacaggggcatgtccactatccatgcgatattcatcacagtggtgtcagtgtacctggttttcttctccaacctattctctgatgagctggatggactagtaacttatcggagttcaaatctatccaatttcactttgggggtttctgttgggtatttcatcactgaccttgctatgatattatgggcttatccttctcttggtggaatggagtatgtccttcaccatatgctgtcgcttatttctatagtctatgctatgtattctggggaaggacagttgtacacatacatggttctcatctctgaaacaaccacacctggaatcaacctccgatggttccttgataccgctggactgaaaaaatccaaggcctatcttgtcaatggtgttacgatgtttattgcatggctggtggcacggatcattttgttcgtctacttgttttaccacatttacttccactatgatcaggtcaagcagatgcatacgtttagctgcattctgatatttgctgtgcctacaatactgctcgtcatgaacacaatgtggtttgccaagatcttgagaggccttaaaaagacgctagccaagaggcagtgaaaagaagaatggtaaaacaagctcaaggacatcgatagccaaaatccatcccctcgtacagtcactttacagttacatgcacttcccgagtaaagccgtcagtgcagctcgtagcacaagctaaagcccttgcacatgatcctgaaatacgctaaacacagctcatttttttccctggatgctctgccttgtacatacggccgtctgtattgggtgcttacaccttgagggatcgtttggtgaccaggaaaatagatgggaaagaaatccctttgttacggcctcgttcgtttcaactggtttggctttggcccgtttccggcctcattccgggtggaaatggaatttggttgtttctctatgagctgttcgatggctgagtctgacgattgcgctgttgcgtttgtcttttctatttcttccgatcttaaatatacgaggatgtttactttttttttaaaaaaaaactttgatcactcgtcttattcaaaatatttattcaaaaatgcaaac

SEQ ID NO: 78392 - DNA, 1690 bp, Zea Mays
gccgttattattgtactcccttctccattccactcgtccccttcctccccttccgtctcgcaacaggcgaggcgagagaactcgtcgtcgaagcgaaatatagccagcgcaccaatcccaattcccaacccgacgcaacgcaacgcaacgcacctcatcccggttgcttgcgccaacgtaggggatcgcccggccccgccccgctccgcttcgcgcccctccttcctgcctgccgtaaccgcgccgtgcaactgtgcaagggtggggtggtggtgccatggcgagcacggtgtggagggaaggcggttgtggccagcatgttcagtaggttgttgagtctagataccagatgatggacctgtccacgacttcagtgctggcagctaaagcttacaaatacaaagcagaatcacttgttaaggagtaccttcttgcagattcgtatgtttcatacactgctgtacttggtgggatcctgatgtgcaagatggcttatgacataacaagcataatcagctcattgtactacaagggttatggttcacttacaaaaacccaaaagcttgagtggaacaacaggggcatgtccactatccatgcgatattcatcacagtggtgtcagtgtacctggttttcttctccaacctattctctgatgagctggatggactagtaacttatcggagttcaaatctatccaatttcactttgggggtttctgttgggtatttcatcactgaccttgctatgatattatgggcttatccttctcttggtggaatggagtatgtccttcaccatatgctgtcgcttatttctatagtctatgctatgtattctggggaaggacagttgtacacatacatggttctcatctctgaaacaaccacacctggaatcaacctccgatggttccttgataccgctggactgaaaaaatccaaggcctatcttgtcaatggtgttacgatgtttattgcatggctggtggcacggatcattttgttcgtctacttgttttaccacatttacttccactatgatcaggtcaagcagatgcatacgtttagctgcattctgatatttgctgtgcctacaatactgctcgtcatgaacacaatgtggtttgccaagatcttgagaggccttaaaaagacgctagccaagaggcagtgaaaagaagaatggtaaaacaagctcaaggacatcgatagccaaaatccatcccctcgtacagtcactttacagttacatgcacttcccgagtaaagccgtcagtgcagctcgtagcacaagctaaagcccttgcacatgatcctgaaatacgctaaacacagctcatttttttccctggatgctctgccttgtacatacggccgtctgtattgggtgcttacaccttgagggatcgtttggtgaccaggaaaatagatgggaaagaaatccctttgttacggcctcgttcgtttcaactggtttggctttggcccgtttccggcctcattccgggtggaaatggaatttggttgtttctctatgagctgttcgatggctgagtctgacgattgcgctgttgcgtttgtcttttctatttcttccgatcttaaatatacgaggatgtttactttttttttaaaaaaaaactttgatcactcgtcttattcaaaatatttattcaaaaatgcaaac

SEQ ID NO: 78393 - DNA, 2824 bp, Zea Mays
gccgttattattgtactcccttctccattccactcgtccccttcctccccttccgtctcgcaacaggcgaggcgagagaactcgtcgtcgaagcgaaatatagccagcgcaccaatcccaattcccaacccgacgcaacgcaacgcaacgcacctcatcccggttgcttgcgccaacgtaggggatcgcccggccccgccccgctccgcttcgcgcccctccttcctgcctgccgtaaccgcgccgtgcaactgtgcaagggtggggtggtggtgccatggcgagcacggtgtggagggaaggcggttgtggccagcatgtacttttctgtttcggtactctggttcgatcctgatggggttttcgtccatcgatcgcgtctcggtcctgcacgcaatgcagagggggttacggttctttctgttcttcctccccgcggtccgcgtcgggatgctggtctggtcgatgctttttttggcttaccgcggacgcgacgggatgcttcggccgttgttttcttttgatctctgtgacccttctgggaatcgattccatgccggattggtcgcaatgtgcgggaggttttttcttgtcctgttttttcctcgctggctggttggattctgccgcgaaaagttctcccccttatgcacctttcccccccccctcaagatatctttattcgtcgttttcgtggttccttatgggtgcttgggttcccttgtgtggttaaaaggccaataagctgcagtgtttttgttctcaagagttctttccttgtgacagggggacatcacagattctttggtatcttcctggaaatttccatcaattgttttctcctcaaccattgctggtcatgttgtttgtagtgattgtctgtcaggtgaaacatgttgtgtttggtgatgttcttactagcattcaaatgactcaagatacattagttatttgtcagttgttttgtatctgatggaccaatatatgctcaggattcatatttgggcacttgaggtgaaaaccatcttattcgattttgttgaactgtgataccactcattcttaatgaaatggatcatttccctttgccagtatcttgttgctttatttgcacccttgactatagttagtatagtttcagtattcgaggtgttgtcctatttgcaatatcaaacaggaagcataagataagagaaaagtgtatgtggcttcattgttagatttaaaatattgatactgtctaagtgattgtcaagctaggttgtcatatccatatggttcctcattacacatttaattgtgggatctgtatggtttcacagacgcatttataacattcattgtgcgtttcatggatcattatttaattgttgtatattaatgctccatttcttagggcatttctgcattcatgtgggcaagctggatgattcaaagttgttgatatgtggtggttcagtaggttgttgagtctagataccagatgatggacctgtccacgacttcagtgctggcagctaaagcttacaaatacaaagcagaatcacttgttaaggagtaccttcttgcagattcgtatgtttcatacactgctgtacttggtgggatcctgatgtgcaagatggcttatgacataacaagcataatcagctcattgtactacaagggttatggttcacttacaaaaacccaaaagcttgagtggaacaacaggggcatgtccactatccatgcgatattcatcacagtggtgtcagtgtacctggttttcttctccaacctattctctgatgagctggatggactagtaacttatcggagttcaaatctatccaatttcactttgggggtttctgttgggtatttcatcactgaccttgctatgatattatgggcttatccttctcttggtggaatggagtatgtccttcaccatatgctgtcgcttatttctatagtctatgctatgtattctggggaaggacagttgtacacatacatggttctcatctctgaaacaaccacacctggaatcaacctccgatggttccttgataccgctggactgaaaaaatccaaggcctatcttgtcaatggtgttacgatgtttattgcatggctggtggcacggatcattttgttcgtctacttgttttaccacatttacttccactatgatcaggtcaagcagatgcatacgtttagctgcattctgatatttgctgtgcctacaatactgctcgtcatgaacacaatgtggtttgccaagatcttgagaggccttaaaaagacgctagccaagaggcagtgaaaagaagaatggtaaaacaagctcaaggacatcgatagccaaaatccatcccctcgtacagtcactttacagttacatgcacttcccgagtaaagccgtcagtgcagctcgtagcacaagctaaagcccttgcacatgatcctgaaatacgctaaacacagctcatttttttccctggatgctctgccttgtacatacggccgtctgtattgggtgcttacaccttgagggatcgtttggtgaccaggaaaatagatgggaaagaaatccctttgttacggcctcgttcgtttcaactggtttggctttggcccgtttccggcctcattccgggtggaaatggaatttggttgtttctctatgagctgttcgatggctgagtctgacgattgcgctgttgcgtttgtcttttctatttcttccgatcttaaatatacgaggatgtttactttttttttaaaaaaaaactttgatcactcgtcttattcaaaatatttattcaaaaatgcaaac

SEQ ID NO: 78394 - DNA, 754 bp, Zea Mays
tgctggagacagcctaatacagacactcttttcctctttctccattccccatcgcaaaactggaggacctagcttcgccgcagatgtcgtcggtcccggacgctgatctcgcctcagattccgtggccggcaaaaaagagacacaaggacacagtggagtcaagcacgaaccagttttttttagcatccttaaagagtacaatttaccaagacatcgtgcacaaaagggttggaccaaggaagcttggaataacaagacgcagcgtatgaatgaaaaatctgtatcagcaaacttcattgtatctcaactgaaggatagagaacaaaggctcaagaaggaccataatgcagtgcatctgattttatcaaagagtggatttggttgggaccccaacctaaagatggctactacagtatcataaaattggcaagacctaccacaaaagttacagaaatggaaggataaagccttcccatactatgaagacctgcatgagatttacaatgatttataaaagtattttgctctacggaaagaagcagtagctagtgaaatgggatgagagctgcgaaactagagaatataacatttggcatttattttagtcttttttagtccgtatgaactattgtgtgttatttggtttgtacgcttttgaattgaacttgatggcaccaaacaggtgttcaattgattgctgtaaaagaaatttatgattatatcatgagaattaccagactgtggtattgaaat

SEQ ID NO: 78395 - DNA, 752 bp, Zea Mays
tgctggagacagcctaatacagacactcttttcctctttctccattccccatcgcaaaactggaggacctagcttcgccgcagatgtcgtcggtcccggacgctgatctcgcctcagattccgtggccggcaaaaaagacacaaggacacagtggagtcaagcacgaaccagttttttttagcatccttaaagagtacaatttaccaagacatcgtgcacaaaagggttggaccaaggaagcttggaataacaagacgcagcgtatgaatgaaaaatctgtatcagcaaacttcattgtatctcaactgaaggatagagaacaaaggctcaagaaggaccataatgcagtgcatctgattttatcaaagagtggatttggttgggaccccaacctaaagatggctactacagtatcataaaattggcaagacctaccacaaaagttacagaaatggaaggataaagccttcccatactatgaagacctgcatgagatttacaatgatttataaaagtattttgctctacggaaagaagcagtagctagtgaaatgggatgagagctgcgaaactagagaatataacatttggcatttattttagtcttttttagtccgtatgaactattgtgtgttatttggtttgtacgcttttgaattgaacttgatggcaccaaacaggtgttcaattgattgctgtaaaagaaatttatgattatatcatgagaattaccagactgtggtattgaaat

SEQ ID NO: 78396 - DNA, 625 bp, Zea Mays
tgctggagacagcctaatacagacactcttttcctctttctccattccccatcgcaaaactggaggacctagcttcgccgcagatgtcgtcggtcccggacgctgatctcgcctcagattccgtggccggcaaaaaagacacgcatctctgtattgatatgatatattgtatttatcacggacaaaagacacaaggacacagtggagtcaagcacgaaccagttttttttagcatccttaaagagtacaatttaccaagacatcgtgcacaaaagggttggaccaaggaagcttggaataacaagacgcagcgtatgaatgaaaaatctgtatcagcaaacttcattgtatctcaactgaaggatagagaacaaaggctcaagaaggaccataatgcagtgcatctgattttatcaaagagtggatttggttgggaccccaacctaaagatggctactacagtatcataaaattggcaagacctaccacaaaagttacagaaatggaaggataaagccttcccatactatgaagacctgcatgagatttacaatggtaaagtagctacagggaagcattgtagaagttctttagagaaggcatataagtctgaactcattgtttt

SEQ ID NO: 78397 - DNA, 1571 bp, Zea Mays
ttgccgtcgacgtcaccctggtcaggcgtcacttgacgacgtatacaggggcacagggctcagcgccggcttcttaattttgtagacaagactctagtggaggatgttattcctattctggaagttgcttcccactcagggctgactcaagtgatcgacaaatgtattcaaaggattgctagatcagatctcgacgatatatctttggataaggagctccctccagaagcagttgatgagataaaaaatttgcgcaagaagtcacaaactgctgatggtgatacgttcatttcggaccctgtgcatgagaaaagagtcagaagaatccacagggcacttgactctgatgatgttgagcttgtgaagttgcttcttaatgagtccgacatcacattagatgatgccaacgcattacactatgctgcttcttactgtgatcctaaagttgtctcagagctgttagatttggcaatggctaacttaaatttgaagaatagccgtgggtacacagcactccacttggctgctatgaggagagaaccagctataatcatgtgtctccttaacaaaggggcaaatgtgtcacaactgacagctgatggcaggagcgcaattggtatttgtcggaggttaacaagagcaaaagactacaatacaaagatggagcagggtcaagaatcaaataaagataggctgtgtatagatattctagagagggagatgatgcggaatcctatggcggtggaagatgccgtcacctcgcctttgttggcagatgatcttcacatgaagcttctctacctggaaaacagagttgcatttgctagattgttctttcctgctgaagccaaggtcgccatgcaaatcgcacaagcagacaccacagaagaattcggcggtatagttgcagttgcagcaagcacttctggtaaactgagggaggtggaccttaatgagacgccagtgacacaaaacaaaaggctccgttcaagggtagatgcactgatgaaaacagtggagctgggccgtcggtacttcccgaactgctcgcaggtgctggacaagttcctggaggacgatctgccggaaggtctggaccagttctacctccagaggggcacagccgatgagcagaaggtgaagaggatgcgcttctgcgagctgaaagaggacgtgctgaaggcgtttagcaaggacaaggcggagggcagcgtgttctcgggcctgtcctcgtcgtcgtcgtgctcgccgccccagaagtatgcccagaggtgatcaaggcaccagtttttgccgtatagtttgttatcatggtcttcgagacttggacccggacagcatatagggacatgtacacctgtgtatgtatagtgcttacaattggcgtaagtagaactatatgtatggaacataaggaaacatggcaggaacaccgtgcaaaaagatgaaaagatggccgaagtgctctatgcgagtgcccacctgattcgatggccctattcaacggcgccctgtcagcatgctgcatgcccactgagaccttcggttgcatagggataggaggagatttc

SEQ ID NO: 78398 - DNA, 3641 bp, Zea Mays
ttgggcgtgggccgcttccgcgtggttccagttccaggacctcagtcctcagccagcccccatcgaccaccatggtccacctgtctggtgtgcccgttcgtccaaacccgctgcgctacccgctcgccgtctcgactagctctaggttttcattcggcgcaccggaacagcgcaccatcaagagagcgaccgccgcacaggcgcgacaccgccgcccgccggtacagccaaaccgagctcgccgcatcgaaggggcttcccgaccgccgagcgtgcttctagacgacgacaacgagcacgaggaactgatggggcggaaggggcggaaggggaagggcgcagcggccggggggagcgccggcatgaaggaggcgacgctggtgcgcgtctcaaaggcgctcgaggacttccgcgcctccaacgccgaggtgtacacatttgaacctgatatatccaaacaagagcgagctgcaatccatgagatgtgtaggaaaatgggcatgatatccaaaagttctgggaacggggaacgtcgacgcctttctgtttataaaagaaaacagaagcgggggcctgaattggaacaaggccctagctaccttgggttttctgaagaggctaggcatgttttgcaggatttatttatgcattatcctcctggtgatgctgatttaagtggggatgttgaccagagttctagtgataaggctgcaaacatcaaatggagaacagataatgcgttttgcaggcccgcaatgagtaaacttgatataacgaagaaagttgagatgcttgcctcaaaaataaatggatccgaacagttgagaaaggtcatggaagatagaacaaaacttcctatttcatctttcaaggatgtcatcacttcaactttggaaaatcaccaggtggttcttatttctggacaaacaggctgcggtaaaaccacccaggtgcctcaatacatcttggatcatatgtggggcaagggtgaatcatgtaagatcatatgcactcaaccacgtcggatatcagctatttcagttgctgagcgaatctctgctgaaagaggtgaggctgttggtgacacagttggatataagatacgtttggagtcaaaaggcgggaagaattcatcagtcttgttctgcacaaatggtgttcttttgagattattgataggaagaggaactaacgcttcaaaagcacgaaaccagaagcgctcattagatgatgcagttttgggaataacgcacatcattgtggatgaaatccatgaaagggataggttttctgatttcatgctgactattctaagagacttgttgcctttgtatcctcatcttcgtatggtactcatgagtgcaacaattgatgctgagcgtttttcgcaatatttcaatggatgttcggtcatacaagtccctggttttacctatcctgtcaaaactttctatttggaggatgtgctttctattctgcagtctgcaggtgataaccatcttaccagtcataaaacagagggcagcgttttaactcacgatttcaaaagctcaatggatgattcaattaatctggctttggtcaatgatgaatttgatcctcttcttgagcttatttctgcagagcagaacacagaagtctacaattaccagcattcagagactggtataactcctttaatggtttttgctatgaagggtcagcttggggacgtctgtatgcttttatcttttggtgtggattgttcagcacaggatcatgatggaaaatccgcattagattgggcacaacaagagaatcaacaagaggtctgtgaagtaataaagaaacatatggagtgtagttcagaaaaatcaactgaagataacgagctgcttaacaagtacttggcatctattaatccagagcacattgatactctgctaattgaacggctgcttcgaaaaatttgtgtggattccaatgaaggagccatcttggtattccttcctggctgggaagatatcagtcaaacacgtgaaagattatttgcttctccattctttcaggattcatcaagatttcttgtgttgtctcttcattctatgatcccgtcctcagagcagaaaaaggttttcaaacgtccaccagtgggggttcgtaaaattattctctcaactaatattgcagagactgctgtgacaattgatgatgttgtgtttgtcatagatagtgggagaatgaaagagaaaagttatgatccatacaataatgtgtccacacttcatgcttcttgggtttcaaaagccagtgcaagacaacgcgaagggcgtgctggccgatgtcagccaggaacttgctatcatctttactcaaggtttagagcttcatccttgccagactaccaaattcctgaaataaaaagaatgcccattgaggaactttgtttgcaggtcaaactgcttgattcaaactgcagaatagcagactttctgaagaaaaccttggaccctccaattccagaaactgtaagaaatgctattgctgtgcttcaggatcttggtgctttaacacaagacgaacaactaacagaattaggagaaaagctgggttccctgccagtccatccatccaccaccaagatgctcctgtttgctatattaatgaactgcctggatccagcattgacattggcatgtgcagctgattatagagatccatttgtccttccagtagcgcctgatgagaggaaaagggcagctgcagcgaaagttgagcttgcttcgttgtatggtgggttcagcgaccaacttgctgttgtcgcggcatttgacttctggaggcatgccaaagatagaggccaagattctcaattttgtgcgaagtactttgtctcttcaaacatcatgaatatgctatcaagcatgaggaaacaacttcagaatgaactgtctcaaagagggtttgtccctgcagatgcatctgcctgcagcttaaactctaaagatccaggtatcatgcgtgctgttcttatggctggtgcttacccaatggtagggaaaatgctccctcctcgcaaaaatgctagaaaatcagttctggaaacagcgagtggtgccaaagttcgtctgcacccacactcctgcaactttaacctatctttcagtaaatcttctgggaatccactgctgatatacgatgagatcactcgaggtgatggtggaatgtatataaaaaattcttcagttgttgggtcatatcctttgcttctaatagctgcagaaatggttgttgctccacctgatgatgatagtgatgaagatgaggaagattctagtgaggatgaagctgaggaaagcacattggtacagcacaaagaagagattatgtcttcacctgacagcattgtttcagttgttgttgatcggtggctccggtttgacgctacggctctggatgttgctcaaatatactgcttaagagaacgtctagcatctgctattcttttcaaattttatagtgagtccaacatgatatggcgcattttgttcttgtttgggaaaaaatgcaagcgaagtacgatgcaccaacggatttttcgggggatgaaggttaaagtctgacaacttggaatccaggcaagtcggaatgttggattgttt

SEQ ID NO: 78399 - DNA, 4497 bp, Zea Mays
ttgggcgtgggccgcttccgcgtggttccagttccaggacctcagtcctcagccagcccccatcgaccaccatggtccacctgtctggtgtgcccgttcgtccaaacccgctgcgctacccgctcgccgtctcgactagctctaggttttcattcggcgcaccggaacagcgcaccatcaagagagcgaccgccgcacaggcgcgacaccgccgcccgccggtacagccaaaccgagctcgccgcatcgaaggggcttcccgaccgccgagcgtgcttctagacgacgacaacgagcacgaggaactgatggggcggaaggggcggaaggggaagggcgcagcggccggggggagcgccggcatgaaggaggcgacgctggtgcgcgtctcaaaggcgctcgaggacttccgcgcctccaacgccgaggtgtacacatttgaacctgatatatccaaacaagagcgagctgcaatccatgagatgtgtaggaaaatgggcatgatatccaaaagttctgggaacggggaacgtcgacgcctttctgtttataaaagaaaacagaagcgggggcctgaattggaacaaggccctagctaccttgggttttctgaagaggctaggcatgttttgcaggatttatttatgcattatcctcctggtgatgctgatttaagtggggatgttgaccagagttctagtgataaggctgcaaacatcaaatggagaacagataatgcgttttgcaggcccgcaatgagtaaacttgatataacgaagaaagttgagatgcttgcctcaaaaataaatggatccgaacagttgagaaaggtcatggaagatagaacaaaacttcctatttcatctttcaaggatgtcatcacttcaactttggaaaatcaccaggtggttcttatttctggacaaacaggctgcggtaaaaccacccaggtgcctcaatacatcttggatcatatgtggggcaagggtgaatcatgtaagatcatatgcactcaaccacgtcggatatcagctatttcagttgctgagcgaatctctgctgaaagaggtgaggctgttggtgacacagttggatataagatacgtttggagtcaaaaggcgggaagaattcatcagtcttgttctgcacaaatggtgttcttttgagattattgataggaagaggaactaacgcttcaaaagcacgaaaccagaagcgctcattagatgatgcagttttgggaataacgcacatcattgtggatgaaatccatgaaagggataggttttctgatttcatgctgactattctaagagacttgttgcctttgtatcctcatcttcgtatggtactcatgagtgcaacaattgatgctgagcgtttttcgcaatatttcaatggatgttcggtcatacaagtccctggttttacctatcctgtcaaaactttctatttggaggatgtgctttctattctgcagtctgcaggtgataaccatcttaccagtcataaaacagagggcagcgttttaactcacgatttcaaaagctcaatggatgattcaattaatctggctttggtcaatgatgaatttgatcctcttcttgagcttatttctgcagagcagaacacagaagtctacaattaccagcattcagagactggtataactcctttaatggtttttgctatgaagggtcagcttggggacgtctgtatgcttttatcttttggtgtggattgttcagcacaggatcatgatggaaaatccgcattagattgggcacaacaagagaatcaacaagaggtctgtgaagtaataaagaaacatatggagtgtagttcagaaaaatcaactgaagataacgagctgcttaacaagtacttggcatctattaatccagagcacattgatactctgctaattgaacggctgcttcgaaaaatttgtgtggattccaatgaaggagccatcttggtattccttcctggctgggaagatatcagtcaaacacgtgaaagattatttgcttctccattctttcaggattcatcaagatttcttgtgttgtctcttcattctatgatcccgtcctcagagcagaaaaaggttttcaaacgtccaccagtgggggttcgtaaaattattctctcaactaatattgcagagactgctgtgacaattgatgatgttgtgtttgtcatagatagtgggagaatgaaagagaaaagttatgatccatacaataatgtgtccacacttcatgcttcttgggtttcaaaagccagtgcaagacaacgcgaagggcgtgctggccgatgtcagccaggaacttgctatcatctttactcaaggtttagagcttcatccttgccagactaccaaattcctgaaataaaaagaatgcccattgaggaactttgtttgcaggtcaaactgcttgattcaaactgcagaatagcagactttctgaagaaaaccttggaccctccaattccagaaactgtaagaaatgctattgctgtgcttcaggatcttggtgctttaacacaagacgaacaactaacagaattaggagaaaagctgggttccctgccagtccatccatccaccaccaagatgctcctgtttgctatattaatgaactgcctggatccagcattgacattggcatgtgcagctgattatagagatccatttgtccttccagtagcgcctgatgagaggaaaagggcagctgcagcgaaagttgagcttgcttcgttgtatggtgggttcagcgaccaacttgctgttgtcgcggcatttgacttctggaggcatgccaaagatagaggccaagattctcaattttgtgcgaagtactttgtctcttcaaacatcatgaatatgctatcaagcatgaggaaacaacttcagaatgaactgtctcaaagagggtttgtccctgcagatgcatctgcctgcagcttaaactctaaagatccagggaaaatgctccctcctcgcaaaaatgctagaaaatcagttctggaaacagcgagtggtgccaaagttcgtctgcacccacactcctgcaactttaacctatctttcagtaaatcttctgggaatccactgctgatatacgatgagatcactcgaggtgatggtggaatgtatataaaaaattcttcagttgttgggtcatatcctttgcttctaatagctgcagaaatggttgttgctccacctgatgatgatagtgatgaagatgaggaagattctagtgaggatgaagctgaggaaagcacattggtacagcacaaagaagagattatgtcttcacctgacagcattgtttcagttgttgttgatcggtggctccggtttgacgctacggctctggatgttgctcaaatatactgcttaagagaacgtctagcatctgctattcttttcaaagtgaaacatccacaagatgttctacctcctgcgcttggagcgtcaatgtatgccatcacatgcatcctttcattcgatggtttgccttctatggttccacctaatgacctttcagcaaaccgaggttcaggccaggatttagcagaagctagcaagttctctcagggaagaagagcgggttatattccaccaagtggttttctgatgtccttgttagctgataggacccataatgcaccttctttccagaactcatctaaccatccaggaggtggttcagcgcatactcggccatccagggctcctgttggtaggtttgatcgatctcggcgacctttccgcaattctggacctgggacttcagcaccacgttctttcaaaaggcagcgcgacgctccacggtgagcagggcataaaggcagccttttgcatgccagccatttcggatgtgctttgtcaacggtgcctagtctaagaaaaggacgtgctacagaatcacaagctttgctgtgttccgttgtagaaatgaaaggaaaagaattatagcactgcatcagattcctttgtcgaagagtttttgtaggtatgcccctgagtgttttgtgtactttgctcagccgagctcatttgcaccgtagatctcagaggtgcctgtaatcttttggatggagttcggatgttaaaaagaagtgggaaagaaaagggaagacctgttatctgctcaaatgatgagccccataattgacggtatcactggaccatagatgaactttgtgctgtagtgccataggcaatatggtgtgacgggcgagtggaatttgccctgcatcgcaagcgttaaattttgtccttgtatgtacgtacttagtaaacttagtaataaccctttctttgaattcagttttatagtgagtccaacatgatatggcgcattttgttcttgtttgggaaaaaatgcaagcgaagtacgatgcaccaacggatttttcgggggatgaaggttaaagtctgacaacttggaatccaggcaagtcggaatgttggattgttt

SEQ ID NO: 78400 - DNA, 4368 bp, Zea Mays
ttgggcgtgggccgcttccgcgtggttccagttccaggacctcagtcctcagccagcccccatcgaccaccatggtccacctgtctggtgtgcccgttcgtccaaacccgctgcgctacccgctcgccgtctcgactagctctaggttttcattcggcgcaccggaacagcgcaccatcaagagagcgaccgccgcacaggcgcgacaccgccgcccgccggtacagccaaaccgagctcgccgcatcgaaggggcttcccgaccgccgagcgtgcttctagacgacgacaacgagcacgaggaactgatggggcggaaggggcggaaggggaagggcgcagcggccggggggagcgccggcatgaaggaggcgacgctggtgcgcgtctcaaaggcgctcgaggacttccgcgcctccaacgccgaggtgtacacatttgaacctgatatatccaaacaagagcgagctgcaatccatgagatgtgtaggaaaatgggcatgatatccaaaagttctgggaacggggaacgtcgacgcctttctgtttataaaagaaaacagaagcgggggcctgaattggaacaaggccctagctaccttgggttttctgaagaggctaggcatgttttgcaggatttatttatgcattatcctcctggtgatgctgatttaagtggggatgttgaccagagttctagtgataaggctgcaaacatcaaatggagaacagataatgcgttttgcaggcccgcaatgagtaaacttgatataacgaagaaagttgagatgcttgcctcaaaaataaatggatccgaacagttgagaaaggtcatggaagatagaacaaaacttcctatttcatctttcaaggatgtcatcacttcaactttggaaaatcaccaggtggttcttatttctggacaaacaggctgcggtaaaaccacccaggtgcctcaatacatcttggatcatatgtggggcaagggtgaatcatgtaagatcatatgcactcaaccacgtcggatatcagctatttcagttgctgagcgaatctctgctgaaagaggtgaggctgttggtgacacagttggatataagatacgtttggagtcaaaaggcgggaagaattcatcagtcttgttctgcacaaatggtgttcttttgagattattgataggaagaggaactaacgcttcaaaagcacgaaaccagaagcgctcattagatgatgcagttttgggaataacgcacatcattgtggatgaaatccatgaaagggataggttttctgatttcatgctgactattctaagagacttgttgcctttgtatcctcatcttcgtatggtactcatgagtgcaacaattgatgctgagcgtttttcgcaatatttcaatggatgttcggtcatacaagtccctggttttacctatcctgtcaaaactttctatttggaggatgtgctttctattctgcagtctgcaggtgataaccatcttaccagtcataaaacagagggcagcgttttaactcacgatttcaaaagctcaatggatgattcaattaatctggctttggtcaatgatgaatttgatcctcttcttgagcttatttctgcagagcagaacacagaagtctacaattaccagcattcagagactggtataactcctttaatggtttttgctatgaagggtcagcttggggacgtctgtatgcttttatcttttggtgtggattgttcagcacaggatcatgatggaaaatccgcattagattgggcacaacaagagaatcaacaagaggtctgtgaagtaataaagaaacatatggagtgtagttcagaaaaatcaactgaagataacgagctgcttaacaagtacttggcatctattaatccagagcacattgatactctgctaattgaacggctgcttcgaaaaatttgtgtggattccaatgaaggagccatcttggtattccttcctggctgggaagatatcagtcaaacacgtgaaagattatttgcttctccattctttcaggattcatcaagatttcttgtgttgtctcttcattctatgatcccgtcctcagagcagaaaaaggttttcaaacgtccaccagtgggggttcgtaaaattattctctcaactaatattgcagagactgctgtgacaattgatgatgttgtgtttgtcatagatagtgggagaatgaaagagaaaagttatgatccatacaataatgtgtccacacttcatgcttcttgggtttcaaaagccagtgcaagacaacgcgaagggcgtgctggccgatgtcagccaggaacttgctatcatctttactcaaggtttagagcttcatccttgccagactaccaaattcctgaaataaaaagaatgcccattgaggaactttgtttgcaggtcaaactgcttgattcaaactgcagaatagcagactttctgaagaaaaccttggaccctccaattccagaaactgtaagaaatgctattgctgtgcttcaggatcttggtgctttaacacaagacgaacaactaacagaattaggagaaaagctgggttccctgccagtccatccatccaccaccaagatgctcctgtttgctatattaatgaactgcctggatccagcattgacattggcatgtgcagctgattatagagatccatttgtccttccagtagcgcctgatgagaggaaaagggcagctgcagcgaaagttgagcttgcttcgttgtatggtgggttcagcgaccaacttgctgttgtcgcggcatttgacttctggaggcatgccaaagatagaggccaagattctcaattttgtgcgaagtactttgtctcttcaaacatcatgaatatgctatcaagcatgaggaaacaacttcagaatgaactgtctcaaagagggtttgtccctgcagatgcatctgcctgcagcttaaactctaaagatccaggtatcatgcgtgctgttcttatggctggtgcttacccaatggtagggaaaatgctccctcctcgcaaaaatgctagaaaatcagttctggaaacagcgagtggtgccaaagttcgtctgcacccacactcctgcaactttaacctatctttcagtaaatcttctgggaatccactgctgatatacgatgagatcactcgaggtgatggtggaatgtatataaaaaattcttcagttgttgggtcatatcctttgcttctaatagctgcagaaatggttgttgctccacctgatgatgatagtgatgaagatgaggaagattctagtgaggatgaagctgaggaaagcacattggtacagcacaaagaagagattatgtcttcacctgacagcattgtttcagttgttgttgatcggtggctccggtttgacgctacggctctggatgttgctcaaatatactgcttaagagaacctagcaagttctctcagggaagaagagcgggttatattccaccaagtggttttctgatgtccttgttagctgataggacccataatgcaccttctttccagaactcatctaaccatccaggaggtggttcagcgcatactcggccatccagggctcctgttggtaggtttgatcgatctcggcgacctttccgcaattctggacctgggacttcagcaccacgttctttcaaaaggcagcgcgacgctccacggtgagcagggcataaaggcagccttttgcatgccagccatttcggatgtgctttgtcaacggtgcctagtctaagaaaaggacgtgctacagaatcacaagctttgctgtgttccgttgtagaaatgaaaggaaaagaattatagcactgcatcagattcctttgtcgaagagtttttgtaggtatgcccctgagtgttttgtgtactttgctcagccgagctcatttgcaccgtagatctcagaggtgcctgtaatcttttggatggagttcggatgttaaaaagaagtgggaaagaaaagggaagacctgttatctgctcaaatgatgagccccataattgacggtatcactggaccatagatgaactttgtgctgtagtgccataggcaatatggtgtgacgggcgagtggaatttgccctgcatcgcaagcgttaaattttgtccttgtatgtacgtacttagtaaacttagtaataaccctttctttgaattcagttttatagtgagtccaacatgatatggcgcattttgttcttgtttgggaaaaaatgcaagcgaagtacgatgcaccaacggatttttcgggggatgaaggttaaagtctgacaacttggaatccaggcaagtcggaatgttggattgttt

SEQ ID NO: 78401 - DNA, 4374 bp, Zea Mays
ttgggcgtgggccgcttccgcgtggttccagttccaggacctcagtcctcagccagcccccatcgaccaccatggtccacctgtctggtgtgcccgttcgtccaaacccgctgcgctacccgctcgccgtctcgactagctctaggttttcattcggcgcaccggaacagcgcaccatcaagagagcgaccgccgcacaggcgcgacaccgccgcccgccggtacagccaaaccgagctcgccgcatcgaaggggcttcccgaccgccgagcgtgcttctagacgacgacaacgagcacgaggaactgatggggcggaaggggcggaaggggaagggcgcagcggccggggggagcgccggcatgaaggaggcgacgctggtgcgcgtctcaaaggcgctcgaggacttccgcgcctccaacgccgaggtgtacacatttgaacctgatatatccaaacaagagcgagctgcaatccatgagatgtgtaggaaaatgggcatgatatccaaaagttctgggaacggggaacgtcgacgcctttctgtttataaaagaaaacagaagcgggggcctgaattggaacaaggccctagctaccttgggttttctgaagaggctaggcatgttttgcaggatttatttatgcattatcctcctggtgatgctgatttaagtggggatgttgaccagagttctagtgataaggctgcaaacatcaaatggagaacagataatgcgttttgcaggcccgcaatgagtaaacttgatataacgaagaaagttgagatgcttgcctcaaaaataaatggatccgaacagttgagaaaggtcatggaagatagaacaaaacttcctatttcatctttcaaggatgtcatcacttcaactttggaaaatcaccaggtggttcttatttctggacaaacaggctgcggtaaaaccacccaggtgcctcaatacatcttggatcatatgtggggcaagggtgaatcatgtaagatcatatgcactcaaccacgtcggatatcagctatttcagttgctgagcgaatctctgctgaaagaggtgaggctgttggtgacacagttggatataagatacgtttggagtcaaaaggcgggaagaattcatcagtcttgttctgcacaaatggtgttcttttgagattattgataggaagaggaactaacgcttcaaaagcacgaaaccagaagcgctcattagatgatgcagttttgggaataacgcacatcattgtggatgaaatccatgaaagggataggttttctgatttcatgctgactattctaagagacttgttgcctttgtatcctcatcttcgtatggtactcatgagtgcaacaattgatgctgagcgtttttcgcaatatttcaatggatgttcggtcatacaagtccctggttttacctatcctgtcaaaactttctatttggaggatgtgctttctattctgcagtctgcaggtgataaccatcttaccagtcataaaacagagggcagcgttttaactcacgatttcaaaagctcaatggatgattcaattaatctggctttggtcaatgatgaatttgatcctcttcttgagcttatttctgcagagcagaacacagaagtctacaattaccagcattcagagactggtataactcctttaatggtttttgctatgaagggtcagcttggggacgtctgtatgcttttatcttttggtgtggattgttcagcacaggatcatgatggaaaatccgcattagattgggcacaacaagagaatcaacaagaggtctgtgaagtaataaagaaacatatggagtgtagttcagaaaaatcaactgaagataacgagctgcttaacaagtacttggcatctattaatccagagcacattgatactctgctaattgaacggctgcttcgaaaaatttgtgtggattccaatgaaggagccatcttggtattccttcctggctgggaagatatcagtcaaacacgtgaaagattatttgcttctccattctttcaggattcatcaagatttcttgtgttgtctcttcattctatgatcccgtcctcagagcagaaaaaggttttcaaacgtccaccagtgggggttcgtaaaattattctctcaactaatattgcagagactgctgtgacaattgatgatgttgtgtttgtcatagatagtgggagaatgaaagagaaaagttatgatccatacaataatgtgtccacacttcatgcttcttgggtttcaaaagccagtgcaagacaacgcgaagggcgtgctggccgatgtcagccaggaacttgctatcatctttactcaaggtttagagcttcatccttgccagactaccaaattcctgaaataaaaagaatgcccattgaggaactttgtttgcaggtcaaactgcttgattcaaactgcagaatagcagactttctgaagaaaaccttggaccctccaattccagaaactgtaagaaatgctattgctgtgcttcaggatcttggtgctttaacacaagacgaacaactaacagaattaggagaaaagctgggttccctgccagtccatccatccaccaccaagatgctcctgtttgctatattaatgaactgcctggatccagcattgacattggcatgtgcagctgattatagagatccatttgtccttccagtagcgcctgatgagaggaaaagggcagctgcagcgaaagttgagcttgcttcgttgtatggtgggttcagcgaccaacttgctgttgtcgcggcatttgacttctggaggcatgccaaagatagaggccaagattctcaattttgtgcgaagtactttgtctcttcaaacatcatgaatatgctatcaagcatgaggaaacaacttcagaatgaactgtctcaaagagggtttgtccctgcagatgcatctgcctgcagcttaaactctaaagatccaggtatcatgcgtgctgttcttatggctggtgcttacccaatggtagggaaaatgctccctcctcgcaaaaatgctagaaaatcagttctggaaacagcgagtggtgccaaagttcgtctgcacccacactcctgcaactttaacctatctttcagtaaatcttctgggaatccactgctgatatacgatgagatcactcgagtgatgaagatgaggaagattctagtgaggatgaagctgaggaaagcacattggtacagcacaaagaagagattatgtcttcacctgacagcattgtttcagttgttgttgatcggtggctccggtttgacgctacggctctggatgttgctcaaatatactgcttaagagaacgtctagcatctgctattcttttcaaagtgaaacatccacaagatgttctacctcctgcgcttggagcgtcaatcaaaccgaggttcaggccaggatttagcagaagctagcaagttctctcagggaagaagagcgggttatattccaccaagtggttttctgatgtccttgttagctgataggacccataatgcaccttctttccagaactcatctaaccatccaggaggtggttcagcgcatactcggccatccagggctcctgttggtaggtttgatcgatctcggcgacctttccgcaattctggacctgggacttcagcaccacgttctttcaaaaggcagcgcgacgctccacggtgagcagggcataaaggcagccttttgcatgccagccatttcggatgtgctttgtcaacggtgcctagtctaagaaaaggacgtgctacagaatcacaagctttgctgtgttccgttgtagaaatgaaaggaaaagaattatagcactgcatcagattcctttgtcgaagagtttttgtaggtatgcccctgagtgttttgtgtactttgctcagccgagctcatttgcaccgtagatctcagaggtgcctgtaatcttttggatggagttcggatgttaaaaagaagtgggaaagaaaagggaagacctgttatctgctcaaatgatgagccccataattgacggtatcactggaccatagatgaactttgtgctgtagtgccataggcaatatggtgtgacgggcgagtggaatttgccctgcatcgcaagcgttaaattttgtccttgtatgtacgtacttagtaaacttagtaataaccctttctttgaattcagttttatagtgagtccaacatgatatggcgcattttgttcttgtttgggaaaaaatgcaagcgaagtacgatgcaccaacggatttttcgggggatgaaggttaaagtctgacaacttggaatccaggcaagtcggaatgttggattgttt

SEQ ID NO: 78402 - DNA, 1725 bp, Zea Mays
attcaaacgggtggtaatcttcaagatgaagaagattggcggcgagtactcatgagtgcaacaattgatgctgagcgtttttcgcaatatttcaatggatgttcggtcatacaagtccctggttttacctatcctgtcaaaactttctatttggaggatgtgctttctattctgcagtctgcaggtgataaccatcttaccagtcataaaacagagggcagcgttttaactcacgatttcaaaagctcaatggatgattcaattaatctggctttggtcaatgatgaatttgatcctcttcttgagcttatttctgcagagcagaacacagaagtctacaattaccagcattcagagactggtataactcctttaatggtttttgctatgaagggtcagcttggggacgtctgtatgcttttatcttttggtgtggattgttcagcacaggatcatgatggaaaatccgcattagattgggcacaacaagagaatcaacaagaggtctgtgaagtaataaagaaacatatggagtgtagttcagaaaaatcaactgaagataacgagctgcttaacaagtacttggcatctattaatccagagcacattgatactctgctaattgaacggctgcttcgaaaaatttgtgtggattccaatgaaggagccatcttggtattccttcctggctgggaagatatcagtcaaacacgtgaaagattatttgcttctccattctttcaggattcatcaagatttcttgtgttgtctcttcattctatgatcccgtcctcagagcagaaaaaggttttcaaacgtccaccagtgggggttcgtaaaattattctctcaactaatattgcagagactgctgtgacaattgatgatgttgtgtttgtcatagatagtgggagaatgaaagagaaaagttatgatccatacaataatgtgtccacacttcatgcttcttgggtttcaaaagccagtgcaagacaacgcgaagggcgtgctggccgatgtcagccaggaacttgctatcatctttactcaaggtttagagcttcatccttgccagactaccaaattcctgaaataaaaagaatgcccattgaggaactttgtttgcaggtcaaactgcttgattcaaactgcagaatagcagactttctgaagaaaaccttggaccctccaattccagaaactgtaagaaatgctattgctgtgcttcaggatcttggtgctttaacacaagacgaacaactaacagaattaggagaaaagctgggttccctgccagtccatccatccaccaccaagatgctcctgtttgctatattaatgaactgcctggatccagcattgacattggcatgtgcagctgattatagagatccatttgtccttccagtagcgcctgatgagaggaaaagggcagctgcagcgaaagttgagcttgcttcgttgtatggtgggttcagcgaccaacttgctgttgtcgcggcatttgacttctggaggcatgccaaagatagaggccaagattctcaattttgtgcgaagtactttgtctcttcaaacatcatgaatatgctatcaagcatgaggaaacaacttcagaatgaactgtctcaaagagggtttgtccctgcagatgcatctgcctgcagcttaaactctaaagatccaggtactcaggtctctatgaaaatggattttttcctttaa

SEQ ID NO: 78403 - DNA, 2958 bp, Zea Mays
ttgggcgtgggccgcttccgcgtggttccagttccaggacctcagtcctcagccagcccccatcgaccaccatggtccacctgtctggtgtgcccgttcgtccaaacccgctgcgctacccgctcgccgtctcgactagctctaggttttcattcggcgcaccggaacagcgcaccatcaagagagcgaccgccgcacaggcgcgacaccgccgcccgccggtacagccaaaccgagctcgccgcatcgaaggggcttcccgaccgccgagcgtgcttctagacgacgacaacgagcacgaggaactgatggggcggaaggggcggaaggggaagggcgcagcggccggggggagcgccggcatgaaggaggcgacgctggtgcgcgtctcaaaggcgctcgaggacttccgcgcctccaacgccgaggtgtacacatttgaacctgatatatccaaacaagagcgagctgcaatccatgagatgtgtaggaaaatgggcatgatatccaaaagttctgggaacggggaacgtcgacgcctttctgtttataaaagaaaacagaagcgggggcctgaattggaacaaggccctagctaccttgggttttctgaagaggctagagttctagtgataaggctgcaaacatcaaatggagaacagataatgcgttttgcaggcccgcaatgagtaaacttgatataacgaagaaagttgagatgcttgcctcaaaaataaatggatccgaacagttgagaaaggtcatggaagatagaacaaaacttcctatttcatctttcaaggatgtcatcacttcaactttggaaaatcaccaggtggttcttatttctggacaaacaggctgcggtaaaaccacccaggtgcctcaatacatcttggatcatatgtggggcaagggtgaatcatgtaagatcatatgcactcaaccacgtcggatatcagctatttcagttgctgagcgaatctctgctgaaagaggtgaggctgttggtgacacagttggatataagatacgtttggagtcaaaaggcgggaagaattcatcagtcttgttctgcacaaatggtgttcttttgagattattgataggaagaggaactaacgcttcaaaagcacgaaaccagaagcgctcattagatgatgcagttttgggaataacgcacatcattgtggatgaaatccatgaaagggataggttttctgatttcatgctgactattctaagagacttgttgcctttgtatcctcatcttcgtatgtactcatgagtgcaacaattgatgctgagcgtttttcgcaatatttcaatggatgttcggtcatacaagtccctggttttacctatcctgtcaaaactttctatttggaggatgtgctttctattctgcagtctgcaggtgataaccatcttaccagtcataaaacagagggcagcgttttaactcacgatttcaaaagctcaatggatgattcaattaatctggctttggtcaatgatgaatttgatcctcttcttgagcttatttctgcagagcagaacacagaagtctacaattaccagcattcagagactggtataactcctttaatggtttttgctatgaagggtcagcttggggacgtctgtatgcttttatcttttggtgtggattgttcagcacaggatcatgatggaaaatccgcattagattgggcacaacaagagaatcaacaagaggtctgtgaagtaataaagaaacatatggagtgtagttcagaaaaatcaactgaagataacgagctgcttaacaagtacttggcatctattaatccagagcacattgatactctgctaattgaacggctgcttcgaaaaatttgtgtggattccaatgaaggagccatcttggtattccttcctggctgggaagatatcagtcaaacacgtgaaagattatttgcttctccattctttcaggattcatcaagatttcttgtgttgtctcttcattctatgatcccgtcctcagagcagaaaaaggttttcaaacgtccaccagtgggggttcgtaaaattattctctcaactaatattgcagagactgctgtgacaattgatgatgttgtgtttgtcatagatagtgggagaatgaaagagaaaagttatgatccatacaataatgtgtccacacttcatgcttcttgggtttcaaaagccagtgcaagacaacgcgaagggcgtgctggccgatgtcagccaggaacttgctatcatctttactcaaggtttagagcttcatccttgccagactaccaaattcctgaaataaaaagaatgcccattgaggaactttgtttgcaggtcaaactgcttgattcaaactgcagaatagcagactttctgaagaaaaccttggaccctccaattccagaaactgtaagaaatgctattgctgtgcttcaggatcttggtgctttaacacaagacgaacaactaacagaattaggagaaaagctgggttccctgccagtccatccatccaccaccaagatgctcctgtttgctatattaatgaactgcctggatccagcattgacattggcatgtgcagctgattatagagatccatttgtccttccagtagcgcctgatgagaggaaaagggcagctgcagcgaaagttgagcttgcttcgttgtatggtgggttcagcgaccaacttgctgttgtcgcggcatttgacttctggaggcatgccaaagatagaggccaagattctcaattttgtgcgaagtactttgtctcttcaaacatcatgaatatgctatcaagcatgaggaaacaacttcagaatgaactgtctcaaagagggtttgtccctgcagatgcatctgcctgcagcttaaactctaaagatccaggtactcaggtctctatgaaaatggattttttcctttaa

SEQ ID NO: 78404 - DNA, 2914 bp, Zea Mays
ttgggcgtgggccgcttccgcgtggttccagttccaggacctcagtcctcagccagcccccatcgaccaccatggtccacctgtctggtgtgcccgttcgtccaaacccgctgcgctacccgctcgccgtctcgactagctctaggttttcattcggcgcaccggaacagcgcaccatcaagagagcgaccgccgcacaggcgcgacaccgccgcccgccggtacagccaaaccgagctcgccgcatcgaaggggcttcccgaccgccgagcgtgcttctagacgacgacaacgagcacgaggaactgatggggcggaaggggcggaaggggaagggcgcagcggccggggggagcgccggcatgaaggaggcgacgctggtgcgcgtctcaaaggcgctcgaggacttccgcgcctccaacgccgaggtgtacacatttgaacctgatatatccaaacaagagcgagctgcaatccatgagatgtgtaggaaaatgggcatgatatccaaaagttctgggatttatttatgcattatcctcctggtgatgctgatttaagtggggatgttgaccagagttctagtgataaggctgcaaacatcaaatggagaacagataatgcgttttgcaggcccgcaatgagtaaacttgatataacgaagaaagttgagatgcttgcctcaaaaataaatggatccgaacagttgagaaaggtcatggaagatagaacaaaacttcctatttcatctttcaaggatgtcatcacttcaactttggaaaatcaccaggtggttcttatttctggacaaacaggctgcggtaaaaccacccaggtgcctcaatacatcttggatcatatgtggggcaagggtgaatcatgtaagatcatatgcactcaaccacgtcggatatcagctatttcagttgctgagcgaatctctgctgaaagaggtgaggctgttggtgacacagttggatataagatacgtttggagtcaaaaggcgggaagaattcatcagtcttgttctgcacaaatggtgttcttttgagattattgataggaagaggaactaacgcttcaaaagcacgaaaccagaagcgctcattagatgatgcagttttgggaataacgcacatcattgtggatgaaatccatgaaagggataggttttctgatttcatgctgactattctaagagacttgttgcctttgtatcctcatcttcgtatggtactcatgagtgcaacaattgatgctgagcgtttttcgcaatatttcaatggatgttcggtcatacaagtccctggttttacctatcctgtcaaaactttctatttggaggatgtgctttctattctgcagtctgcaggtgataaccatcttaccagtcataaaacagagggcagcgttttaactcacgatttcaaaagctcaatggatgattcaattaatctggctttggtcaatgatgaatttgatcctcttcttgagcttatttctgcagagcagaacacagaagtctacaattaccagcattcagagactggtataactcctttaatggtttttgctatgaagggtcagcttggggacgtctgtatgcttttatcttttggtgtggattgttcagcacaggatcatgatggaaaatccgcattagattgggcacaacaagagaatcaacaagaggtctgtgaagtaataaagaaacatatggagtgtagttcagaaaaatcaactgaagataacgagctgcttaacaagtacttggcatctattaatccagagcacattgatactctgctaattgaacggctgcttcgaaaaatttgtgtggattccaatgaaggagccatcttggtattccttcctggctgggaagatatcagtcaaacacgtgaaagattatttgcttctccattctttcaggattcatcaagatttcttgtgttgtctcttcattctatgatcccgtcctcagagcagaaaaaggttttcaaacgtccaccagtgggggttcgtaaaattattctctcaactaatattgcagagactgctgtgacaattgatgatgttgtgtttgtcatagatagtgggagaatgaaagagaaaagttatgatccatacaataatgtgtccacacttcatgcttcttgggtttcaaaagccagtgcaagacaacgcgaagggcgtgctggccgatgtcagccaggaacttgctatcatctttactcaaggtttagagcttcatccttgccagactaccaaattcctgaaataaaaagaatgcccattgaggaactttgtttgcaggtcaaactgcttgattcaaactgcagaatagcagactttctgaagaaaaccttggaccctccaattccagaaactgtaagaaatgctattgctgtgcttcaggatcttggtgctttaacacaagacgaacaactaacagaattaggagaaaagctgggttccctgccagtccatccatccaccaccaagatgctcctgtttgctatattaatgaactgcctggatccagcattgacattggcatgtgcagctgattatagagatccatttgtccttccagtagcgcctgatgagaggaaaagggcagctgcagcgaaagttgagcttgcttcgttgtatggtgggttcagcgaccaacttgctgttgtcgcggcatttgacttctggaggcatgccaaagatagaggccaagattctcaattttgtgcgaagtactttgtctcttcaaacatcatgaatatgctatcaagcatgaggaaacaacttcagaatgaactgtctcaaagagggtttgtccctgcagatgcatctgcctgcagcttaaactctaaagatccaggtactcaggtctctatgaaaatggattttttcctttaa

SEQ ID NO: 78405 - DNA, 1152 bp, Zea Mays
ttttcattgtgcactcctgtacaccgcttggcagatattcatcatgatgtggacgctggtaccttgaagaaggttgttctttctgatggtgcagtcgtaacagtgaagggtgctagagctgtgagcctccggttgccgcttgaattaccacttcctctcaaccgtaccacttacaagggtcgcctctcaagcctgatatccatcgcacaagccctgcgtggtgcagcccggtctaatcagaaacccctgctctctcttcgcgttgagggtccagtttccttgtcctcgactccttccatgtctcccaaggacaagctcaagctcaaacggttggccccaggccaagtggagctctcctcacaggcgggggcaatccctgctatcaccgaagacgaggatgaaccacataaccctggattgtggcctcttttgtctctgaatggttcagatggcagcctgcaggggtttgaggagctattggcctcagtacttggaaagaaggcaggcgagaagggtaccttcaagctactgaaggcacgggcctcggctcaaacctatgtcaagatggcattcacggtggagaagaagcttgctgaaggggatgtgaactggtcaaatattccagaatggaagacgaagcccaagaggatgagagcgcactatgaagtccttgctcgagtggaggagggtcaggcgatccctgagaggatagcgcaggtacagcctttccaggccaacgaggccatgtcggagagtgtgctcaccggcaacgtcacgaggtcgaagatggaaatcgtccatccaccgccggtttacttcactctctgagtgagggaagaactggatgctgtttgatgttctcttcagagctactacacgttgggtggtgggtagtttacgctggctcgtaggcaacaaagttgtacaagcggcaagagtttgttgcctatacactgactgcgttgacatgaatattgacgttctatgtgtactgaaaggctggcaagcctttaatattatcaattggaataatgaggaataagaaaattctgtacatctttagagggccaaagggctgagttcttagtactgagaaattgggtagccttgtccctgtctatatttatatcaactggaacttgttgagtcgtg

SEQ ID NO: 78406 - DNA, 1696 bp, Zea Mays
aatttgcatccgtgccgaacacgcactgatcctcgtctccatccccacctccgcggcttagccactcgccacacttgccgttctccgctactattctactccactctacctaccgccccacgctccagtgctcgcccgccctccagaccgcacgcacgcacggcacgagctcgccgcgatgtcatggttcgctcgctccatcgctgccacactttcatctgcccactctgacgacgatgaatccgagcccgcctccggcgacaacagcccgccgcgcgcctccgaccccaccagcgccgagaccggagagactgaagaggaggaggaggagacagccgccgccgcggaggtgcctcagtccccacggatcgacgggatccggagtgacctggcggagatcgggggcagggtgaagaccggcatctcgatgctgtcgaacgccggcgcggtggcggagatctccaggttcgcgtcatcgttcctgccattcggtcccggggatcagggggaggaggaagagggcgaggcggtcggtgtgaccgaggaggtagtggtgttcgtcggtaacatctcaaagcatccgaagacatggctcgatttccccttgtttgttgatgaccgacacgcagatgatgaacagtatggacatgcagttgctatagagcggcttgtaccaagcctatcatacctcaggactgagctttgctctaccaatatgagtgaagcgtgcttctggaagatatattttgtgcttctccattcgaaactcagcaagcaagatgctgaaattctttcaacaccacaaatcctggaagcaagagaaggactactgcaaagttcaccgacaaagcacaagctgttatcagaaagcaggaatactacagaacctgaagagagtgagttgtcaccggcaagcatccaaaacaagcatggagtatctgaagcgccgtcattccaagaactaacttctgaccctgtgcctaatgttgaggctgacaagcatcctatctcaagtactgaggcagaaatagttgacaagtctgtaattcaagaagagttggtgatgaaaactgaggccaagagtttacccactgaggaatctaaccctgaccctgcggatgatgatgatgaaaaagaagtagatgattggctacaggatgtcgactctgtgcccagcaaaactggcaacaatactgcagttggggaggaggaagatgtatccttcagtgatctagaggatgactgaggggctgttattgagccaaccagctatcagtttactgttagacggtagcttcatgaagtgaagaacacttgctctgtggctttaccacttcactgcctggttcttccgattgcagtagcagaatcacgtaacaatgtccctcggtgtgtcccaattccatgttgtatctaagcagtcaccgttttctctgtacataaagttccagatgcggctgtgcattcatgctatatcgttgtccttacgagctgctttttgaaacacgagattctgaatgtaatatattagaatcatctataagctgtcggatatcatgtatctcttacatgttgatatcttcagagttccattttttttcagggaacatgatacatcatcatacatgtaatctcaaggatgaactctgcatgctaaagcttatgaggcgttgagcaggatctgttgcactcacgc

SEQ ID NO: 78407 - DNA, 1528 bp, Zea Mays
aaacccaaacacgctacggaatccaccgccccgaagccggcaagcggccaacccctcacgcgcatccgtccgtccggttcccgtctcgatcggacaaacctggaaccattggtcttcgccccccttgcaccagtccacgccccactcccagtctcccactcgctgcagtctggcactgttctcgggagaggcgtattgctgtcctcccgcaccgcaccacaccgcaccgcaccgcaccacgttagcggctcggggtcgggggttgggccaatcccttccccggcagacggcagtcgcatcgcatcccctccgcctcgttccttgctcggctcgccccaacttcgctgccggccgccgccgccgcattcccctcggctactcgctcctcgtcgctccccggtgatgtctggcggtaacgcatggtcgccactgccttcgcacggatttggattttgaactatcagatgaacagtatggacatgcagttgctatagagcggcttgtaccaagcctatcatacctcaggactgagctttgctctaccaatatgagtgaagcgtgcttctggaagatatattttgtgcttctccattcgaaactcagcaagcaagatgctgaaattctttcaacaccacaaatcctggaagcaagagaaggactactgcaaagttcaccgacaaagcacaagctgttatcagaaagcaggaatactacagaacctgaagagagtgagttgtcaccggcaagcatccaaaacaagcatggagtatctgaagcgccgtcattccaagaactaacttctgaccctgtgcctaatgttgaggctgacaagcatcctatctcaagtactgaggcagaaatagttgacaagtctgtaattcaagaagagttggtgatgaaaactgaggccaagagtttacccactgaggaatctaaccctgaccctgcggatgatgatgatgaaaaagaagtagatgattggctacaggatgtcgactctgtgcccagcaaaactggcaacaatactgcagttggggaggaggaagatgtatccttcagtgatctagaggatgactgaggggctgttattgagccaaccagctatcagtttactgttagacggtagcttcatgaagtgaagaacacttgctctgtggctttaccacttcactgcctggttcttccgattgcagtagcagaatcacgtaacaatgtccctcggtgtgtcccaattccatgttgtatctaagcagtcaccgttttctctgtacataaagttccagatgcggctgtgcattcatgctatatcgttgtccttacgagctgctttttgaaacacgagattctgaatgtaatatattagaatcatctataagctgtcggatatcatgtatctcttacatgttgatatcttcagagttccattttttttcagggaacatgatacatcatcatacatgtaatctcaaggatgaactctgcatgctaaagcttatgaggcgttgagcaggatctgttgcactcacgc

SEQ ID NO: 78408 - DNA, 2595 bp, Zea Mays
aacggtcggatactgaagtactgaacggttcgagtttggaacacttcattccgccccgtccccaatctctccatctccggctctccaccttccacaaatccccaaatcgccacatcaaatcgaatccacccaccacggaccacgcattcgccatggagtttcccaagcgagggcgagcttttctccaaggagccccaaggcgacgatacctggagctgccacgggggccgacgagaacgcaagctctaagcatctcgtgccggtgggggccgcgtcgccgaagaggaagaaggtgctcggggagaggaacgacagcggcgtcgggggcatggagggcgccgcgtcggcaccagtgcagcagccaaagctcgcgttgagccccccgacacccgcgagccgcggcgcggggccgtacgacccgaagacgaactacaccacgccgcggccggcgttcctgcgctacgaccccgaacggcgtcgcgagatcctcctccgggtgtcgcgtgcggcagaggtgatggacgacgactgctctagcaccacatccggcactgcggcctcggaggaggacggtggctcgtccttggcctcggacgcggcggcaggctcccttatctcgtcgccgccaaggagcgactccgaggccgagcttgatgacagcgaggaggaagaggaagtagtcccagctcgtcgaggccggtgggccaggcggttgcttctgttgctcgtctgtgtgtcctgctcgttctgctacatgtattgcgccaaaccctctggctttcctacttattcagaagacgcacttgatttggatagaggtattgggggcatgtacgatgcctatgatcatgaattagactcactgagattgttagggccagttcatatgatgggtccagaggatgtgctggaagaaattacaaatcaacttgtgcacgaggactctaaaagtgtggaccatctgtatggcaacagagctcctagaaatctggtggcagttgctatggtagggctagctgatatctgcctcaatgtttcttcaggagaatttacatgccaaattgggggtgaaaaaggtgagaatgtgcctgatttgaaggaagattctgaaatggacaaactcgatacagaactgacaatctcctttcagaatgacaagcaaagcagtgaagttgattgcctgggtggaaacgccccactggattccattggttccacttctactcacactgataacttggagggcagtttggaatcattccatctagaggaatgggatgattactcaaatcaatctgaactgcagttagtctccatggagagggctataaaatcagcaagttacaagctgaaagacagaacgggtttggaaagtgaggagttggatctatggcagtatgagaatacagcagaagctgctaaaacaatatgctctactgtaaaatttctgtggtctgcaatggaacctcacttgctgcaggtattggcatgcttgtcttttgcaggtttggtggctgcattatataggtattatcaaagatcaagagagtgctgcaactgcatcataacctatgactcacttgctgaacaaccattgttagttcaacatcaagttgcgcagctgtcagtgacttcagttcgagatgcacagctacctgttcactcttcggagcaacctatacaattggcaattcctaaccaaggcacggctggtagtttggaggttcctatggagttgacattgcccaagctggacccattggtcagtcttgaggatcctgcacaagagtcattgcccatgacagacccactggtcaccgtcaagattcctgtgattggtcgtgggatccatgatcagaaacttaaacgtggggattctgagaacattaaggcttcaaatggtatgtttctgaaccatagtgacgttgacagctccaagccaccagtggttgaactacttggagagttcgtgcttgcaagtagctcaagagaaagatctaccaagaaattgtatcagaatgctggagatgctacagataagaaattgttgaaacctttgaaaaaggatgaggatgttgaaaagatgcagatgcattcaagcatcatccaaagccctagtgttggaagagccaaaaaagagcaggagaaatctataaaccgggagaagaccgatgcgacgccaactccactgagacgctcaagccgcctccgcaacaaggtgacttctccctgaccaaaatccaaggtgctcagctcgtcgttcgctaacctttggatgctgggttcctctgtggtgtggtggaaagctgtggacgggacagcacctagttgttacccaagctttgatattgtactttaggagcagaacaatgttttaccagaatatatgctgcgtatttgtcccctcttaatatcctcctcatgtgcatgaatttctcgtaatggtggctacacttaagctttccggctagagatgtctgcaacgaacacatatgtggcctcttagtttattttagtcctacattggtggcgtacattattctgtctcgttttagtaactgatttgttttacatgtcataccagtgataccaccg

SEQ ID NO: 78409 - DNA, 1010 bp, Zea Mays
taataaaatatgaatttgacataggaacatgtgaatgtgaggacatacaaaccttagctgcacttcaaagtcccaatgtacgtccaattcctgttgtcgcggcagatctcgggcgagtggggcggcgccgaggacaagttgcaagggcaggggttttgggtgtgcctaggcaggggctagaccacgggggttgctggccgcgcctagcaggggctcaccggggcagggccaccagccagctagttgcgccttgctgtgggttataggccaccgcgctgggctgcacaggggttggggcgagaggagtagaaggggtgtgcttgccatggtgcaggggcgggctagggcacgatggtcgccatggccgcacttaggaagggaggcgctggtcactggggctggggaaggggccacggtggggaggagagtcgagggttgagggggcaccagtcacgcgagcggaagagggctcagtgtctgtcggggtgggggcgtcggggccgttgtggccatcgaagacactgacgatggtgccgaggggtagaggcgggatccgggtctcgagcggcctgggcgctgcgggaaggcgagccaggcgaggacgaggaggtaggggggaggagcaccgcgaaggcagtctccgagagcgggaccgtggtggagaaggcgagcacggccgccgcgcccagcgtgttgagctgcttgatggagaagaggtagtggtggtggtgcgggcgcgccgtgggagaggtgggcgtcgggtgcagcggcggcgggggcgcgcccatggatggcagcgtgatgcctccccccgccgtcgggccaacgccgcctgacctaaggcgctcggagcgggagcaggagcggcgtgcggctcacgggcttggctggatgctggaagcggcgggatccgcatctagcggcggacgggggtgggggcaatgcggatggggcggtcgggcgacatcggtggcataacttgcgtgattgacggagcgcgtgggcgagag

SEQ ID NO: 78410 - DNA, 150 bp, Zea Mays
atggcatcagacggaccctatccaaggatgtcaatgggttctcttgcccgatatcttcctcctctccttcctctccccctcagcacgtccggattctcttgcccaggtctcttgtcgtggaaagatgtcaatgggcgtaacacttcttag

SEQ ID NO: 78411 - DNA, 302 bp, Zea Mays
cttcgctttggaagctttgtgcgcctttatacttttatagtggtaggataaacatggtgatgtgtcatgctataagataacaaaaaaaagggctagaagcgaagggaattacagggaaacatgattgtaaacatggtgtcggggtccttaaaaacatccatccgcttaatggtcgatctggtagctaaacccaagttttctttgcaaagaaatattccgaaaaaataggcatgatttcacctactgataatatcatatgattggagttgctttcgataaccaagtcaccatcagctaagaag

SEQ ID NO: 78412 - DNA, 571 bp, Zea Mays
tcgaattcatatttaaaatatattatatgctaaacaatattacagaaaaaaataatactccctccgctccaaaatataatttgttttagactaaacatacattcattaactaacctatgaatatagggggtgtttggtttgtggaatcacttcatcctagataaagtggtgtatcatgagtctattcattaatagggtgtttggtttgaggaatcacttcatccaacatgaggtgatgtattataagtttattcttcatatttgataggatgaactcattcatcatattaatactaactaattaactacgaggaatgaattagtgatgaatcaactcatttcatttcacaaccaaacaaaaaagtgaagagtgagaagataattgactagtttattccttaaaccaaacaccatatatatttggtaagatgacctaattcctcatgttattattaactaactaactatgaggaatgagttggtgattaatcaactcatccaatccaaaaaaaagaggagtgaaaagatgacggactatctaattactcaaattaaatatcctaagaggtta

SEQ ID NO: 78413 - DNA, 655 bp, Zea Mays
atattcttaagattgctgctatatggtgcaagtgctgcagttaatgcaactatgcttcttcaaatttttctgtatcccaagggactagtgtatatttactttgtcattcctgttccagctgcacttatgggcgcaggtttgattggtgctgatttagtgaggttgaagaggcatggcgatgtatcaggttcagctcctttagggggcgccctggctgctgctcttgtgtgggctcgaattaggaaaggctggatctgatcttctaatgtcatatatgtggatggaaagtgcaaaggcaattgggtttctgctcctggatctgcagtcaccttctggcttattgggttgaaatttgcaattgttatcagataatttgcttagaattgagaggataccttataaaacatactctatccctgcattcttttttatttgtcgtggtttagtttaaaaacaaactagcggacgataaatatttgagagcagaggtagtactactttctgttctcgtgggctctgggctgggcttctggaggatattgtcaactctgtcagctgaaatttttagagtccagtgagcttttctggcaaagctgttacaaaaaaccatttggcaaaatgacttctacactgttttttttaaacaggcattgtc

SEQ ID NO: 78414 - DNA, 918 bp, Zea Mays
gtcctctctggcacaagagttgtcctcaacttgttgtagcttcgaggggcatatcctccaattggcttattggcagcaaacatgaaagccttcctagaatatgggttatgtgcaagattaagaggcagaccgccagtattacgaatgtgtttggtcctgcctttctattgaagttgtatgttggtggagcacttactggatcagtattcttcttgctggagaaggcttttctagcctatcggaaacaggattatgtaggatgggatacttcaagagctgctgaacttggtgcaagtgctgcagttaatgcaactatgcttcttcaaatttttctgtatcccaagggactagtgtatatttactttgtcattcctgttccagctgcacttatgggcgcaggtttgattggtgctgatttagtgaggttgaagaggcatggcgatgtatcaggttcagctcctttagggggcgccctggctgctgctcttgtgtgggctcgaattaggaaaggctggatctgatcttctaatgtcatatatgtggatggaaagtgcaaaggcaattgggtttctgctcctggatctgcagtcaccttctggcttattgggttgaaatttgcaattgttatcagataatttgcttagaattgagaggataccttataaaacatactctatccctgcattcttttttatttgtcgtggtttagtttaaaaacaaactagcggacgataaatatttgagagcagaggtagtactactttctgttctcgtgggctctgggctgggcttctggaggatattgtcaactctgtcagctgaaatttttagagtccagtgagcttttctggcaaagctgttacaaaaaaccatttggcaaaatgacttctacactgttttttttaaacaggcattgtc

SEQ ID NO: 78415 - DNA, 2174 bp, Zea Mays
aaggaatccggcggttaccgatcgagactagttccaaccaggagttggaaacgaaacctccacccaggaacccctgctcgagccggcggaggcggcggccggagcagattaacagagcttttcgagcttgcaaggaggattcaacatgcggaggaagctgctgcagttcccgtccctcgtcgcgcagcacgccctccgcggggccccaacacccagattccaaccccagccccaccaccaccgcttcctgcactccccctccgcgcccacatccgcatccccttcctcctccccgtcggcccacctcatatggaatcgcctctccggctctaccgggatctctcccttaccgaggaccgccgcggacgtcgcagcggccgcgcggaccgccgcgtcccggtggttggccaccgcgcgcggcgcccgctctctcgatctcttctcgctgccgcggtggcgcagggcctcggggcggcagttctcgccttcccctttcctccaaggcgcgacctgggcgtcctggatggagtccgccgacggggcggtgtggatgctcatcggtgcgaatgttgctgtcttcctgctgtggcgtgtggccgatccagggttcatgaggaagcatttcatgatttcactggacaatttcaagagtggacggttgcacaccttgctcacgagtgctttcagccatgcagagtttaatcacctctttgccaatatgtttggcctcttcttctttgggagcagtattacgaatgtgtttggtcctgcctttctattgaagttgtatgttggtggagcacttactggatcagtattcttcttgctggagaaggcttttctagcctatcggaaacaggattatgtaggatgggatacttcaagagctgctgaacttgtatgtggtttcctgttccaacaacatattcttaagattgctgctatatgtacaaccgcttttgccaattgtacaattcttttacaaccagcacatcaaatggttcatatcacttgggaattggttacttttgaatcaacgggtctcgataatcagatcacctggttgttttgttgttgtttaaatgggttgtatgtcaatcatttcacggtcttaatttagtttatactaaaagaagctatattaccaaaggcacgcttggtgtagtggtgagagttgtctcactgagttaccaggtcacgagtttgaagcagcctctctgaggacaagacctgtctcagtttattccttccccagatctcactcatgtgggagtctccaacatccgacagtaggtttgccttttaaaaatagctacatgaccttatacttattcatggatggtagagtttggcccaatatacaatacaactattcattcaatcatcatgtatctatgaataaaatagacataggcccatacaaggtgatatggcaattgaatccagtctaatgtttgacgactgtatgagcattattgatggcattgcacatacgttacttcattctaaatttgattccttctgttgtgttcatgtcactcagggtgcaagtgctgcagttaatgcaactatgcttcttcaaatttttctgtatcccaagggactagtgtatatttactttgtcattcctgttccagctgcacttatgggcgcaggtttgattggtgctgatttagtgaggttgaagaggcatggcgatgtatcaggttcagctcctttagggggcgccctggctgctgctcttgtgtgggctcgaattaggaaaggctggatctgatcttctaatgtcatatatgtggatggaaagtgcaaaggcaattgggtttctgctcctggatctgcagtcaccttctggcttattgggttgaaatttgcaattgttatcagataatttgcttagaattgagaggataccttataaaacatactctatccctgcattcttttttatttgtcgtggtttagtttaaaaacaaactagcggacgataaatatttgagagcagaggtagtactactttctgttctcgtgggctctgggctgggcttctggaggatattgtcaactctgtcagctgaaatttttagagtccagtgagcttttctggcaaagctgttacaaaaaaccatttggcaaaatgacttctacactgttttttttaaacaggcattgtc

SEQ ID NO: 78416 - DNA, 1563 bp, Zea Mays
cggctatttaaaaccttggtcacaactcacaacggcaaggaatccggcggttaccgatcgagactagttccaaccaggagttggaaacgaaacctccacccaggaacccctgctcgagccggcggaggcggcggccggagcagattaacagagcttttcgagcttgcaaggaggattcaacatgcggaggaagctgctgcagttcccgtccctcgtcgcgcagcacgccctccgcggggccccaacacccagattccaaccccagccccaccaccaccgcttcctgcactccccctccgcgcccacatccgcatccccttcctcctccccgtcggcccacctcatatggaatcgcctctccggctctaccgggatctctcccttaccgaggaccgccgcggacgtcgcagcggccgcgcggaccgccgcgtcccggtggttggccaccgcgcgcggcgcccgctctctcgatctcttctcgctgccgcggtggcgcagggcctcggggcggcagttctcgccttcccctttcctccaaggcgcgacctgggcgtcctggatggagtccgccgacggggcggtgtggatgctcatcggtgcgaatgttgctgtcttcctgctgtggcgtgtggccgatccagggttcatgaggaagcatttcatgatttcactggacaatttcaagagtggacggttgcacaccttgctcacgagtgctttcagccatgcagagtttaatcacctctttgccaatatgtttggcctcttcttctttgggagcaattacgaatgtgtttggtcctgcctttctattgaagttgtatgttggtggagcacttactggatcagtattcttcttgctggagaaggcttttctagcctatcggaaacaggattatgtaggatgggatacttcaagagctgctgaacttggtgcaagtgctgcagttaatgcaactatgcttcttcaaatttttctgtatcccaagggactagtgtatatttactttgtcattcctgttccagctgcacttatgggcgcaggtttgattggtgctgatttagtgaggttgaagaggcatggcgatgtatcaggttcagctcctttagggggcgccctggctgctgctcttgtgtgggctcgaattaggaaaggctggatctgatcttctaatgtcatatatgtggatggaaagtgcaaaggcaattgggtttctgctcctggatctgcagtcaccttctggcttattgggttgaaatttgcaattgttatcagataatttgcttagaattgagaggataccttataaaacatactctatccctgcattcttttttatttgtcgtggtttagtttaaaaacaaactagcggacgataaatatttgagagcagaggtagtactactttctgttctcgtgggctctgggctgggcttctggaggatattgtcaactctgtcagctgaaatttttagagtccagtgagcttttctggcaaagctgttacaaaaaaccatttggcaaaatgacttctacactgttttttttaaacaggcattgtc

SEQ ID NO: 78417 - DNA, 1660 bp, Zea Mays
ctcaagtgctaggcaaatatggctagcgatggaaaggaaatgacgagctggatacgatgacgagtttgaagatctagaccttctgaatatagccccggctatttaaaaccttggtcacaactcacaacggcaaggaatccggcggttaccgatcgagactagttccaaccaggagttggaaacgaaacctccacccaggaacccctgctcgagccggcggaggcggcggccggagcagattaacagagcttttcgagcttgcaaggaggattcaacatgcggaggaagctgctgcagttcccgtccctcgtcgcgcagcacgccctccgcggggccccaacacccagattccaaccccagccccaccaccaccgcttcctgcactccccctccgcgcccacatccgcatccccttcctcctccccgtcggcccacctcatatggaatcgcctctccggctctaccgggatctctcccttaccgaggaccgccgcggacgtcgcagcggccgcgcggaccgccgcgtcccggtggttggccaccgcgcgcggcgcccgctctctcgatctcttctcgctgccgcggtggcgcagggcctcggggcggcagttctcgccttcccctttcctccaaggcgcgacctgggcgtcctggatggagtccgccgacggggcggtgtggatgctcatcggtgcgaatgttgctgtcttcctgctgtggcgtgtggccgatccagggttcatgaggaagcatttcatgatttcactggacaatttcaagagtggacggttgcacaccttgctcacgagtgctttcagccatgcagagtttaatcacctctttgccaatatgtttggcctcttcttctttgggagcagtattacgaatgtgtttggtcctgcctttctattgaagttgtatgttggtggagcacttactggatcagtattcttcttgctggagaaggcttttctagcctatcggaaacaggattatgtaggatgggatacttcaagagctgctgaacttggtgcaagtgctgcagttaatgcaactatgcttcttcaaatttttctgtatcccaagggactagtgtatatttactttgtcattcctgttccagctgcacttatgggcgcaggtttgattggtgctgatttagtgaggttgaagaggcatggcgatgtatcaggttcagctcctttagggggcgccctggctgctgctcttgtgtgggctcgaattaggaaaggctggatctgatcttctaatgtcatatatgtggatggaaagtgcaaaggcaattgggtttctgctcctggatctgcagtcaccttctggcttattgggttgaaatttgcaattgttatcagataatttgcttagaattgagaggataccttataaaacatactctatccctgcattcttttttatttgtcgtggtttagtttaaaaacaaactagcggacgataaatatttgagagcagaggtagtactactttctgttctcgtgggctctgggctgggcttctggaggatattgtcaactctgtcagctgaaatttttagagtccagtgagcttttctggcaaagctgttacaaaaaaccatttggcaaaatgacttctacactgttttttttaaacaggcattgtc

SEQ ID NO: 78418 - DNA, 786 bp, Zea Mays
aaggaatccggcggttaccgatcgagactagttccaaccaggagttggaaacgaaacctccacccaggaacccctgctcgagccggcggaggcggcggccggagcagattaacagagcttttcgagcttgcaaggaggattcaacatgcggaggaagctgctgcagttcccgtccctcgtcgcgcagcacgccctccgcggggccccaacacccagattccaaccccagccccaccaccaccgcttcctgcactccccctccgcgcccacatccgcatccccttcctcctccccgtcggcccacctcatatggaatcgcctctccggctctaccgggatctctcccttaccgaggaccgccgcggacgtcgcagcggccgcgcggaccgccgcgtcccggtggttggccaccgcgcgcggcgcccgctctctcgatctcttctcgctgccgcggtggcgcagggcctcggggcggcagttctcgccttcccctttcctccaaggcgcgacctgggcgtcctggatggagtccgccgacggggcggtgtggatgctcatcggtgcgaatgttgctgtcttcctgctgtggcgtgtggccgatccagggttcatgaggaagcatttcatgatttcactggacaatttcaagagtggacggttgcacaccttgctcacgagtgctttcagccatgcagagtttaatcacctctttgccaatatgtttggcctcttcttctttgggagcagtccaagaaattcaagagtggacacctttgagcatctgat

SEQ ID NO: 78419 - DNA, 3243 bp, Zea Mays
gaaatatgcactttattatggttcgtggtattatatagtcaagtgggctgatgggaagaagtttgaggacaaatttgtggataccttgcttaaatatggatacaaaggtcaatatatgtcagagaattggctgaagcagccattgtttatacaatcctttgctcccacctccattgtacatgtatcagattttattgactctcccaaggtatttttgattgatgatatcagtgtgagaacacaagacacgaaccagtcatactgggaaattacttcagatgactaccttgcatacattagtaaatatgtcgttggccttggtccatggaaggacactattgttccagcttcaggaaactacttgatgccacctagtgatcttgtcgcacgggcacatgctcataatctccaggtacatccatacacgtacaggaacgagaaccagttcctgcacttcaacttttttcaagatccctacaatgaatacgacttctggataaacactgtgggggttgatggactgtttacagatttcaccggaacccttcacaggtaccaagaattgacatccccacaccggaaggatgagactgcaaatagcctcctagtaaaaattagccaaatgatctcagcatatgaaggtctctgatcagcacgacgttgctgaaaattgtttgtgcttttgttaatcgatctgcaagagcacacgatccattcatcacggacggtgcaacgtgacactgtgactttgcaaggttaaataaacgagttgtttctggttgggacttgttagcacgagccgtactctccattaaagctcttaaaccctgtgagaaatttctagtgtgggaataattgttttcacgatagaaaccgtatcatggtttagcgtgccaggatggacgagttggtctcgggtctttgcacagttggcctacaattgtacttgccggagtgttgaaatttctagtgtgggaataattgttttcacgatagataaacgctcttgtcactcttatcctcttttatgctgcttaagtaacacgctgtttgttggttcatcagtcactgcctaccagggccaggtgcccaacatgccaattgccatagcacgtttgtttaagtttgactctaacagactggagacagtaatgaaggattctcagacgaattttggaggaatatgattccagccttttgacgacatataagaaggatcaaaatgcccaagaaatggattgaatatgattccagcgttttgagttttgacgatgtataaaaggattaaaatgtccaagagataggtgaattaagatttatataaggggcgtccgactgcgcgtggtcaacggctgcactattgtcggacgttacaagtcgatggatgcccggagtcggacgtgaaggcaacactactatgagaagctaaggaccttagaccctggtcgagaagccaaacagcaggatgaactcactgtgtatacatatgacatttctgaaatggcaatggcaagacttgaagaggaatttgtttatcttcttacacattacaaacaggaggttctctcttttcgctctacagaggatggtagtgtggaagacttttcaagcaggagcagctcatttaatgaggaacaattggaagggaaggcaacaccaaataatatcagtggaggaccagaatattttgtgcctgatttaattcaacctggtgcactctctgctgtcaagttcattgctaaattcatgttcctgtatggctatgataaggagtgttgccaggcttatataaactcaagacagagtgcaacagatgagtactttgggtctcttggtctggaaaacctcagtatagaggagcttatgaacacaagttggaacagaatgaattcattaataaagagatggaactgggcaattatggtttttcttcgggtgtaccttgtaagtgagaaacgctttagcaaacatgtctttggtgaactttcagtttcaactgcagacttgtgcttctctgagatttcatttaactcagttatacaacttctgagcttttatgtatctgtagcaattggtcccccaaaaacagaaaaagctttttagattgcttgatatgtatgaagtccttgctgatcttctccctgaagctgaatccttgtttgaatcaggatacaatgatatgatcctgaatgagtaccatgaagcactactgcaactgggagaatctgcaaggaagacatttgcagaattcaagtatgccatccaatcatacacttcatccagtgcagtagctcgtggagaagtgcatccacttacaaagtatgttatgaactacataaaggctctcacagcatacaacaaaactctcgattcacttctcaaggacacggatcgaagatgcctggtttctgacattcagctgatggcaaacccatatcctaatttcaccgcaacagctttcaatctacaatctgttactgcagttctggaggcaaatcttgaagctgggtctagactgtacagagatgatcgattgcagtacatcttcatgatgaacaacatccactacatggttcagaaagtgaagaactcggatctcaaaagctttcttggcgatgaatggatccggatccataacaggaaacttcagcagcaagctacgagatatgagagggcgtcatggaataatgttctcttacctcagtgatgatggcctgtgtgctgctggtgatgctgcttctcgcaaaaccatcagggaggagataaaaaatttcaatctgtcctttgaagaggtttaccaagttcagacagcatggtctgtcccagatgaccaacttcgcgatgatgtccggatttcaatatcactgaaagttatacaggcctacaggacgttcgtgggaagatattcaggcttgcttgatagcacaaagcatcgttacatgaagtacaggccagaggatttggagacacttttaatagatctttttgaaggaactcaaaggacactgcagcattctgccaaactagcatgatttttgccttttcttcatgccctttcatgctgcctagctttcctttccttatgacattgtagaagtacatatgctgttagagatagcattctactgatttggtaacagggtgtatagcttccgaatgttttgatagtgatacagtgattcttcattcctgatccatttaatgatttgcctccatgaaaatggaggatatgtgttggtctac

SEQ ID NO: 78420 - DNA, 5771 bp, Zea Mays
gaacgactagcgaggggagaccgagagagcagaggcgctcagcacggagcgaggcgccgcgccgtttccttttctgctccactgcaaccggagtccggagcatagcaacctcgctgggctcccatatagcgggcccgcggagccgggatatactccagggaagtcgagcaaggagagcgtggattgtggactacaggggtaaagatcgagtgagcatcgcttcaccatgcgcccttctctctgctgcgcacctctttttcttctgctactattacatttggcatttgctagacctctctttcctctaccgagtaagacaaagaatgaagagaagaagcccatacagacgtttcggccatataacattgctcatcgtggatcaaatggggaaattcccgaggaaacagctgctgcatacatgagagctattgaagaaggggcggattttatagagtctgacatccttgctagcaaagatggggccttgatttgttttcatgatgtaacacttgatgatacaactgatgttgccaagcgtaaggaatttgccaatcgaagaagaacctatgaagtggagtggtttaatgttactggatggtttgtaggtttgcatcgtacaaccaaccctgattccttcactccttttgttattaccattttaatttacatatctgctacatgaaatatagttaagcaacaaggaaataacaatgcctccctgctgtgttttcttgactctacttcaggaatttattacatgctcatctatactggaacactatttacatataatatgttggcagtttgatgttacttggaggggtggaatgagaatgacaaacttgtaagcttttggaaagagaaaaaaactagacctcttgggaaagactgcccaacagctttgatgttaggtagatgcaaaccactattgtgtctagaaaagatcctgaaggttgcctgcccatgaggcacaccctgtgcctgctgctaaaaatagtttgcacaaccagggccttttttaatgcagaaccatggggagcactcatagggtctccaacccggatctgtgtatcccaaggaatgcccccaggcaccgctctaagcttatgtgttcttgattatttaaaattttaaactaatattgaagtgttggtttgcagtggacttcacactggaggaacttaaaacacttagagtgaagcagagatactcgtttagagatcaacaatacaatggtatgtatatccttcgcatggattttgttatcaacttgtaataattgtttcatgccatacttcgtcttctatgaccatgctgatgtgctccaactccaaagagccttgaagttatccttgtcacatctcacatgcatgtgcatttgctcaaatggcctgcagctgccagtttatttgcttcttactgtaactgccataaacttggcaattagctggaaataattagtttcatcactcgccagtcaaatattctgattcttctcctgaggtaatattctgataagttgctatgcactgtaaacaacataccctttgcaggtatttatgagtgcagcaatattataggaaatcagaggaattttgttgttttcattactcagaaatgtataggatgtggttcattggttcttttctcaataacatttcttcccattaactgttgatttagcatagttattactcttcacccaagcaggtattccatttcctttatgaaacccttgtttatttagaattggtacagctatattattttgtgtttgactttacttggcctaagaacacatttgcatgaactcgcatggaagattttgattgggggattaatgatagcaatctattattttctcgtgttttgtcattcaggtatgttttcaatcatcacgtttgaagaattcatttcaattgccctagatgcagacagaactgtcggcatatatcccgagattaaagatccagtttttatcaacaagcatgtcaagtgggctgatgggaagaagtttgaggacaaatttgtggataccttgcttaaatatggatacaaaggtcaatatatgtcagagaattggctgaagcagccattgtttatacaatcctttgctcccacctccattgtacatgtatcagattttattgactctcccaaggtatttttgattgatgatatcagtgtgagaacacaagacacgaaccagtcatactgggaaattacttcagatgactaccttgcatacattagtaaatatgtcgttggccttggtccatggaaggacactattgttccagcttcaggaaactacttgatgccacctagtgatcttgtcgcacgggcacatgctcataatctccaggtatgacatttgtttgtattcattgtaattatctaaagttcagattttacgtggaattattgtaaaatattctatgctaactggaccagctttcatatgttaactgccatcttctatgttttttttttgtctaaatgcatctggtcacttaggataaccagaaggatcctacaaaacatcatagctctcttgtagttttggtctcacgtgcataagtgtattgactaaaaatatggccaatcacattgacactcacatctctctactttcttttgggaaggctacttacagctgtgtcctgatcctcaccgtgtcatatgtgttgaactgggaggactgccttccttccttcaaaaaatggataagagctccctaataacaagtggtctgcttcagtaaaactttggttgaatctcaaactggctcattaagcttgtgtttagctatgcattatggtgcaaactgtctgctgcaaaacgagcatgtggatcaaattgtcacactgctacatgccactttttttttctacgcttgtttcatcgaagcatgttaaactgcatcctgttgttgtgcaggtacatccatacacgtacaggaacgagaaccagttcctgcacttcaacttttttcaagatccctacaatgaatacgacttctggataaacactgtgggggttgatggactgtttacagatttcaccggaacccttcacaggtaccaagaattgacatccccacaccggaaggatgagactgcaaatagcctcctagtaaaaattagccaaatgatctcagcatatgaaggtctctgatcagcacgacgttgctgaaaattgtttgtgcttttgttaatcgatctgcaagagcacacgatccattcatcacggacggtgcaacgtgacactgtgactttgcaaggttaaataaacgagttgtttctggttgggacttgttagcacgagccgtactctccattaaagctcttaaaccctgtgagaaatttctagtgtgggaataattgttttcacgatagaaaccgtatcatggtttagcgtgccaggatggacgagttggtctcgggtctttgcacagttggcctacaattgtacttgccggagtgttgaaatttctagtgtgggaataattgttttcacgatagataaacgctcttgtcactcttatcctcttttatgctgcttaagtaacacgctgtttgttggttcatcagtcactgcctaccagggccaggtgcccaacatgccaattgccatagcacgtttgtttaagtttgactctaacagactggagacagtaatgaaggattctcagacgaattttggaggaatatgattccagccttttgacgacatataagaaggatcaaaatgcccaagaaatggattgaatatgattccagcgttttgagttttgacgatgtataaaaggattaaaatgtccaagagataggtgaattaagatttatataaggggcgtccgactgcgcgtggtcaacggctgcactattgtcggacgttacaagtcgatggatgcccggagtcggacgtgaaggcaacactactatgagaagctaaggaccttagaccctggtcgagaagccaaacagcaggatgaactcactgtgtatacatatgacatttctgaaatggcaatggcaagacttgaagaggaatttgtttatcttcttacacattacaaacaggaggttctctcttttcgctctacagaggatggtagtgtggaagacttttcaagcaggagcagctcatttaatgaggaacaattggaagggaaggcaacaccaaataatatcagtggaggaccagaatattttgtgcctgatttaattcaacctggtgcactctctgctgtcaagttcattgctaaattcatgttcctgtatggctatgataaggagtgttgccaggcttatataaactcaagacagagtgcaacagatgagtactttgggtctcttggtctggaaaacctcagtatagaggagcttatgaacacaagttggaacagaatgaattcattaataaagagatggaactgggcaattatggtttttcttcgggtgtaccttgtaagtgagaaacgctttagcaaacatgtctttggtgaactttcagtttcaactgcagacttgtgcttctctgagatttcatttaactcagttatacaacttctgagcttttatgtatctgtagcaattggtcccccaaaaacagaaaaagctttttagattgcttgatatgtatgaagtccttgctgatcttctccctgaagctgaatccttgtttgaatcaggatacaatgatatgatcctgaatgagtaccatgaagcactactgcaactgggagaatctgcaaggaagacatttgcagaattcaagtatgccatccaatcatacacttcatccagtgcagtagctcgtggagaagtgcatccacttacaaagtatgttatgaactacataaaggctctcacagcatacaacaaaactctcgattcacttctcaaggacacggatcgaagatgcctggtttctgacattcagctgatggcaaacccatatcctaatttcaccgcaacagctttcaatctacaatctgttactgcagttctggaggcaaatcttgaagctgggtctagactgtacagagatgatcgattgcagtacatcttcatgatgaacaacatccactacatggttcagaaagtgaagaactcggatctcaaaagctttcttggcgatgaatggatccggatccataacaggaaacttcagcagcaagctacgagatatgagagggcgtcatggaataatgttctcttacctcagtgatgatggcctgtgtgctgctggtgatgctgcttctcgcaaaaccatcagggaggagataaaaaatttcaatctgtcctttgaagaggtttaccaagttcagacagcatggtctgtcccagatgaccaacttcgcgatgatgtccggatttcaatatcactgaaagttatacaggcctacaggacgttcgtgggaagatattcaggcttgcttgatagcacaaagcatcgttacatgaagtacaggccagaggatttggagacacttttaatagatctttttgaaggaactcaaaggacactgcagcattctgccaaactagcatgatttttgccttttcttcatgccctttcatgctgcctagctttcctttccttatgacattgtagaagtacatatgctgttagagatagcattctactgatttggtaacagggtgtatagcttccgaatgttttgatagtgatacagtgattcttcattcctgatccatttaatgatttgcctccatgaaaatggaggatatgtgttggtctac

SEQ ID NO: 78421 - DNA, 4531 bp, Zea Mays
gaacgactagcgaggggagaccgagagagcagaggcgctcagcacggagcgaggcgccgcgccgtttccttttctgctccactgcaaccggagtccggagcatagcaacctcgctgggctcccatatagcgggcccgcggagccgggatatactccagggaagtcgagcaaggagagcgtggattgtggactacaggggtaaagatcgagtgagcatcgcttcaccatgcgcccttctctctgctgcgcacctctttttcttctgctactattacatttggcatttgctagacctctctttcctctaccgagtaagacaaagaatgaagagaagaagcccatacagacgtttcggccatataacattgctcatcgtggatcaaatggggaaattcccgaggaaacagctgctgcatacatgagagctattgaagaaggggcggattttatagagtctgacatccttgctagcaaagatggggccttgatttgttttcatgatgtaacacttgatgatacaactgatgttgccaagcgtaaggaatttgccaatcgaagaagaacctatgaagtggagtggtttaatgttactggatggtttgtagtggacttcacactggaggaacttaaaacacttagagtgaagcagagatactcgtttagagatcaacaatacaatggtatgtatatccttcgcatggattttgttatcaacttgtaataattgtttcatgccatacttcgtcttctatgaccatgctgatgtgctccaactccaaagagccttgaagttatccttgtcacatctcacatgcatgtgcatttgctcaaatggcctgcagctgccagtttatttgcttcttactgtaactgccataaacttggcaattagctggaaataattagtttcatcactcgccagtcaaatattctgattcttctcctgaggtaatattctgataagttgctatgcactgtaaacaacataccctttgcaggtatttatgagtgcagcaatattataggaaatcagaggaattttgttgttttcattactcagaaatgtataggatgtggttcattggttcttttctcaataacatttcttcccattaactgttgatttagcatagttattactcttcacccaagcaggtattccatttcctttatgaaacccttgtttatttagaattggtacagctatattattttgtgtttgactttacttggcctaagaacacatttgcatgaactcgcatggaagattttgattgggggattaatgatagcaatctattattttctcgtgttttgtcattcaggtcaagtgggctgatgggaagaagtttgaggacaaatttgtggataccttgcttaaatatggatacaaaggtcaatatatgtcagagaattggctgaagcagccattgtttatacaatcctttgctcccacctccattgtacatgtatcagattttattgactctcccaaggtatttttgattgatgatatcagtgtgagaacacaagacacgaaccagtcatactgggaaattacttcagatgactaccttgcatacattagtaaatatgtcgttggccttggtccatggaaggacactattgttccagcttcaggaaactacttgatgccacctagtgatcttgtcgcacgggcacatgctcataatctccaggtacatccatacacgtacaggaacgagaaccagttcctgcacttcaacttttttcaagatccctacaatgaatacgacttctggataaacactgtgggggttgatggactgtttacagatttcaccggaacccttcacaggtaccaagaattgacatccccacaccggaaggatgagactgcaaatagcctcctagtaaaaattagccaaatgatctcagcatatgaaggtctctgatcagcacgacgttgctgaaaattgtttgtgcttttgttaatcgatctgcaagagcacacgatccattcatcacggacggtgcaacgtgacactgtgactttgcaaggttaaataaacgagttgtttctggttgggacttgttagcacgagccgtactctccattaaagctcttaaaccctgtgagaaatttctagtgtgggaataattgttttcacgatagaaaccgtatcatggtttagcgtgccaggatggacgagttggtctcgggtctttgcacagttggcctacaattgtacttgccggagtgttgaaatttctagtgtgggaataattgttttcacgatagataaacgctcttgtcactcttatcctcttttatgctgcttaagtaacacgctgtttgttggttcatcagtcactgcctaccagggccaggtgcccaacatgccaattgccatagcacgtttgtttaagtttgactctaacagactggagacagtaatgaaggattctcagacgaattttggaggaatatgattccagccttttgacgacatataagaaggatcaaaatgcccaagaaatggattgaatatgattccagcgttttgagttttgacgatgtataaaaggattaaaatgtccaagagataggtgaattaagatttatataaggggcgtccgactgcgcgtggtcaacggctgcactattgtcggacgttacaagtcgatggatgcccggagtcggacgtgaaggcaacactactatgagaagctaaggaccttagaccctggtcgagaagccaaacagcaggatgaactcactgtgtatacatatgacatttctgaaatggcaatggcaagacttgaagaggaatttgtttatcttcttacacattacaaacaggaggttctctcttttcgctctacagaggatggtagtgtggaagacttttcaagcaggagcagctcatttaatgaggaacaattggaagggaaggcaacaccaaataatatcagtggaggaccagaatattttgtgcctgatttaattcaacctggtgcactctctgctgtcaagttcattgctaaattcatgttcctgtatggctatgataaggagtgttgccaggcttatataaactcaagacagagtgcaacagatgagtactttgggtctcttggtctggaaaacctcagtatagaggagcttatgaacacaagttggaacagaatgaattcattaataaagagatggaactgggcaattatggtttttcttcgggtgtaccttgtaagtgagaaacgctttagcaaacatgtctttggtgaactttcagtttcaactgcagacttgtgcttctctgagatttcatttaactcagttatacaacttctgagcttttatgtatctgtagcaattggtcccccaaaaacagaaaaagctttttagattgcttgatatgtatgaagtccttgctgatcttctccctgaagctgaatccttgtttgaatcaggatacaatgatatgatcctgaatgagtaccatgaagcactactgcaactgggagaatctgcaaggaagacatttgcagaattcaagtatgccatccaatcatacacttcatccagtgcagtagctcgtggagaagtgcatccacttacaaagtatgttatgaactacataaaggctctcacagcatacaacaaaactctcgattcacttctcaaggacacggatcgaagatgcctggtttctgacattcagctgatggcaaacccatatcctaatttcaccgcaacagctttcaatctacaatctgttactgcagttctggaggcaaatcttgaagctgggtctagactgtacagagatgatcgattgcagtacatcttcatgatgaacaacatccactacatggttcagaaagtgaagaactcggatctcaaaagctttcttggcgatgaatggatccggatccataacaggaaacttcagcagcaagctacgagatatgagagggcgtcatggaataatgttctcttacctcagtgatgatggcctgtgtgctgctggtgatgctgcttctcgcaaaaccatcagggaggagataaaaaatttcaatctgtcctttgaagaggtttaccaagttcagacagcatggtctgtcccagatgaccaacttcgcgatgatgtccggatttcaatatcactgaaagttatacaggcctacaggacgttcgtgggaagatattcaggcttgcttgatagcacaaagcatcgttacatgaagtacaggccagaggatttggagacacttttaatagatctttttgaaggaactcaaaggacactgcagcattctgccaaactagcatgatttttgccttttcttcatgccctttcatgctgcctagctttcctttccttatgacattgtagaagtacatatgctgttagagatagcattctactgatttggtaacagggtgtatagcttccgaatgttttgatagtgatacagtgattcttcattcctgatccatttaatgatttgcctccatgaaaatggaggatatgtgttggtctac

SEQ ID NO: 78422 - DNA, 4174 bp, Zea Mays
gttgtggttgtgggacagtgagaacgactagcgaggggagaccgagagagcagaggcgctcagcacggagcgaggcgccgcgccgtttccttttctgctccactgcaaccggagtccggagcatagcaacctcgctgggctcccatatagcgggcccgcggagccgggatatactccagggaagtcgagcaaggagagcgtggattgtggactacaggggtaaagatcgagtgagcatcgcttcaccatgcgcccttctctctgctgcgcacctctttttcttctgctactattacatttggcatttgctagacctctctttcctctaccgagtaagacaaagaatgaagagaagaagcccatacagacgtttcggccatataacattgctcatcgtggatcaaatggggaaattcccgaggaaacagctgctgcatacatgagagctattgaagaaggggcggattttatagagtctgacatccttgctagcaaagatggggccttgatttgttttcatgatgtaacacttgatgatacaactgatgttgccaagcgtaaggaatttgccaatcgaagaagaacctatgaagtggagtggtttaatgttactggatggtttgtagtggacttcacactggaggaacttaaaacacttagagtgaagcagagatactcgtttagagatcaacaatacaatggtatttatgagtgcagcaatattataggaaatcagaggaattttgttgttttcattactcagaaatgtataggatgtggttcattggttcttttctcaataacatttcttcccattaactgttgatttagcatagttattactcttcacccaagcaggtatgttttcaatcatcacgtttgaagaattcatttcaattgccctagatgcagacagaactgtcggcatatatcccgagattaaagatccagtttttatcaacaagcatgtcaagtgggctgatgggaagaagtttgaggacaaatttgtggataccttgcttaaatatggatacaaaggtcaatatatgtcagagaattggctgaagcagccattgtttatacaatcctttgctcccacctccattgtacatgtatcagattttattgactctcccaaggtatttttgattgatgatatcagtgtgagaacacaagacacgaaccagtcatactgggaaattacttcagatgactaccttgcatacattagtaaatatgtcgttggccttggtccatggaaggacactattgttccagcttcaggaaactacttgatgccacctagtgatcttgtcgcacgggcacatgctcataatctccaggtacatccatacacgtacaggaacgagaaccagttcctgcacttcaacttttttcaagatccctacaatgaatacgacttctggataaacactgtgggggttgatggactgtttacagatttcaccggaacccttcacaggtaccaagaattgacatccccacaccggaaggatgagactgcaaatagcctcctagtaaaaattagccaaatgatctcagcatatgaaggtctctgatcagcacgacgttgctgaaaattgtttgtgcttttgttaatcgatctgcaagagcacacgatccattcatcacggacggtgcaacgtgacactgtgactttgcaaggttaaataaacgagttgtttctggttgggacttgttagcacgagccgtactctccattaaagctcttaaaccctgtgagaaatttctagtgtgggaataattgttttcacgatagaaaccgtatcatggtttagcgtgccaggatggacgagttggtctcgggtctttgcacagttggcctacaattgtacttgccggagtgttgaaatttctagtgtgggaataattgttttcacgatagataaacgctcttgtcactcttatcctcttttatgctgcttaagtaacacgctgtttgttggttcatcagtcactgcctaccagggccaggtgcccaacatgccaattgccatagcacgtttgtttaagtttgactctaacagactggagacagtaatgaaggattctcagacgaattttggaggaatatgattccagccttttgacgacatataagaaggatcaaaatgcccaagaaatggattgaatatgattccagcgttttgagttttgacgatgtataaaaggattaaaatgtccaagagataggtgaattaagatttatataaggggcgtccgactgcgcgtggtcaacggctgcactattgtcggacgttacaagtcgatggatgcccggagtcggacgtgaaggcaacactactatgagaagctaaggaccttagaccctggtcgagaagccaaacagcaggatgaactcactgtgtatacatatgacatttctgaaatggcaatggcaagacttgaagaggaatttgtttatcttcttacacattacaaacaggaggttctctcttttcgctctacagaggatggtagtgtggaagacttttcaagcaggagcagctcatttaatgaggaacaattggaagggaaggcaacaccaaataatatcagtggaggaccagaatattttgtgcctgatttaattcaacctggtgcactctctgctgtcaagttcattgctaaattcatgttcctgtatggctatgataaggagtgttgccaggcttatataaactcaagacagagtgcaacagatgagtactttgggtctcttggtctggaaaacctcagtatagaggagcttatgaacacaagttggaacagaatgaattcattaataaagagatggaactgggcaattatggtttttcttcgggtgtaccttgtaagtgagaaacgctttagcaaacatgtctttggtgaactttcagtttcaactgcagacttgtgcttctctgagatttcatttaactcagttatacaacttctgagcttttatgtatctgtagcaattggtcccccaaaaacagaaaaagctttttagattgcttgatatgtatgaagtccttgctgatcttctccctgaagctgaatccttgtttgaatcaggatacaatgatatgatcctgaatgagtaccatgaagcactactgcaactgggagaatctgcaaggaagacatttgcagaattcaagtatgccatccaatcatacacttcatccagtgcagtagctcgtggagaagtgcatccacttacaaagtatgttatgaactacataaaggctctcacagcatacaacaaaactctcgattcacttctcaaggacacggatcgaagatgcctggtttctgacattcagctgatggcaaacccatatcctaatttcaccgcaacagctttcaatctacaatctgttactgcagttctggaggcaaatcttgaagctgggtctagactgtacagagatgatcgattgcagtacatcttcatgatgaacaacatccactacatggttcagaaagtgaagaactcggatctcaaaagctttcttggcgatgaatggatccggatccataacaggaaacttcagcagcaagctacgagatatgagagggcgtcatggaataatgttctcttacctcagtgatgatggcctgtgtgctgctggtgatgctgcttctcgcaaaaccatcagggaggagataaaaaatttcaatctgtcctttgaagaggtttaccaagttcagacagcatggtctgtcccagatgaccaacttcgcgatgatgtccggatttcaatatcactgaaagttatacaggcctacaggacgttcgtgggaagatattcaggcttgcttgatagcacaaagcatcgttacatgaagtacaggccagaggatttggagacacttttaatagatctttttgaaggaactcaaaggacactgcagcattctgccaaactagcatgatttttgccttttcttcatgccctttcatgctgcctagctttcctttccttatgacattgtagaagtacatatgctgttagagatagcattctactgatttggtaacagggtgtatagcttccgaatgttttgatagtgatacagtgattcttcattcctgatccatttaatgatttgcctccatgaaaatggaggatatgtgttggtctac

SEQ ID NO: 78423 - DNA, 4583 bp, Zea Mays
gaaaaagcggggttgtggttgtgggacagtgagaacgactagcgaggggagaccgagagagcagaggcgctcagcacggagcgaggcgccgcgccgtttccttttctgctccactgcaaccggagtccggagcatagcaacctcgctgggctcccatatagcgggcccgcggagccgggatatactccagggaagtcgagcaaggagagcgtggattgtggactacaggggtaaagatcgagtgagcatcgcttcaccatgcgcccttctctctgctgcgcacctctttttcttctgctactattacatttggcatttgctagacctctctttcctctaccgagtaagacaaagaatgaagagaagaagcccatacagacgtttcggccatataacattgctcatcgtggatcaaatggggaaattcccgaggaaacagctgctgcatacatgagagctattgaagaaggggcggattttatagagtctgacatccttgctagcaaagatggggccttgatttgttttcatgatgtaacacttgatgatacaactgatgttgccaagcgtaaggaatttgccaatcgaagaagaacctatgaagtggagtggtttaatgttactggatggtttgtaggtttgcatcgtacaaccaaccctgattccttcactccttttgttattaccattttaatttacatatctgctacatgaaatatagttaagcaacaaggaaataacaatgcctccctgctgtgttttcttgactctacttcaggaatttattacatgctcatctatactggaacactatttacatataatatgttggcagtttgatgttacttggaggggtggaatgagaatgacaaacttgtaagcttttggaaagagaaaaaaactagacctcttgggaaagactgcccaacagctttgatgttaggtagatgcaaaccactattgtgtctagaaaagatcctgaaggttgcctgcccatgaggcacaccctgtgcctgctgctaaaaatagtttgcacaaccagggccttttttaatgcagaaccatggggagcactcatagggtctccaacccggatctgtgtatcccaaggaatgcccccaggcaccgctctaagcttatgtgttcttgattatttaaaattttaaactaatattgaagtgttggtttgcagtggacttcacactggaggaacttaaaacacttagagtgaagcagagatactcgtttagagatcaacaatacaatggtatgttttcaatcatcacgtttgaagaattcatttcaattgccctagatgcagacagaactgtcggcatatatcccgagattaaagatccagtttttatcaacaagcatgtcaagtgggctgatgggaagaagtttgaggacaaatttgtggataccttgcttaaatatggatacaaaggtcaatatatgtcagagaattggctgaagcagccattgtttatacaatcctttgctcccacctccattgtacatgtatcagattttattgactctcccaaggtatttttgattgatgatatcagtgtgagaacacaagacacgaaccagtcatactgggaaattacttcagatgactaccttgcatacattagtaaatatgtcgttggccttggtccatggaaggacactattgttccagcttcaggaaactacttgatgccacctagtgatcttgtcgcacgggcacatgctcataatctccaggtacatccatacacgtacaggaacgagaaccagttcctgcacttcaacttttttcaagatccctacaatgaatacgacttctggataaacactgtgggggttgatggactgtttacagatttcaccggaacccttcacaggtaccaagaattgacatccccacaccggaaggatgagactgcaaatagcctcctagtaaaaattagccaaatgatctcagcatatgaaggtctctgatcagcacgacgttgctgaaaattgtttgtgcttttgttaatcgatctgcaagagcacacgatccattcatcacggacggtgcaacgtgacactgtgactttgcaaggttaaataaacgagttgtttctggttgggacttgttagcacgagccgtactctccattaaagctcttaaaccctgtgagaaatttctagtgtgggaataattgttttcacgatagaaaccgtatcatggtttagcgtgccaggatggacgagttggtctcgggtctttgcacagttggcctacaattgtacttgccggagtgttgaaatttctagtgtgggaataattgttttcacgatagataaacgctcttgtcactcttatcctcttttatgctgcttaagtaacacgctgtttgttggttcatcagtcactgcctaccagggccaggtgcccaacatgccaattgccatagcacgtttgtttaagtttgactctaacagactggagacagtaatgaaggattctcagacgaattttggaggaatatgattccagccttttgacgacatataagaaggatcaaaatgcccaagaaatggattgaatatgattccagcgttttgagttttgacgatgtataaaaggattaaaatgtccaagagataggtgaattaagatttatataaggggcgtccgactgcgcgtggtcaacggctgcactattgtcggacgttacaagtcgatggatgcccggagtcggacgtgaaggcaacactactatgagaagctaaggaccttagaccctggtcgagaagccaaacagcaggatgaactcactgtgtatacatatgacatttctgaaatggcaatggcaagacttgaagaggaatttgtttatcttcttacacattacaaacaggaggttctctcttttcgctctacagaggatggtagtgtggaagacttttcaagcaggagcagctcatttaatgaggaacaattggaagggaaggcaacaccaaataatatcagtggaggaccagaatattttgtgcctgatttaattcaacctggtgcactctctgctgtcaagttcattgctaaattcatgttcctgtatggctatgataaggagtgttgccaggcttatataaactcaagacagagtgcaacagatgagtactttgggtctcttggtctggaaaacctcagtatagaggagcttatgaacacaagttggaacagaatgaattcattaataaagagatggaactgggcaattatggtttttcttcgggtgtaccttgtaagtgagaaacgctttagcaaacatgtctttggtgaactttcagtttcaactgcagacttgtgcttctctgagatttcatttaactcagttatacaacttctgagcttttatgtatctgtagcaattggtcccccaaaaacagaaaaagctttttagattgcttgatatgtatgaagtccttgctgatcttctccctgaagctgaatccttgtttgaatcaggatacaatgatatgatcctgaatgagtaccatgaagcactactgcaactgggagaatctgcaaggaagacatttgcagaattcaagtatgccatccaatcatacacttcatccagtgcagtagctcgtggagaagtgcatccacttacaaagtatgttatgaactacataaaggctctcacagcatacaacaaaactctcgattcacttctcaaggacacggatcgaagatgcctggtttctgacattcagctgatggcaaacccatatcctaatttcaccgcaacagctttcaatctacaatctgttactgcagttctggaggcaaatcttgaagctgggtctagactgtacagagatgatcgattgcagtacatcttcatgatgaacaacatccactacatggttcagaaagtgaagaactcggatctcaaaagctttcttggcgatgaatggatccggatccataacaggaaacttcagcagcaagctacgagatatgagagggcgtcatggaataatgttctcttacctcagtgatgatggcctgtgtgctgctggtgatgctgcttctcgcaaaaccatcagggaggagataaaaaatttcaatctgtcctttgaagaggtttaccaagttcagacagcatggtctgtcccagatgaccaacttcgcgatgatgtccggatttcaatatcactgaaagttatacaggcctacaggacgttcgtgggaagatattcaggcttgcttgatagcacaaagcatcgttacatgaagtacaggccagaggatttggagacacttttaatagatctttttgaaggaactcaaaggacactgcagcattctgccaaactagcatgatttttgccttttcttcatgccctttcatgctgcctagctttcctttccttatgacattgtagaagtacatatgctgttagagatagcattctactgatttggtaacagggtgtatagcttccgaatgttttgatagtgatacagtgattcttcattcctgatccatttaatgatttgcctccatgaaaatggaggatatgtgttggtctac

SEQ ID NO: 78424 - DNA, 3827 bp, Zea Mays
ctcattggttggggagaccgaaagaaaaagcggggttgtggttgtgggacagtgagaacgactagcgaggggagaccgagagagcagaggcgctcagcacggagcgaggcgccgcgccgtttccttttctgctccactgcaaccggagtccggagcatagcaacctcgctgggctcccatatagcgggcccgcggagccgggatatactccagggaagtcgagcaaggagagcgtggattgtggactacaggggtaaagatcgagtgagcatcgcttcaccatgcgcccttctctctgctgcgcacctctttttcttctgctactattacatttggcatttgctagacctctctttcctctaccgagtaagacaaagaatgaagagaagaagcccatacagacgtttcggccatataacattgctcatcgtggatcaaatggggaaattcccgaggaaacagctgctgcatacatgagagctattgaagaaggggcggattttatagagtctgacatccttgctagcaaagatggggccttgatttgttttcatgatgtaacacttgatgatacaactgatgttgccaagcgtaaggaatttgccaatcgaagaagaacctatgaagtggagtggtttaatgttactggatggtttgtagtggacttcacactggaggaacttaaaacacttagagtgaagcagagatactcgtttagagatcaacaatacaatggtatgttttcaatcatcacgtttgaagaattcatttcaattgccctagatgcagacagaactgtcggcatatatcccgagattaaagatccagtttttatcaacaagcatgtcaagtgggctgatgggaagaagtttgaggacaaatttgtggataccttgcttaaatatggatacaaaggtcaatatatgtcagagaattggctgaagcagccattgtttatacaatcctttgctcccacctccattgtacatgtatcagattttattgactctcccaaggtatttttgattgatgatatcagtgtgagaacacaagacacgaaccagtcatactgggaaattacttcagatgactaccttgcatacattagtaaatatgtcgttggccttggtccatggaaggacactattgttccagcttcaggaaactacttgatgccacctagtgatcttgtcgcacgggcacatgctcataatctccaggtacatccatacacgtacaggaacgagaaccagttcctgcacttcaacttttttcaagatccctacaatgaatacgacttctggataaacactgtgggggttgatggactgtttacagatttcaccggaacccttcacaggtaccaagaattgacatccccacaccggaaggatgagactgcaaatagcctcctagtaaaaattagccaaatgatctcagcatatgaaggtctctgatcagcacgacgttgctgaaaattgtttgtgcttttgttaatcgatctgcaagagcacacgatccattcatcacggacggtgcaacgtgacactgtgactttgcaaggttaaataaacgagttgtttctggttgggacttgttagcacgagccgtactctccattaaagctcttaaaccctgtgagaaatttctagtgtgggaataattgttttcacgatagaaaccgtatcatggtttagcgtgccaggatggacgagttggtctcgggtctttgcacagttggcctacaattgtacttgccggagtgttgaaatttctagtgtgggaataattgttttcacgatagataaacgctcttgtcactcttatcctcttttatgctgcttaagtaacacgctgtttgttggttcatcagtcactgcctaccagggccaggtgcccaacatgccaattgccatagcacgtttgtttaagtttgactctaacagactggagacagtaatgaaggattctcagacgaattttggaggaatatgattccagccttttgacgacatataagaaggatcaaaatgcccaagaaatggattgaatatgattccagcgttttgagttttgacgatgtataaaaggattaaaatgtccaagagataggtgaattaagatttatataaggggcgtccgactgcgcgtggtcaacggctgcactattgtcggacgttacaagtcgatggatgcccggagtcggacgtgaaggcaacactactatgagaagctaaggaccttagaccctggtcgagaagccaaacagcaggatgaactcactgtgtatacatatgacatttctgaaatggcaatggcaagacttgaagaggaatttgtttatcttcttacacattacaaacaggaggttctctcttttcgctctacagaggatggtagtgtggaagacttttcaagcaggagcagctcatttaatgaggaacaattggaagggaaggcaacaccaaataatatcagtggaggaccagaatattttgtgcctgatttaattcaacctggtgcactctctgctgtcaagttcattgctaaattcatgttcctgtatggctatgataaggagtgttgccaggcttatataaactcaagacagagtgcaacagatgagtactttgggtctcttggtctggaaaacctcagtatagaggagcttatgaacacaagttggaacagaatgaattcattaataaagagatggaactgggcaattatggtttttcttcgggtgtaccttgatacaatgatatgatcctgaatgagtaccatgaagcactactgcaactgggagaatctgcaaggaagacatttgcagaattcaagtatgccatccaatcatacacttcatccagtgcagtagctcgtggagaagtgcatccacttacaaagtatgttatgaactacataaaggctctcacagcatacaacaaaactctcgattcacttctcaaggacacggatcgaagatgcctggtttctgacattcagctgatggcaaacccatatcctaatttcaccgcaacagctttcaatctacaatctgttactgcagttctggaggcaaatcttgaagctgggtctagactgtacagagatgatcgattgcagtacatcttcatgatgaacaacatccactacatggttcagaaagtgaagaactcggatctcaaaagctttcttggcgatgaatggatccggatccataacaggaaacttcagcagcaagctacgagatatgagagggcgtcatggaataatgttctcttacctcagtgatgatggcctgtgtgctgctggtgatgctgcttctcgcaaaaccatcagggaggagataaaaaatttcaatctgtcctttgaagaggtttaccaagttcagacagcatggtctgtcccagatgaccaacttcgcgatgatgtccggatttcaatatcactgaaagttatacaggcctacaggacgttcgtgggaagatattcaggcttgcttgatagcacaaagcatcgttacatgaagtacaggccagaggatttggagacacttttaatagatctttttgaaggaactcaaaggacactgcagcattctgccaaactagcatgatttttgccttttcttcatgccctttcatgctgcctagctttcctttccttatgacattgtagaagtacatatgctgttagagatagcattctactgatttggtaacagggtgtatagcttccgaatgttttgatagtgatacagtgattcttcattcctgatccatttaatgatttgcctccatgaaaatggaggatatgtgttggtctac

SEQ ID NO: 78425 - DNA, 3675 bp, Zea Mays
cttcctcccattcgcgacattgaacaccagatcgaccttatcctaggcgctcagcttcccaaccgcgccccgtgccgtaccaatcccgatgaaacaaaggaaattcagaaccaagtccaagcgttacttgataagggctacattcgctgcgcacctctttttcttctgctactattacatttggcatttgctagacctctctttcctctaccgagtaagacaaagaatgaagagaagaagcccatacagacgtttcggccatataacattgctcatcgtggatcaaatggggaaattcccgaggaaacagctgctgcatacatgagagctattgaagaaggggcggattttatagagtctgacatccttgctagcaaagatggggccttgatttgttttcatgatgtaacacttgatgatacaactgatgttgccaagcgtaaggaatttgccaatcgaagaagaacctatgaagtggagtggtttaatgttactggatggtttgtagtggacttcacactggaggaacttaaaacacttagagtgaagcagagatactcgtttagagatcaacaatacaatggtatgttttcaatcatcacgtttgaagaattcatttcaattgccctagatgcagacagaactgtcggcatatatcccgagattaaagatccagtttttatcaacaagcatgtcaagtgggctgatgggaagaagtttgaggacaaatttgtggataccttgcttaaatatggatacaaaggtcaatatatgtcagagaattggctgaagcagccattgtttatacaatcctttgctcccacctccattgtacatgtatcagattttattgactctcccaaggtatttttgattgatgatatcagtgtgagaacacaagacacgaaccagtcatactgggaaattacttcagatgactaccttgcatacattagtaaatatgtcgttggccttggtccatggaaggacactattgttccagcttcaggaaactacttgatgccacctagtgatcttgtcgcacgggcacatgctcataatctccaggtacatccatacacgtacaggaacgagaaccagttcctgcacttcaacttttttcaagatccctacaatgaatacgacttctggataaacactgtgggggttgatggactgtttacagatttcaccggaacccttcacaggtaccaagaattgacatccccacaccggaaggatgagactgcaaatagcctcctagtaaaaattagccaaatgatctcagcatatgaaggtctctgatcagcacgacgttgctgaaaattgtttgtgcttttgttaatcgatctgcaagagcacacgatccattcatcacggacggtgcaacgtgacactgtgactttgcaaggttaaataaacgagttgtttctggttgggacttgttagcacgagccgtactctccattaaagctcttaaaccctgtgagaaatttctagtgtgggaataattgttttcacgatagaaaccgtatcatggtttagcgtgccaggatggacgagttggtctcgggtctttgcacagttggcctacaattgtacttgccggagtgttgaaatttctagtgtgggaataattgttttcacgatagataaacgctcttgtcactcttatcctcttttatgctgcttaagtaacacgctgtttgttggttcatcagtcactgcctaccagggccaggtgcccaacatgccaattgccatagcacgtttgtttaagtttgactctaacagactggagacagtaatgaaggattctcagacgaattttggaggaatatgattccagccttttgacgacatataagaaggatcaaaatgcccaagaaatggattgaatatgattccagcgttttgagttttgacgatgtataaaaggattaaaatgtccaagagataggtgaattaagatttatataaggggcgtccgactgcgcgtggtcaacggctgcactattgtcggacgttacaagtcgatggatgcccggagtcggacgtgaaggcaacactactatgagaagctaaggaccttagaccctggtcgagaagccaaacagcaggatgaactcactgtgtatacatatgacatttctgaaatggcaatggcaagacttgaagaggaatttgtttatcttcttacacattacaaacaggaggttctctcttttcgctctacagaggatggtagtgtggaagacttttcaagcaggagcagctcatttaatgaggaacaattggaagggaaggcaacaccaaataatatcagtggaggaccagaatattttgtgcctgatttaattcaacctggtgcactctctgctgtcaagttcattgctaaattcatgttcctgtatggctatgataaggagtgttgccaggcttatataaactcaagacagagtgcaacagatgagtactttgggtctcttggtctggaaaacctcagtatagaggagcttatgaacacaagttggaacagaatgaattcattaataaagagatggaactgggcaattatggtttttcttcgggtgtaccttgatacaatgatatgatcctgaatgagtaccatgaagcactactgcaactgggagaatctgcaaggaagacatttgcagaattcaagtatgccatccaatcatacacttcatccagtgcagtagctcgtggagaagtgcatccacttacaaagtatgttatgaactacataaaggctctcacagcatacaacaaaactctcgattcacttctcaaggacacggatcgaagatgcctggtttctgacattcagctgatggcaaacccatatcctaatttcaccgcaacagctttcaatctacaatctgttactgcagttctggaggcaaatcttgaagctgggtctagactgtacagagatgatcgattgcagtacatcttcatgatgaacaacatccactacatggttcagaaagtgaagaactcggatctcaaaagctttcttggcgatgaatggatccggatccataacaggaaacttcagcagcaagctacgagatatgagagggcgtcatggaataatgttctcttacctcagtgatgatggcctgtgtgctgctggtgatgctgcttctcgcaaaaccatcagggaggagataaaaaatttcaatctgtcctttgaagaggtttaccaagttcagacagcatggtctgtcccagatgaccaacttcgcgatgatgtccggatttcaatatcactgaaagttatacaggcctacaggacgttcgtgggaagatattcaggcttgcttgatagcacaaagcatcgttacatgaagtacaggccagaggatttggagacacttttaatagatctttttgaaggaactcaaaggacactgcagcattctgccaaactagcatgatttttgccttttcttcatgccctttcatgctgcctagctttcctttccttatgacattgtagaagtacatatgctgttagagatagcattctactgatttggtaacagggtgtatagcttccgaatgttttgatagtgatacagtgattcttcattcctgatccatttaatgatttgcctccatgaaaatggaggatatgtgttggtctac

SEQ ID NO: 78426 - DNA, 407 bp, Zea Mays
ggacatcaaccctgcagctttaggctgatgctttctttgttcagcaccgcggaagacattttcgccctagctggtataggctttgccgcagtagctgcattatgggcttcggtcaacctcattgagatcatcgacaagctcccggtccttcctcttctctttgaactagtcgggatattggttgcatggcttttcatctacaacaatctcctcttcaagccaaaaaggaaagaatttctagagaacatcaaaagctcaggatctcgaatcctggggcagtaacctttgtaggcgacagttgacagcaaccactctgtcatgggttctctgcaagcatgccgaatacgagcaggctacacaggattctgaggttcaacaagttgagatagctgagcaggagctcattg

SEQ ID NO: 78427 - DNA, 2110 bp, Zea Mays
gaacggcaccgccgcggtgctcgtggacgccgccccggccggctgctgcacccccgcctcgccggcctcagcgtccatctccgaccaggacgagagcactgcagcacagcagggcggcgggtccgcacacgcgatggcgcgaagacgacggggtttccttccctcctcgagctcgaggtcgaggaccgaccgagaggctcggacggcgcggcgccgtgcgcaggggcagggctcgtcacgggcgcgctggtacttgctcagatggtgccgtgtcagaatacgcgcacaagtcagggggcaatctgcaaaccagacatccgatgctgcgtgagtggacgagagggctccggctcacatctgctgcgcccgccgcagcaagacgcgccggaggaggccaagcaagcagctctagtcttcgtcgcgtgcggctctcgccggtggcctgcagcagcagcagccatgatgatggcgtgtgccctcgccgtcgcccagccagcagcatctctcgcgccgccatccggcaagaggaccctctccggcggccgccccccgcggctgccacctcccaggctttcaggcaagctaataaggagccgcgctgtcgttgccaaggctgcgcaggacgggtcggaatcgtccgggaccgggagcatagtgaaatacgtcacgagctctttcagcaccgcggaagacattttcgccctagctggtataggctttgccgcagtagctgcattatgggcttcggtcaacctcattgagatcatcgacaagctcccggtccttcctcttctctttgaactagtcgggatattggttgcatggcttttcatctacaacaatctcctcttcaagccaaaaaggaaagaatttctagagaacatcaaaagctcaggatctcgaatcctggggcagtaacctttgtaggcgacagttgacagcaaccactctgtcatgggttctctgcaagcatgccgaatgtaattatgcaatgtaactgtatgcgagctatgggtgttaacattttttattgtataagcatcaccaattttctgtacaggttagtgtgattaaaatcgttctcctagtaccaggacttggacttgtacgagcctaataagaacatacgcccgaatccttcctgaactgaatgcttcggctattgaatttcacgttcaagggcgaagggggtattttacatctaaaattatggaaaacaacgcaacaaagacgaaaaaggtgccaaagagattcagtaatcgccagcggttgtgaatgtggagatagttacgattatcttgtgggttagcaatcaaatatcacaatggcagctccaagttgtaaagccatggaatcggtgtagcacctgctggtgctacaaagatctgcgagttaagaatagcatcagtgcaacaatgacatctaggctcatctctccagtgttaccttttcttccttttgactttttattttattttgaaataaacatccacccagccatatcttggctcgaattaggtggatggcaaaatgatgaaatgtagacaaggaaaagaaaagggagaaactacaatgtagaaaatacgacaaggttggcatttatgactaaactaactatccacattccagcatcacacttactctgaccaatgagaataaattggaattccctaaaatctagattatctatcaagactgatacatgtatctgatcaacaaattaggagggtgaaaacatgattcccttgatcattgcaacaccccgaatacaaacctggaacacccaggcttcagtttttgtccaaaaggccagtaacaggttttccagcaacaggatggctgctggaactctgtgggtctgtttttacaacaggcacctctacttttgaatatggtacttgagaaacaccatttacctgtccaggatggccagatgtttcagatttgatttccatggcgtacctttcctctgcaggggagaataatcaggattaaactcatcctagtcttagaaagcaaagagaaaatgatatacctcgcacaatatacattctagccttcctagatttactaacagatgtttcagttctcagataaaataaaagaaaat

SEQ ID NO: 78428 - DNA, 5181 bp, Zea Mays
atactgtacaggccaattcgttcgcagactcgccaaactgctgccccgagcggccgagcccccccccccccccccccccccgacctcgaaatcctccgtcttcctcctcgccgtgtcgggcctcgccttgcatcgtccccaaatccaacccaaactcctcaatctccgtcactggcatggcgtccgataccgagggcatcgccgccctcttctcaatgtacaacgacgacgaggaagatgaggacgccgacgagcccaaccctccgtccccagcgccgctcaccaccgtcacctcctcgtcgccgctgtcccctcaagccgggggcgaggaccctaacccttccctggcgcctccgtcgcctccccgtcccgaggagtcggccagtctcaaaaccctagtgagtccccacccttccccggcgcgggcgctgctaccgccacttccctcgcggcgctcttcgtcgcccttcgcagcgtcgcccccctctccgctacggggaccatcctccgcgccgccagccgacctgccgcgcccgccccggcgcggggcgcttgcaatcgtggactatgcgcacgacgagatggctatgtcgcccgagcaggaggatggggagatcatgagccacacatacagattcgtttcagatgctcaggctgcagaggggaatcttgaagaacgaactctctctggcacagttcatatcatgacaccaaatactccagcagaattgtctcagcatgctgatgcacctgagcagaaccaattagggacagacatggcagtggatataactagagcagaaattgaagacgcccaggtggaggaaactactgatatttcaactaatggtgaaaatgatgatccattgagtcgtttccttcctccacccgtgactacaaaatgctctgcagcattaaagcaaaaaattaacaaattccttgcatacaaaagggccggaaagagctttaatgctgaagtgcgcaacaggaaggactatagaaatcctgactttttgcagcatgctgtgcgataccaagaaattgatcagatagggacctgtttcagtaaagatgtttttgatccttatgggtacgataaaggtgactactatgatgagatagaagctgaaatgaagcgtgaacttgagagaaaggaacaggagaagaaaaggaatccaaaagttgaatttattactggaggagtacaaactccacatagtgcatcaataccgaagatcccaggtttggcgggtgtctgtacactaccggtacctacagaaggtgtacagaaagagactaggccaaacaagaaatcaaaatgggataaggttgatgatgatgttaagaatcatgtagttcctagtggacacgacaacttatcagcaactgcttctgtggcactcctgacttcagctaatgttggtgctggatatgctgcttttgcgcaacaaaagagaaaagaagctgaagaaaagagaagcgatcataagtcagacagaagatcgtagcaccactttttttttttcattctgagcagtcagcgtatcatttagtttttcagtaacatagttttgtattgtgggtaaggaaaagaaggaaacagttaaaatcagtccgagggaaatggttccagaaaagcccctcagagcgacttgttgtcttatacaggtatcagaaacttaacgttttaggccaagaaaaagagaacagtgagcgttctgcacttctgccccccgttacggtggacaattactcctgtcctaaaaagaatgcaccaaaattgaatgcaaaacatcgccagcagcagtcgctcatcatatccgcgtgatgttttaggactgacgtgcgatctgcagtcctacaggctacgtgctacagtgcggtagatccgtagatgtacaagataagtcgcttctgcagagtatatggtagcgctacaggcaacagatgagtcaccgtgtgccccccaatagtaaagataatgacataggcccagctcaaattatttatcattcacggtgcacggcaagctcgaaagatcggttgcaacccaaactggcagcaatctgcatccactgaagcagtacgccaccgaccggcaacgtgaccaccgtctctggctcgacgcagctcattactccgaattggccggacgcacgtccatgaattcaccacagtgccgcgcacaccaccgtagatctggtgccggcagaaagaggtgagactttcccgttggcctcgctacccagcggaccgcaataaattaccaggcatcggttggcggtaaacggaacagtgacgagcctgattggatttccccatcgggatgagagctttccccgccgcttctgtcgctgaagaccatggcacggccgcgcaggtgttgtgttctgcgggcagcggcagacagaggcgtagtagcgcggtagagcactacagcgtgggtctccgtgcgctcagggcgtgagctaggcatctctcagatccgctgtcccgtcccgcgcggccccaagcggacggcgtcgtgttgcaggcttgcaggccacggccagaccgccaaaggcccagactctcacaggcacgcacacagacagacaaccgccggggctacgtgcgtgggttgcgctcttcgctcgtcccacgatgcaaaatgcgatcaaaacatccgtacgaccacccgcccagccgcccagcccacaccataccacacacgccgagctgacgaagcgagcggcacccaacgcacgttgaaactgcagcagagcacacagcagtggcccgagcacgaggtgaagtgaaaaagcaaggtgctgtggtggacgccaggacacatgagggggcaatttggtcacagcaaaaaatccaacggccagttccctacagcagacaggggaggaaggaagagcaacacttgaaaggcggttaaaacccagcccagcaacgataaaaggcaaacaaaggaaaagggcttagcctcacgagacaaaagacgcccgccccggccggcgaccagtacctcgccattgctagtgctagccgccgtcgctggtgtcccctcctcccacttgcgccgcctgtccccgcgccctcgaaaccttttctcccaaaacagatttcgtcccggcgctctcctgcaaagggcggctagctgtcgccggtggatacgtttcaccttgcttgggttctgcttcttcctgcttttccaagagagggccagcagcagacgaagcgagcaaagcgcgcaggaaccgctcggtctggtgattttaaggggcgaggtcgtgttcttgggaggcggagagacacgagctctctcttcctgtcctctttcccgcggcttctctcttgtcttgctccaagagggcaaaactcgtcggggtagggaaatggcggaggtgaagccggaggagataagccatccgcccatggagcagctccaggggttcgagtactgcatcgactccaaccctccctggggcgaggcgatcatactgggcttccagcactacatactggcgctgggcacggcggtgatgatcccgacagtgttggttcccatgatgggcggcgacgatggggacagggtcagggtggtgcagacgctgctgttcgtgacggggataaacacgctgctgcagtccctcttcgggacccggctgccgacggtcatcggcggctcctacgcgttcgtcatcccgataatggccatcatccaggacccgtcgctttctgggatacccgacggtcatgagaggttcctcgagaccatgaaggccatacagggggcactgatagtgtcctccagcattcagatcattctgggctacagccagctgtggggtattttctccagattcttcagcccagtggggatgactccagtggttgcgctgctcggatttggcctcttcgaaagaggtttccctgtggttgggagatgcgttgagattggcctgccaatgctgatcctctttgtcgtgctgtctcagtatctgaagaacatacagataaaagaaatccccatactggaaaggttctcccttttcatctgtgtcgcgttggtatgggcgtacgctcagatcctcacttcaggtggagcctataagaacagcgccgaggtcacccagaacaactgccgcaccgacagagccaatctcatctcttctgccccatggattaagatcccctacccactgcaatggggtgcgccgaccttcaacgccggccagtcatttgggattgtgtctgctgttttggtctcgctggtagagtccacagcctcctacaaagccgctgctcgtcttgcgagtgcgactccacctccggctcacatcctcagcagaggcattgggtggcagggaatcggcatcctccttgacgggctctttggaacggggactggctccactgtctcagtggagaacgtcgggttgcttgggtcgacaaggatcgggagccgacgggtcatacagatctcagctggcttcatgatctttttctccatgctggggaaatttggagccttgttcgcttccatcccgttcaccatctttgcggccgtgtactgcgtcctgttcgggctagttgctgcggtggggctgtccttcctacagttcactaacatgaactccatgcgcaacctctttatcgtcggcgtctccatcttccttggcctgtccgtcccggaatactttttccgctacaccatggctgctcatcgtggtcctgcgcacacgaaagctggatggttcaacgactacatcaacaccatcttctcgtcgccgccgaccgtggggctgatggtggccgtgttcctggacaacacgctggaggtgaagcaagccggcatggaccgggggatgccgtggtggcagcggttccggacgttcaagggcgacagcaggaacgaggagttctaccgcctgccattcaacctcaaccgcttcttccctccggcctaaaagtcaagtcactcagactcagattgctgagcagaggcatagtgtagcttatttattgttccattcgttcatctctacttgttcgtgttgtagattattttggggaggttcagtaagtatacttactgcccaatccactaaatgtggtcgcctaccgttttttatatatttttttacatgctccgtccaaaataagtacacttttcaatttggggagtcg

SEQ ID NO: 78429 - DNA, 5174 bp, Zea Mays
atactgtacaggccaattcgttcgcagactcgccaaactgctgccccgagcggccgagcccccccccccccccccccccccgacctcgaaatcctccgtcttcctcctcgccgtgtcgggcctcgccttgcatcgtccccaaatccaacccaaactcctcaatctccgtcactggcatggcgtccgataccgagggcatcgccgccctcttctcaatgtacaacgacgacgaggaagatgaggacgccgacgagcccaaccctccgtccccagcgccgctcaccaccgtcacctcctcgtcgccgctgtcccctcaagccgggggcgaggaccctaacccttccctggcgcctccgtcgcctccccgtcccgaggagtcggccagtctcaaaaccctagtgagtccccacccttccccggcgcgggcgctgctaccgccacttccctcgcggcgctcttcgtcgcccttcgcagcgtcgcccccctctccgctacggggaccatcctccgcgccgccagccgacctgccgcgcccgccccggcgcggggcgcttgcaatcgtggactatgcgcacgacgagatggctatgtcgcccgagcaggaggatggggagatcatgagccacacatacagattcgtttcagatgctcaggctgcagaggggaatcttgaagaacgaactctctctggcacagttcatatcatgacaccaaatactccagcagaattgtctcagcatgctgatgcacctgagcagaaccaattagggacagacatggcagtggatataactagagcagaaattgaagacgcccaggtggaggaaactactgatatttcaactaatggtgaaaatgatgatccattgagtcgtttccttcctccacccgtgactacaaaatgctctgcagcattaaagcaaaaaattaacaaattccttgcatacaaaagggccggaaagagctttaatgctgaagtgcgcaacaggaaggactatagaaatcctgactttttgcagcatgctgtgcgataccaagaaattgatcagatagggacctgtttcagtaaagatgtttttgatccttatgggtacgataaaggtgactactatgatgagatagaagctgaaatgaagcgtgaacttgagagaaaggaacaggagaagaaaaggaatccaaaagttgaatttattactggaggagtacaaactccacatagtgcatcaataccgaagatcccaggtttggcgggtgtctgtacactaccggtacctacagaaggtgtacagaaagagactaggccaaacaagaaatcaaaatgggataaggttgatgatgatgttaagaatcatgtagttcctagtggacacgacaacttatcagcaactgcttctgtggcactcctgacttcagctaatgttggtgctggatatgctgcttttgcgcaacaaaagagaaaagaagctgaagaaaagagaagcgatcataagtcagacagaagatcgtagcaccactttttttttttcattctgagcagtcagcgtatcatttagtttttcagtaacatagttttgtattgtgggtaaggaaaagaaggaaacagttaaaatcagtccgagggaaatggttccagaaaagcccctcagagcgacttgttgtcttatacaggtatcagaaacttaacgttttaggccaagaaaaagagaacagtgagcgttctgcacttctgccccccgttacggtggacaattactcctgtcctaaaaagaatgcaccaaaattgaatgcaaaacatcgccagcagcagtcgctcatcatatccgcgtgatgttttaggactgacgtgcgatctgcagtcctacaggctacgtgctacagtgcggtagatccgtagatgtacaagataagtcgcttctgcagagtatatggtagcgctacaggcaacagatgagtcaccgtgtgccccccaatagtaaagataatgacataggcccagctcaaattatttatcattcacggtgcacggcaagctcgaaagatcggttgcaacccaaactggcagcaatctgcatccactgaagcagtacgccaccgaccggcaacgtgaccaccgtctctggctcgacgcagctcattactccgaattggccggacgcacgtccatgaattcaccacagtgccgcgcacaccaccgtagatctggtgccggcagaaagaggtgagactttcccgttggcctcgctacccagcggaccgcaataaattaccaggcatcggttggcggtaaacggaacagtgacgagcctgattggatttccccatcgggatgagagctttccccgccgcttctgtcgctgaagaccatggcacggccgcgcaggtgttgtgttctgcgggcagcggcagacagaggcgtagtagcgcggtagagcactacagcgtgggtctccgtgcgctcagggcgtgagctaggcatctctcagatccgctgtcccgtcccgcgcggccccaagcggacggcgtcgtgttgcaggcttgcaggccacggccagaccgccaaaggcccagactctcacaggcacgcacacagacagacaaccgccggggctacgtgcgtgggttgcgctcttcgctcgtcccacgatgcaaaatgcgatcaaaacatccgtacgaccacccgcccagccgcccagcccacaccataccacacacgccgagctgacgaagcgagcggcacccaacgcacgttgaaactgcagcagagcacacagcagtggcccgagcacgaggtgaagtgaaaaagcaaggtgctgtggtggacgccaggacacatgagggggcaatttggtcacagcaaaaaatccaacggccagttccctacagcagacaggggaggaaggaagagcaacacttgaaaggcggttaaaacccagcccagcaacgataaaaggcaaacaaaggaaaagggcttagcctcacgagacaaaagacgcccgccccggccggcgaccagtacctcgccattgctagtgctagccgccgtcgctggtgtcccctcctcccacttgcgccgcctgtccccgcgccctcgaaaccttttctcccaaaacagatttcgtcccggcgctctcctgcaaagggcggctagctgtcgccggtggatacgtttcaccttgcttgggttctgcttcttcctgcttttccaagagagggccagcagcagacgaagcgagcaaagcgcgcaggaaccgctcggtctggtgattttaaggggcgaggtcgtgttcttgggaggcggagagacacgagctctctcttcctgtcctctttcccgcggcttctctcttgtcttgctccaagagggcaaaactcgtcggggtagggaaatggcggaggtgaagccggaggagataagccatccgcccatggagcagctccaggggttcgagtactgcatcgactccaaccctccctggggcgaggcgatcatactgggcttccagcactacatactggcgctgggcacggcggtgatgatcccgacagtgttggttcccatgatgggcggcgacgatggggacagggtcagggtggtgcagacgctgctgttcgtgacggggataaacacgctgctgcagtccctcttcgggacccggctgccgacggtcatcggcggctcctacgcgttcgtcatcccgataatggccatcatccaggacccgtcgctttctgggatacccgacggtcatgagaggttcctcgagaccatgaaggccatacagggggcactgatagtgtcctccagcattcagatcattctgggctacagccagctgtggggtattttctccagattcttcagcccagtggggatgactccagtggttgcgctgctcggatttggcctcttcgaaagaggtttccctgtggttgggagatgcgttgagattggcctgccaatgctgatcctctttgtcgtgctgtctcagtatctgaagaacatacagataaaagaaatccccatactggaaaggttctcccttttcatctgtgtcgcgttggtatgggcgtacgctcagatcctcacttcaggtggagcctataagaacagcgccgaggtcacccagaacaactgccgcaccgacagagccaatctcatctcttctgccccatggattaagatcccctacccactgcaatggggtgcgccgaccttcaacgccggccagtcatttgggattgtgtctgctgttttggtctcgctggtagagcctcctacaaagccgctgctcgtcttgcgagtgcgactccacctccggctcacatcctcagcagaggcattgggtggcagggaatcggcatcctccttgacgggctctttggaacggggactggctccactgtctcagtggagaacgtcgggttgcttgggtcgacaaggatcgggagccgacgggtcatacagatctcagctggcttcatgatctttttctccatgctggggaaatttggagccttgttcgcttccatcccgttcaccatctttgcggccgtgtactgcgtcctgttcgggctagttgctgcggtggggctgtccttcctacagttcactaacatgaactccatgcgcaacctctttatcgtcggcgtctccatcttccttggcctgtccgtcccggaatactttttccgctacaccatggctgctcatcgtggtcctgcgcacacgaaagctggatggttcaacgactacatcaacaccatcttctcgtcgccgccgaccgtggggctgatggtggccgtgttcctggacaacacgctggaggtgaagcaagccggcatggaccgggggatgccgtggtggcagcggttccggacgttcaagggcgacagcaggaacgaggagttctaccgcctgccattcaacctcaaccgcttcttccctccggcctaaaagtcaagtcactcagactcagattgctgagcagaggcatagtgtagcttatttattgttccattcgttcatctctacttgttcgtgttgtagattattttggggaggttcagtaagtatacttactgcccaatccactaaatgtggtcgcctaccgttttttatatatttttttacatgctccgtccaaaataagtacacttttcaatttggggagtcg

SEQ ID NO: 78430 - DNA, 1147 bp, Zea Mays
tgaagagcatcctcttaacatgaaccatttagagggaatcttgaagaacgaactctctctggcacagttcatatcatgacaccaaatactccagcagaattgtctcagcatgctgatgcacctgagcagaaccaattagggacagacatggcagtggatataactagagcagaaattgaagacgcccaggtggaggaaactactgatatttcaactaatggtgaaaatgatgatccattgagtcgtttccttcctccacccgtgactacaaaatgctctgcagcattaaagcaaaaaattaacaaattccttgcatacaaaagggccggaaagagctttaatgctgaagtgcgcaacaggaaggactatagaaatcctgactttttgcagcatgctgtgcgataccaagaaattgatcagatagggacctgtttcagtaaagatgtttttgatccttatgggtacgataaaggtgactactatgatgagatagaagctgaaatgaagcgtgaacttgagagaaaggaacaggagaagaaaaggaatccaaaagttgaatttattactggaggagtacaaactccacatagtgcatcaataccgaagatcccaggtttggcgggtgtctgtacactaccggtacctacagaaggtgtacagaaagagactaggccaaacaagaaatcaaaatgggataaggttgatgatgatgttaagaatcatgtagttcctagtggacacgacaacttatcagcaactgcttctgtggcactcctgacttcagctaatgttggtgctggatatgctgcttttgcgcaacaaaagagaaaagaagctgaagaaaagagaagcgatcataagtcagacagaagatcgtagcaccactttttttttttcattctgagcagtcagcgtatcatttagtttttcagtaacatagttttgtattgtgggtaaggaaaagaaggaaacagttaaaatcagtccgagggaaatggttccagaaaagcccctcagagcgacttgttgtcttatacaggtatcagaaacttaacgttttaggccaagaaaaagagaacagtgagcgttctgcacttctgccccccgttacggtggacaattactcctgtcctaaaaagaatgcacc

SEQ ID NO: 78431 - DNA, 2719 bp, Zea Mays
atactgtacaggccaattcgttcgcagactcgccaaactgctgccccgagcggccgagcccccccccccccccccccccccgacctcgaaatcctccgtcttcctcctcgccgtgtcgggcctcgccttgcatcgtccccaaatccaacccaaactcctcaatctccgtcactggcatggcgtccgataccgagggcatcgccgccctcttctcaatgtacaacgacgacgaggaagatgaggacgccgacgagcccaaccctccgtccccagcgccgctcaccaccgtcacctcctcgtcgccgctgtcccctcaagccgggggcgaggaccctaacccttccctggcgcctccgtcgcctccccgtcccgaggagtcggccagtctcaaaaccctagtgagtccccacccttccccggcgcgggcgctgctaccgccacttccctcgcggcgctcttcgtcgcccttcgcagcgtcgcccccctctccgctacggggaccatcctccgcgccgccagccgacctgccgcgcccgccccggcgcggggcgcttgcaatcgtggactatgcgcacgacgagatggctatgtcgcccgagcaggaggatggggagatcatgagccacacatacagattcgtttcagatgctcaggctgcagaggggaatcttgaagaacgaactctctctggcacagttcatatcatgacaccaaatactccagcagaattgtctcagcatgctgatgcacctgagcagaaccaattagggacagacatggcagtggatataactagagcagaaattgaagacgcccaggtggaggaaactactgatatttcaactaatggtgaaaatgatgatccattgagtcgtttccttcctccacccgtgactacaaaatgctctgcagcattaaaggttatcctactatcaaatgattatgatacctgttttttcaccataaacaacctagtcatgtttccatacagaatatcagcttatggtggaacgtcctctactcttccttattattgtcattgatgaactccattatctacattaaaaattgataaaattatcatgtcctgtaatgtgaaggcaaagctgaacatctgcatcatacatttccacacctgtatctgttaacaagatattgtcaagaataggctcagtcctatgtgatggctttactttatgggacaattgtgattatacccttcattcattgaccttgcaattgtgatttaacctccatttttcaactttgtgattttacccctccgtttcgaaaatgaagctaccgtttgcccgtccctctcaacgccgagtgaaaatcaggtttattgttttaaaaaataaaaatatgaaaacaaagggtgaaaggttcgaaccaccctcctattctgtaagggcgcaacaccaacaggggtaaaatcacaattacataatataatgaggggtaaaaccacaataaattgtgtgggcatttttgcatcagatttaacactgtgtgctgcacataatggtgcatgggtatgacagcttcgttttcaaaacggaggagtaaaatcacaaagttgaaaacgaggtgcaaaataacaattgcaaggtcagagagaggtataatcacaaatgccccttactttatcagtgcatctattagtatgcttgaaggattttctattctttttccagtcgttttctcttctcaagttttgtgaaagcatcatgatgaggttcctattcaggcaatatttacactaggaatgtgtctacacaccttcacattaattcctgtgttggttcttacagccagtatttacttaaaactcatcatctgttgttttctgtttttctgcagcaaaaaattaacaaattccttgcatacaaaagggccggaaagagctttaatgctgaagtgcgcaacaggaaggactatagaaatcctgactttttgcagcatgctgtgcgataccaagaaattgatcagatagggacctgtttcagtaaagatgtttttgatccttatgggtacgataaaggtgactactatgatgagatagaagctgaaatgaagcgtgaacttgagagaaaggaacaggagaagaaaaggaatccaaaagttgaatttattactggaggagtacaaactccacatagtgcatcaataccgaagatcccaggtttggcgggtgtctgtacactaccggtacctacagaaggtgtacagaaagagactaggccaaacaagaaatcaaaatgggataaggttgatgatgatgttaagaatcatgtagttcctagtggacacgacaacttatcagcaactgcttctgtggcactcctgacttcagctaatgttggtgctggatatgctgcttttgcgcaacaaaagagaaaagaagctgaagaaaagagaagcgatcataagtcagacagaagatcgtagcaccactttttttttttcattctgagcagtcagcgtatcatttagtttttcagtaacatagttttgtattgtgggtaaggaaaagaaggaaacagttaaaatcagtccgagggaaatggttccagaaaagcccctcagagcgacttgttgtcttatacaggtatcagaaacttaacgttttaggccaagaaaaagagaacagtgagcgttctgcacttctgccccccgttacggtggacaattactcctgtcctaaaaagaatgcacc

SEQ ID NO: 78432 - DNA, 2297 bp, Zea Mays
catccacctgcgacacatttccccccttttcccgcaacttccgtgacgacttcaccactacatccatgccaccggcgacttcatggcctccccattcagcctctccttcccaagacaaagatggttccagggaggaagggatttaatgcacaagggaacccagcaggtaatttcatcctaatgactctcgtcttctgtagggttcgggctggcggtgcgcaatagggttagaggctgtagggtactggctatttttctccatttttcatcttattactatcctactgggtacatatacgtgtagttgagcggattggtttagctagctgctacatgtgcatatccaatttgaatggacgcaagtttgcaagagctattatttcaggtttacactactacatttgatcctcattcatgtcattttgctcattggagtagtgcaggcgatgttaaaaggagatctcaagtcttcctttctagtcgcagacttccatctgcaattttagatttgggccttgacctactgatctgttctcaagttcatatggacatacactagccagttgcaaagcacaatctagttcttcaaaaaccgatgttataaacattttcagattaaggtgtcgctaaatgctgactttatagtactttggacatctacatataaatgcctttctgatggaaccttgcaaacttttctctgagtatgtgatcaccacctctaggactgattactcttcacctcctcaaggaaagcagaagttcaggtgcaattcaaggatgttcctgatgacattttagaagtatgttcatagaagttactcatagtgtagtatactcttagcatagatttacttgtatagtaatgatagtgcctttacataaccactaaccagacacaacaaagcaatatgttctttcataggttagagatcatggggtctgaaactatcaaaggattagctaaaggttcaatgactacagaatggggtagggcagatccatgcattgatactggaaaaccagtatagtggtccctttttagattgaatgaaatgcagttgtgcagagcatgtgcattgctgcaactatttttatactgcttttttactgatattgctatggagatcaacaattttgtttttattttgcagtgatatgggctgtcatattgatagctttattgttgtggtcacatacacatttaattgaaaatgggcttgtcacaggtagaactactgatgttcttgctgttgccaacacagtggcagaattgcttcagaatcattgttgactccccctaagcatatatatttgaaagatgttagaagtggtgacctaactaagtatttcctttctcattttttggcgtctaattatgtgttcatttcattactgaagcaattcaaaatatggatgttacttaatcaattcagaaagttgctgatgcttatgattgcaaagttctggaaacacttgcaagcattatgtttctgctggaatttgctctaggtattttcctgcacaagttctatggttttgttcttagctaacactacaagtgtggatgaatctgggaagcagcatttccttgatgcatcagttgcttacaagcgtgtagtcctgaacgacatcgaataccttgctaggtttgggtactccaaggagcaggatctctggaatagtagactctccttatgcagtgtcaactcttgacatccctacaacaatatttgatcaggatgatatggagcaatggtggcagcactagttgaagatgatcagcttgtgaagtcttttacacaagttgttttccacgttttgtcgagctcaagtaaattccttcacaatgttggccttcagtatgtctccaagacaagcttagtttcatcaaaagtgcaagaactctaatctcaactagagactaagacaagaaaaacgatagactttggcgaaaatggaaaccttgaaggcgtcacaagaatttgcagccactgtagctaatcaaccaattgaggtcaaggcgtcacaagaatttgcagccactgtagctaatcaaccaattgaggtcgaagattttaagaagttgctaatagaaaataatactcggtcgaagatttaaagatagactcttaatgtttgatgaaattatatgcacaatttggattgcattcaagtgtacgttgatttttattaattggtgatgaaataaaaatgtcatagtttgtttgacatgtcagctactatattatctgccacttcatctcacttgcgacaaaactaatggtcataatttt

SEQ ID NO: 78433 - DNA, 1137 bp, Zea Mays
catccacctgcgacacatttccccccttttcccgcaacttccgtgacgacttcaccactacatccatgccaccggcgacttcatggcctccccattcagcctctccttcccaagacaaagatggttccagggaggaagggatttaatgcacaagggaacccagcagtgatatgggctgtcatattgatagctttattgttgtggtcacatacacatttaattgaaaatgggcttgtcacagcaattcaaaatatggatgttacttaatcaattcagaaagttgctgatgcttatgattgcaaagttctggaaacacttgcaagcattatgtttctgctggaatttgctctaggtattttcctgcacaagttctatggttttgttcttagctaacactacaagtgtggatgaatctgggaagcagcatttccttgatgcatcagttgcttacaagcgtgtagtcctgaacgacatcgaataccttgctaggtttgggtactccaaggagcaggatctctggaatagtagactctccttatgcagtgtcaactcttgacatccctacaacaatatttgatcaggatgatatggagcaatggtggcagcactagttgaagatgatcagcttgtgaagtcttttacacaagttgttttccacgttttgtcgagctcaagtaaattccttcacaatgttggccttcagtatgtctccaagacaagcttagtttcatcaaaagtgcaagaactctaatctcaactagagactaagacaagaaaaacgatagactttggcgaaaatggaaaccttgaaggcgtcacaagaatttgcagccactgtagctaatcaaccaattgaggtcaaggcgtcacaagaatttgcagccactgtagctaatcaaccaattgaggtcgaagattttaagaagttgctaatagaaaataatactcggtcgaagatttaaagatagactcttaatgtttgatgaaattatatgcacaatttggattgcattcaagtgtacgttgatttttattaattggtgatgaaataaaaatgtcatagtttgtttgacatgtcagctactatattatctgccacttcatctcacttgcgacaaaactaatggtcataatttt

SEQ ID NO: 78434 - DNA, 1026 bp, Zea Mays
catccacctgcgacacatttccccccttttcccgcaacttccgtgacgacttcaccactacatccatgccaccggcgacttcatggcctccccattcagcctctccttcccaagacaaagatggttccagggaggaagggatttaatgcacaagggaacccagcagtgatatgggctgtcatattgatagctttattgttgtggtcacatacacatttaattgaaaatgggcttgtcacaggtattttcctgcacaagttctatggttttgttcttagctaacactacaagtgtggatgaatctgggaagcagcatttccttgatgcatcagttgcttacaagcgtgtagtcctgaacgacatcgaataccttgctaggtttgggtactccaaggagcaggatctctggaatagtagactctccttatgcagtgtcaactcttgacatccctacaacaatatttgatcaggatgatatggagcaatggtggcagcactagttgaagatgatcagcttgtgaagtcttttacacaagttgttttccacgttttgtcgagctcaagtaaattccttcacaatgttggccttcagtatgtctccaagacaagcttagtttcatcaaaagtgcaagaactctaatctcaactagagactaagacaagaaaaacgatagactttggcgaaaatggaaaccttgaaggcgtcacaagaatttgcagccactgtagctaatcaaccaattgaggtcaaggcgtcacaagaatttgcagccactgtagctaatcaaccaattgaggtcgaagattttaagaagttgctaatagaaaataatactcggtcgaagatttaaagatagactcttaatgtttgatgaaattatatgcacaatttggattgcattcaagtgtacgttgatttttattaattggtgatgaaataaaaatgtcatagtttgtttgacatgtcagctactatattatctgccacttcatctcacttgcgacaaaactaatggtcataatttt

SEQ ID NO: 78435 - DNA, 1516 bp, Zea Mays
catccacctgcgacacatttccccccttttcccgcaacttccgtgacgacttcaccactacatccatgccaccggcgacttcatggcctccccattcagcctctccttcccaagacaaagatggttccagggaggaagggatttaatgcacaagggaacccagcaggtaatttcatcctaatgactctcgtcttctgtagggttcgggctggcggtgcgcaatagggttagaggctgtagggtactggctatttttctccatttttcatcttattactatcctactgggtacatatacgtgtagttgagcggattggtttagctagctgctacatgtgcatatccaatttgaatggacgcaagtttgcaagagctattatttcaggtttacactactacatttgatcctcattcatgtcattttgctcattggagtagtgcaggcgatgttaaaaggagatctcaagtcttcctttctagtcgcagacttccatctgcaattttagatttgggccttgacctactgatctgttctcaagttcatatggacatacactagccagttgcaaagcacaatctagttcttcaaaaaccgatgttataaacattttcagattaaggtgtcgctaaatgctgactttatagtactttggacatctacatataaatgcctttctgatggaaccttgcaaacttttctctgagtatgtgatcaccacctctaggactgattactcttcacctcctcaaggaaagcagaagttcaggtgcaattcaaggatgttcctgatgacattttagaacatttccttgatgcatcagttgcttacaagcgtgtagtcctgaacgacatcgaataccttgctaggtttgggtactccaaggagcaggatctctggaatagtagactctccttatgcagtgtcaactcttgacatccctacaacaatatttgatcaggatgatatggagcaatggtggcagcactagttgaagatgatcagcttgtgaagtcttttacacaagttgttttccacgttttgtcgagctcaagtaaattccttcacaatgttggccttcagtatgtctccaagacaagcttagtttcatcaaaagtgcaagaactctaatctcaactagagactaagacaagaaaaacgatagactttggcgaaaatggaaaccttgaaggcgtcacaagaatttgcagccactgtagctaatcaaccaattgaggtcaaggcgtcacaagaatttgcagccactgtagctaatcaaccaattgaggtcgaagattttaagaagttgctaatagaaaataatactcggtcgaagatttaaagatagactcttaatgtttgatgaaattatatgcacaatttggattgcattcaagtgtacgttgatttttattaattggtgatgaaataaaaatgtcatagtttgtttgacatgtcagctactatattatctgccacttcatctcacttgcgacaaaactaatggtcataatttt

SEQ ID NO: 78436 - DNA, 1893 bp, Zea Mays
catccacctgcgacacatttccccccttttcccgcaacttccgtgacgacttcaccactacatccatgccaccggcgacttcatggcctccccattcagcctctccttcccaagacaaagatggttccagggaggaagggatttaatgcacaagggaacccagcaggcgatgttaaaaggagatctcaagtcttcctttctagtcgcagacttccatctgcaattttagatttgggccttgacctactgatctgttctcaagttcatatggacatacactagccagttgcaaagcacaatctagttcttcaaaaaccgatgttataaacattttcagattaaggtgtcgctaaatgctgactttatagtactttggacatctacatataaatgcctttctgatggaaccttgcaaacttttctctgagtatgtgatcaccacctctaggactgattactcttcacctcctcaaggaaagcagaagttcaggtgcaattcaaggatgttcctgatgacattttagaagtatgttcatagaagttactcatagtgtagtatactcttagcatagatttacttgtatagtaatgatagtgcctttacataaccactaaccagacacaacaaagcaatatgttctttcataggttagagatcatggggtctgaaactatcaaaggattagctaaaggttcaatgactacagaatgggtgatatgggctgtcatattgatagctttattgttgtggtcacatacacatttaattgaaaatgggcttgtcacaggtagaactactgatgttcttgctgttgccaacacagtggcagaattgcttcagaatcattgttgactccccctaagcatatatatttgaaagatgttagaagtggtgacctaactaagtatttcctttctcattttttggcgtctaattatgtgttcatttcattactgaagcaattcaaaatatggatgttacttaatcaattcagaaagttgctgatgcttatgattgcaaagttctggaaacacttgcaagcattatgtttctgctggaatttgctctaggtattttcctgcacaagttctatggttttgttcttagctaacactacaagtgtggatgaatctgggaagcagcatttccttgatgcatcagttgcttacaagcgtgtagtcctgaacgacatcgaataccttgctaggtttgggtactccaaggagcaggtgtatctcttactatcatgttgtccctgtgaggcaggatctctggaatagtagactctccttatgcagtgtcaactcttgacatccctacaacaatatttgatcaggatgatatggagcaatggtggcagcactagttgaagatgatcagcttgtgaagtcttttacacaagttgttttccacgttttgtcgagctcaagtaaattccttcacaatgttggccttcagtatgtctccaagacaagcttagtttcatcaaaagtgcaagaactctaatctcaactagagactaagacaagaaaaacgatagactttggcgaaaatggaaaccttgaaggcgtcacaagaatttgcagccactgtagctaatcaaccaattgaggtcaaggcgtcacaagaatttgcagccactgtagctaatcaaccaattgaggtcgaagattttaagaagttgctaatagaaaataatactcggtcgaagatttaaagatagactcttaatgtttgatgaaattatatgcacaatttggattgcattcaagtgtacgttgatttttattaattggtgatgaaataaaaatgtcatagtttgtttgacatgtcagctactatattatctgccacttcatctcacttgcgacaaaactaatggtcataatttt

SEQ ID NO: 78437 - DNA, 1099 bp, Zea Mays
catccacctgcgacacatttccccccttttcccgcaacttccgtgacgacttcaccactacatccatgccaccggcgacttcatggcctccccattcagcctctccttcccaagacaaagatggttccagggaggaagggatttaatgcacaagggaacccagcagcaattcaaaatatggatgttacttaatcaattcagaaagttgctgatgcttatgattgcaaagttctggaaacacttgcaagcattatgtttctgctggaatttgctctaggtattttcctgcacaagttctatggttttgttcttagctaacactacaagtgtggatgaatctgggaagcagcatttccttgatgcatcagttgcttacaagcgtgtagtcctgaacgacatcgaataccttgctaggtttgggtactccaaggagcaggtgtatctcttactatcatgttgtccctgtgaggcaggatctctggaatagtagactctccttatgcagtgtcaactcttgacatccctacaacaatatttgatcaggatgatatggagcaatggtggcagcactagttgaagatgatcagcttgtgaagtcttttacacaagttgttttccacgttttgtcgagctcaagtaaattccttcacaatgttggccttcagtatgtctccaagacaagcttagtttcatcaaaagtgcaagaactctaatctcaactagagactaagacaagaaaaacgatagactttggcgaaaatggaaaccttgaaggcgtcacaagaatttgcagccactgtagctaatcaaccaattgaggtcaaggcgtcacaagaatttgcagccactgtagctaatcaaccaattgaggtcgaagattttaagaagttgctaatagaaaataatactcggtcgaagatttaaagatagactcttaatgtttgatgaaattatatgcacaatttggattgcattcaagtgtacgttgatttttattaattggtgatgaaataaaaatgtcatagtttgtttgacatgtcagctactatattatctgccacttcatctcacttgcgacaaaactaatggtcataatttt

SEQ ID NO: 78438 - DNA, 2008 bp, Zea Mays
atcccatccacctgcgacacatttccccccttttcccgcaacttccgtgacgacttcaccactacatccatgccaccggcgacttcatggcctccccattcagcctctccttcccaagacaaagatggttccagggaggaagggatttaatgcacaagggaacccagcaggtaatttcatcctaatgactctcgtcttctgtagggttcgggctggcggtgcgcaatagggttagaggctgtagggtactggctatttttctccatttttcatcttattactatcctactgggtacatatacgtgtagttgagcggattggtttagctagctgctacatgtgcatatccaatttgaatggacgcaagtttgcaagagctattatttcaggtttacactactacatttgatcctcattcatgtcattttgctcattggagtagtgcaggcgatgttaaaaggagatctcaagtcttcctttctagtcgcagacttccatctgcaattttagatttgggccttgacctactgatctgttctcaagttcatatggacatacactagccagttgcaaagcacaatctagttcttcaaaaaccgatgttataaacattttcagattaaggtgtcgctaaatgctgactttatagtactttggacatctacatataaatgcctttctgatggaaccttgcaaacttttctctgagtatgtgatcaccacctctaggactgattactcttcacctcctcaaggaaagcagaagttcaggtgcaattcaaggatgttcctgatgacattttagaagtatgttcatagaagttactcatagtgtagtatactcttagcatagatttacttgtatagtaatgatagtgcctttacataaccactaaccagacacaacaaagcaatatgttctttcataggttagagatcatggggtctgaaactatcaaaggattagctaaaggttcaatgactacagaatgggtgatatgggctgtcatattgatagctttattgttgtggtcacatacacatttaattgaaaatgggcttgtcacaggtagaactactgatgttcttgctgttgccaacacagtggcagaattgcttcagaatcattgttgactccccctaagcatatatatttgaaagatgttagaagtggtgacctaactaagtattttcctgcacaagttctatggttttgttcttagctaacactacaagtgtggatgaatctgggaagcagcatttccttgatgcatcagttgcttacaagcgtgtagtcctgaacgacatcgaataccttgctaggtttgggtactccaaggagcaggtgtatctcttactatcatgttgtccctgtgaggcaggatctctggaatagtagactctccttatgcagtgtcaactcttgacatccctacaacaatatttgatcaggatgatatggagcaatggtggcagcactagttgaagatgatcagcttgtgaagtcttttacacaagttgttttccacgttttgtcgagctcaagtaaattccttcacaatgttggccttcagtatgtctccaagacaagcttagtttcatcaaaagtgcaagaactctaatctcaactagagactaagacaagaaaaacgatagactttggcgaaaatggaaaccttgaaggcgtcacaagaatttgcagccactgtagctaatcaaccaattgaggtcaaggcgtcacaagaatttgcagccactgtagctaatcaaccaattgaggtcgaagattttaagaagttgctaatagaaaataatactcggtcgaagatttaaagatagactcttaatgtttgatgaaattatatgcacaatttggattgcattcaagtgtacgttgatttttattaattggtgatgaaataaaaatgtcatagtttgtttgacatgtcagctactatattatctgccacttcatctcacttgcgacaaaactaatggtcataatttt

SEQ ID NO: 78439 - DNA, 986 bp, Zea Mays
ctccctcataatccttgacaggcggcacccaatcccatccacctgcgacacatttccccccttttcccgcaacttccgtgacgacttcaccactacatccatgccaccggcgacttcatggcctccccattcagcctctccttcccaagacaaagatggttccagggaggaagggatttaatgcacaagggaacccagcaggtattttcctgcacaagttctatggttttgttcttagctaacactacaagtgtggatgaatctgggaagcagcatttccttgatgcatcagttgcttacaagcgtgtagtcctgaacgacatcgaataccttgctaggtttgggtactccaaggagcaggatctctggaatagtagactctccttatgcagtgtcaactcttgacatccctacaacaatatttgatcaggatgatatggagcaatggtggcagcactagttgaagatgatcagcttgtgaagtcttttacacaagttgttttccacgttttgtcgagctcaagtaaattccttcacaatgttggccttcagtatgtctccaagacaagcttagtttcatcaaaagtgcaagaactctaatctcaactagagactaagacaagaaaaacgatagactttggcgaaaatggaaaccttgaaggcgtcacaagaatttgcagccactgtagctaatcaaccaattgaggtcaaggcgtcacaagaatttgcagccactgtagctaatcaaccaattgaggtcgaagattttaagaagttgctaatagaaaataatactcggtcgaagatttaaagatagactcttaatgtttgatgaaattatatgcacaatttggattgcattcaagtgtacgttgatttttattaattggtgatgaaataaaaatgtcatagtttgtttgacatgtcagctactatattatctgccacttcatctcacttgcgacaaaactaatggtcataatttt

SEQ ID NO: 78440 - DNA, 1773 bp, Zea Mays
ctccctcataatccttgacaggcggcacccaatcccatccacctgcgacacatttccccccttttcccgcaacttccgtgacgacttcaccactacatccatgccaccggcgacttcatggcctccccattcagcctctccttcccaagacaaagatggttccagggaggaagggatttaatgcacaagggaacccagcaggactgattactcttcacctcctcaaggaaagcagaagttcaggtgcaattcaaggatgttcctgatgacattttagaagtatgttcatagaagttactcatagtgtagtatactcttagcatagatttacttgtatagtaatgatagtgcctttacataaccactaaccagacacaacaaagcaatatgttctttcataggttagagatcatggggtctgaaactatcaaaggattagctaaaggttcaatgactacagaatggggtagggcagatccatgcattgatactggaaaaccagtatagtggtccctttttagattgaatgaaatgcagttgtgcagagcatgtgcattgctgcaactatttttatactgcttttttactgatattgctatggagatcaacaattttgtttttattttgcagtgatatgggctgtcatattgatagctttattgttgtggtcacatacacatttaattgaaaatgggcttgtcacaggtagaactactgatgttcttgctgttgccaacacagtggcagaattgcttcagaatcattgttgactccccctaagcatatatatttgaaagatgttagaagtggtgacctaactaagtatttcctttctcattttttggcgtctaattatgtgttcatttcattactgaagcaattcaaaatatggatgttacttaatcaattcagaaagttgctgatgcttatgattgcaaagttctggaaacacttgcaagcattatgtttctgctggaatttgctctaggtattttcctgcacaagttctatggttttgttcttagctaacactacaagtgtggatgaatctgggaagcagcatttccttgatgcatcagttgcttacaagcgtgtagtcctgaacgacatcgaataccttgctaggtttgggtactccaaggagcaggatctctggaatagtagactctccttatgcagtgtcaactcttgacatccctacaacaatatttgatcaggatgatatggagcaatggtggcagcactagttgaagatgatcagcttgtgaagtcttttacacaagttgttttccacgttttgtcgagctcaagtaaattccttcacaatgttggccttcagtatgtctccaagacaagcttagtttcatcaaaagtgcaagaactctaatctcaactagagactaagacaagaaaaacgatagactttggcgaaaatggaaaccttgaaggcgtcacaagaatttgcagccactgtagctaatcaaccaattgaggtcaaggcgtcacaagaatttgcagccactgtagctaatcaaccaattgaggtcgaagattttaagaagttgctaatagaaaataatactcggtcgaagatttaaagatagactcttaatgtttgatgaaattatatgcacaatttggattgcattcaagtgtacgttgatttttattaattggtgatgaaataaaaatgtcatagtttgtttgacatgtcagctactatattatctgccacttcatctcacttgcgacaaaactaatggtcataatttt

SEQ ID NO: 78441 - DNA, 916 bp, Zea Mays
ctcaatctccctcataatccttgacaggcggcacccaatcccatccacctgcgacacatttccccccttttcccgcaacttccgtgacgacttcaccactacatccatgccaccggcgacttcatggcctccccattcagcctctccttcccaagacaaagatggttccagggaggaagggatttaatgcacaagggaacccagcaggactgattactcttcacctcctcaaggaaagcagaagttcaggtgcaattcaaggatgttcctgatgacattttagaatgatatgggctgtcatattgatagctttattgttgtggtcacatacacatttaattgaaaatgggcttgtcacaggatgatatggagcaatggtggcagcactagttgaagatgatcagcttgtgaagtcttttacacaagttgttttccacgttttgtcgagctcaagtaaattccttcacaatgttggccttcagtatgtctccaagacaagcttagtttcatcaaaagtgcaagaactctaatctcaactagagactaagacaagaaaaacgatagactttggcgaaaatggaaaccttgaaggcgtcacaagaatttgcagccactgtagctaatcaaccaattgaggtcaaggcgtcacaagaatttgcagccactgtagctaatcaaccaattgaggtcgaagattttaagaagttgctaatagaaaataatactcggtcgaagatttaaagatagactcttaatgtttgatgaaattatatgcacaatttggattgcattcaagtgtacgttgatttttattaattggtgatgaaataaaaatgtcatagtttgtttgacatgtcagctactatattatctgccacttcatctcacttgcgacaaaactaatggtcataatttt

SEQ ID NO: 78442 - DNA, 1312 bp, Zea Mays
ctcaatctccctcataatccttgacaggcggcacccaatcccatccacctgcgacacatttccccccttttcccgcaacttccgtgacgacttcaccactacatccatgccaccggcgacttcatggcctccccattcagcctctccttcccaagacaaagatggttccagggaggaagggatttaatgcacaagggaacccagcaggtagaactactgatgttcttgctgttgccaacacagtggcagaattgcttcagaatcattgttgactccccctaagcatatatatttgaaagatgttagaagtggtgacctaactaagtatttcctttctcattttttggcgtctaattatgtgttcatttcattactgaagcaattcaaaatatggatgttacttaatcaattcagaaagttgctgatgcttatgattgcaaagttctggaaacacttgcaagcattatgtttctgctggaatttgctctaggtattttcctgcacaagttctatggttttgttcttagctaacactacaagtgtggatgaatctgggaagcagcatttccttgatgcatcagttgcttacaagcgtgtagtcctgaacgacatcgaataccttgctaggtttgggtactccaaggagcaggtgtatctcttactatcatgttgtccctgtgaggcaggatctctggaatagtagactctccttatgcagtgtcaactcttgacatccctacaacaatatttgatcaggatgatatggagcaatggtggcagcactagttgaagatgatcagcttgtgaagtcttttacacaagttgttttccacgttttgtcgagctcaagtaaattccttcacaatgttggccttcagtatgtctccaagacaagcttagtttcatcaaaagtgcaagaactctaatctcaactagagactaagacaagaaaaacgatagactttggcgaaaatggaaaccttgaaggcgtcacaagaatttgcagccactgtagctaatcaaccaattgaggtcaaggcgtcacaagaatttgcagccactgtagctaatcaaccaattgaggtcgaagattttaagaagttgctaatagaaaataatactcggtcgaagatttaaagatagactcttaatgtttgatgaaattatatgcacaatttggattgcattcaagtgtacgttgatttttattaattggtgatgaaataaaaatgtcatagtttgtttgacatgtcagctactatattatctgccacttcatctcacttgcgacaaaactaatggtcataatttt

SEQ ID NO: 78443 - DNA, 1221 bp, Zea Mays
ctcaatctccctcataatccttgacaggcggcacccaatcccatccacctgcgacacatttccccccttttcccgcaacttccgtgacgacttcaccactacatccatgccaccggcgacttcatggcctccccattcagcctctccttcccaagacaaagatggttccagggaggaagggatttaatgcacaagggaacccagcagtgatatgggctgtcatattgatagctttattgttgtggtcacatacacatttaattgaaaatgggcttgtcacaggtagaactactgatgttcttgctgttgccaacacagtggcagaattgcttcagaatcattgttgactccccctaagcatatatatttgaaagatgttagaagtggtgacctaactaagtattttcctgcacaagttctatggttttgttcttagctaacactacaagtgtggatgaatctgggaagcagcatttccttgatgcatcagttgcttacaagcgtgtagtcctgaacgacatcgaataccttgctaggtttgggtactccaaggagcaggtgtatctcttactatcatgttgtccctgtgaggcaggatctctggaatagtagactctccttatgcagtgtcaactcttgacatccctacaacaatatttgatcaggatgatatggagcaatggtggcagcactagttgaagatgatcagcttgtgaagtcttttacacaagttgttttccacgttttgtcgagctcaagtaaattccttcacaatgttggccttcagtatgtctccaagacaagcttagtttcatcaaaagtgcaagaactctaatctcaactagagactaagacaagaaaaacgatagactttggcgaaaatggaaaccttgaaggcgtcacaagaatttgcagccactgtagctaatcaaccaattgaggtcaaggcgtcacaagaatttgcagccactgtagctaatcaaccaattgaggtcgaagattttaagaagttgctaatagaaaataatactcggtcgaagatttaaagatagactcttaatgtttgatgaaattatatgcacaatttggattgcattcaagtgtacgttgatttttattaattggtgatgaaataaaaatgtcatagtttgtttgacatgtcagctactatattatctgccacttcatctcacttgcgacaaaactaatggtcataatttt

SEQ ID NO: 78444 - DNA, 1037 bp, Zea Mays
ctcaatctccctcataatccttgacaggcggcacccaatcccatccacctgcgacacatttccccccttttcccgcaacttccgtgacgacttcaccactacatccatgccaccggcgacttcatggcctccccattcagcctctccttcccaagacaaagatggttccagggaggaagggatttaatgcacaagggaacccagcaggtagaactactgatgttcttgctgttgccaacacagtggcagaattgcttcagaatcattgttgactccccctaagcatatatatttgaaagatgttagaagtggtgacctaactaacatttccttgatgcatcagttgcttacaagcgtgtagtcctgaacgacatcgaataccttgctaggtttgggtactccaaggagcaggatctctggaatagtagactctccttatgcagtgtcaactcttgacatccctacaacaatatttgatcaggatgatatggagcaatggtggcagcactagttgaagatgatcagcttgtgaagtcttttacacaagttgttttccacgttttgtcgagctcaagtaaattccttcacaatgttggccttcagtatgtctccaagacaagcttagtttcatcaaaagtgcaagaactctaatctcaactagagactaagacaagaaaaacgatagactttggcgaaaatggaaaccttgaaggcgtcacaagaatttgcagccactgtagctaatcaaccaattgaggtcaaggcgtcacaagaatttgcagccactgtagctaatcaaccaattgaggtcgaagattttaagaagttgctaatagaaaataatactcggtcgaagatttaaagatagactcttaatgtttgatgaaattatatgcacaatttggattgcattcaagtgtacgttgatttttattaattggtgatgaaataaaaatgtcatagtttgtttgacatgtcagctactatattatctgccacttcatctcacttgcgacaaaactaatggtcataatttt

SEQ ID NO: 78445 - DNA, 1369 bp, Zea Mays
gaaaagtcgtaggctcaatctccctcataatccttgacaggcggcacccaatcccatccacctgcgacacatttccccccttttcccgcaacttccgtgacgacttcaccactacatccatgccaccggcgacttcatggcctccccattcagcctctccttcccaagacaaagatggttccagggaggaagggatttaatgcacaagggaacccagcaggactgattactcttcacctcctcaaggaaagcagaagttcaggtgcaattcaaggatgttcctgatgacattttagaatgatatgggctgtcatattgatagctttattgttgtggtcacatacacatttaattgaaaatgggcttgtcacaggtagaactactgatgttcttgctgttgccaacacagtggcagaattgcttcagaatcattgttgactccccctaagcatatatatttgaaagatgttagaagtggtgacctaactaagtatttcctttctcattttttggcgtctaattatgtgttcatttcattactgaagcaattcaaaatatggatgttacttaatcaattcagaaagttgctgatgcttatgattgcaaagttctggaaacacttgcaagcattatgtttctgctggaatttgctctagcatttccttgatgcatcagttgcttacaagcgtgtagtcctgaacgacatcgaataccttgctaggtttgggtactccaaggagcaggatctctggaatagtagactctccttatgcagtgtcaactcttgacatccctacaacaatatttgatcaggatgatatggagcaatggtggcagcactagttgaagatgatcagcttgtgaagtcttttacacaagttgttttccacgttttgtcgagctcaagtaaattccttcacaatgttggccttcagtatgtctccaagacaagcttagtttcatcaaaagtgcaagaactctaatctcaactagagactaagacaagaaaaacgatagactttggcgaaaatggaaaccttgaaggcgtcacaagaatttgcagccactgtagctaatcaaccaattgaggtcaaggcgtcacaagaatttgcagccactgtagctaatcaaccaattgaggtcgaagattttaagaagttgctaatagaaaataatactcggtcgaagatttaaagatagactcttaatgtttgatgaaattatatgcacaatttggattgcattcaagtgtacgttgatttttattaattggtgatgaaataaaaatgtcatagtttgtttgacatgtcagctactatattatctgccacttcatctcacttgcgacaaaactaatggtcataatttt

SEQ ID NO: 78446 - DNA, 1353 bp, Zea Mays
agcagccgtaggacacacgcacaccgcctcgacctcgagtccaccactgactccaccacctccccctgttttttttcgacctcgctctgctcatccgcacggccagacagccatggtggtggtgctcgccaacccgcctgtcgtggaccagatcccgctcctgcggtccccgggccccagggacagcttctcgtgcgtgccggtcgtcgacctgtccggccccggcgcggcgcgcgcgatcgtcgacgcctgcgagcgcttcggcttcttcaaggtcgtcaaccacggcgtgcccgcggccaccatggacgtggccgagtccgaggccgtcggcttcttcgcgcaggcgcaggccgacaaggaccgcgcgggcccccgcgcgtcgtacccgttcggctacggcagcaagcggatcggcctcaatggcgacatggggtggctcgagtacctcctcctcgccgtcgactccgcgtcgctctccgacgcctgccccgtcccatccggcgccgcgttccggtgctgaccaacgggaggttcgagagcgtgaagcaccgggtggtgaccaacagcctcaagtccagggtttccttcatctacttcgcgggaccggcgctggagcagcggatcgcgccgctggcgcagctgctggcggagggcgaggagagcctgtacagggagttcacgtggggcgagtacaagacggccgcgtacaagacgaggctcggcgacaacaggctggcccagtttcagaggtgtagcatctaagctagctgcttagctagcactctagcagggcggcccccggccggtcaagcacacaccagctttacaggacgacaacagcaacaaccatgacgaacgaggacgagcgagtctgcttgcgagaaatgatggcgaagaagaagaagaagaacaaggtagagacgagacgatgatgatgtgtacagctggggagcgaccactctagtagctagatttttttttgtggtggtggtgggtagctgggtgcagggagcagggtttccgcaagttgctaatatggcctgttttggtgcatgcggtggggttacttgcctatttcggtaatgctggagctggacgggcaatgagccgcgcgccactagttagcgttaaccgaagtgggaggagtacttagcttagcagcgaagggccgatcgatcctctctggctcctccccagcagcttcccaagttagcttgcttctgcttcgccttcctagtttttttttggtgtgtgtgtgtgtgtttttaagcaccaagtcgcgtgtatgtattatcgtcgtgtacatggaggtttgtgtgtgcgctaatgtagacctcctgtttacctttt

SEQ ID NO: 78447 - DNA, 1849 bp, Zea Mays
ccagcagcgaagatggcacgctcttcctccgccacaggctcgtgggcgcgacgcttcccgtgctgctgcgacggtgaccgtaggaacaggttcggcggccgcagcctctccggcgatctcctgccgccgccgtcggttggcgcaatggcacagcagcctcccaggctcaggaagaaaaacctcgtgtcgccctacgatccgcgttacaacccacgcagggtctgggagacgtttctgatcctcctggtggtgtactcggcgtggatatgcccgctggagttcgcgttcctgaggtacctgccccgggcccctttcgtcgtggacgacgtcgtcaacggcttcttcgccgtcgacatcgtgctcactttcttcgtcccgtacgtcgacagcaagtcctgcctcgtcgtcgacgatcacaggaaaatagcagccaggtacctgtcgacttggtttgccttcgatgtctgctcgacgttcccgttccagtccatcagcctgctgttcgacgagcacgagcacagcctgggcctcaagttcctcaacgttctcaggctttggcggctgcgcagggtcagctccttgtttgcaaggctcgagaaggacatccggttcaactacgcagtgatccgctgcacgaagctcatctccgtgaccctgttcgccatccactgcgccgggtgcatcaactacctgatcgcggaccggtacccggacccgaggcggacgtggatcggcgccgccatgccggacttccgcgaggccggcctgtggatccgctacgtgacgtccatgtactggtccatcaccacgatgaccaccacggggtacggcgacctgcacgccgagaacagccgggagatgctgttcgggatcgccttcatgctcttcaacctctggctcaccgcctacctcatcggcaacatgacaaacctcgtcgtccacagcaccggccgcaccagggactttagggatatggtccaggtcgcctcggagttcgcggcgaggaaccaactgccgcagcagatcgaggagcagatgctgaaccacatatgcctgaggttcaggacggagggcctcaagcagcaggagacgctggatatgcttcccaaggcgatgcggtccagcatctccctctacctcttcttccccgtcgtgcagggctcctacctgttcaagggagtttcctcaggcttcatccagcagctggcgacggagatgcagcccgagtacttcgccccgaaggaggatatcatgctgcagaatgacaagccgtcagacatgtaccttctcgtatcaggagccgtggacattctgacgttcctagatggaacagagcaggtctacggaaaagcggcagagggagagctgttgggagaggttggggtcatgtccaacaagccacagccattcaccttccggaccacaagactgtctcagattctgaggattgccaggtccaagctgatggacatcatgcgagagaacggagaggacggccagatcatcagaagcaactttcagcagagactccgcgtggagcaaagactgtacatcgcaatgcatcaagacggtccggtccctgcatttgagcggaggatggatccctgagacccctcggctgtcaaagcacgcacgcagcgtggtgaattatttgctcggctatactgacaatatgtattgggtgaaatcgacaaataagtttaagtaggggagaagaaggattttgctgtatcctttttggcgcacaatctgaagagtgaagtagccttcggtagcagtgtagcaggagaacatggaaggaagggccgaaattattgtcagctccggcttctcagccctggaatatcga

SEQ ID NO: 78448 - DNA, 1483 bp, Zea Mays
gtttggaccaccgcattggggggtacccagtgggaggacggcctgctcagcaatggtgactttgagacggcaccagccggcggttttgtaagatctgcgtctgttgctgagggtgcatcgtcaatccctggttggacaatcaatggcacagtcgagctcatttcagcaggccagcaccagggtggcatgatcctgattgttccacagggagaccatgctgtaaggctagggaatgatgctagcgttgggcaggtggtggacgtcgagaagggctcggactacgctgtcacattcagcgctgcccggacatgtgcacaactggaggcactgaacgtctccgtgctaggtggcgtgtcgcagacagtagatttacagacgttgtacaacatagaagggtgggacgcgtacgcgctggcttttcaggcgacggaagagcaggcgcatcttcagttcatgaaccctggcatggaggacgatccaacttgtggccccatcctagacaacgttgctgtcaagaagctcttcactccggacaaaccaaaggataacgtggtgctgaatggagactttgaggagggcccttggatgttcccgaacaccagctttggcgtgctgctcccaactaaccttgatgagcagacatctgccatacctggctggatgatcgagtcaaaccgcgctgtccgctacatcgattctgatcagtacaaggttccccaggggaagcgtgccattgagcttctgtcaggcaaggagggtatcatctcccagatggtcgagacgacccctgagaaggtttacagcctgacggccatgctgggcgcggcgggggactcgtgccaaccaccaatggccatcatggcgttcgccggggaccaggcccagaacttccattactcaccattgggcaacgccacgagccaggctgtgaacgtgacgttcactgcgcgtgctgagaggacacgcgtggcgttctacagcgtgtactacaacacgaggagtgacgaccacagctcgctgtgcgggccggtgatcgacgacgtccgcgtatggggcttgaacaccgcggctgggttgaaggcgagtgctggactggttcttggcattgttggcgtcgttggcatggtgctgttctgaaatctggatctctcagtggctgtagcctgtagtcttgggaagcatggatgtgtaatctcatctgttagttcgaggaggggcagggcttactggttttggtagtaagcttgaagtttgtcgagtaatatgagcttaggctaaaaaaaaaagctaccagaacccacatgttattgcctgtgttacttcatttgtgattcctgaagtaacatgcaattctatgggattgtgtggtttgtttgccctagcttgtactgtaatatgagatgttagaactgttacaagttcatctcctcacaatatgaaaatattgttattgtaaagttaaaatcgtgcattatgccgtctt

SEQ ID NO: 78449 - DNA, 1642 bp, Zea Mays
cgagcgtccactccactggatcgctagctagctagctggcgcaggctgtcctcatgttccaaaagtctcgtcccatgtgactgaccctccggttccaattcccatccgtctccatgcccctcgctcgtcctcgccccggcacaagctgcccgcccggctactgcacagcaccactatatataaaaccaaactccagcaggcgccggcgccaaatcgcaagagctagcgagagcacgcactgctggcggcgcggctaagaccgagagccgccgcgcacattgttcgcgcgaggccagccgccggttgcattgcatggcgcagcagctgccgcccaggatcccgaccgaggtgcaccactggcccgaggggggccagcacggcgcggcggcggcgtgggcggacgacttcgccgagttcgcggcggcgcggcggggcgcgcaccgcaggtcgctcagcgactcggtcgccttcgtcgaggtggcgccggccgacggcggggccggcgagttcgaccggctcgacgacgaccagctcctgtccatgttcccacccgacgaggccggcggaggcgggtcgtccgcggccgggtccgagaacggcggcagcagcgacagcgacggcgataagcgtggcgcgcgcggcggcccggcgggaggcgctccctccaccggcagtggcggcggcgagcagaacggagtcgtggatgcgcaagcgccggcggcgactggaggacaagctgccgtcgtcgcctccacggagctcatccgggaccctaagagggtgaagaggatccttgccaaccggcagtcggctcagaggtcgcgggtgaggaagctgcagtacatctccgagctcgagcgcagcgtcacaacactgcagaacgaggtgtcggtgctgtcccctcgcgtggcgtttctggaccagcagcggaccatactgagcgtcggcaacagccacctcaagcagcggatcgcagctcttgcccaggacaagattttcaaggacgctcatcaagaggagctcaagaaggagatccagaggctgcgccgggtctacgaccagcagaacctcaggatgtcagccggcggcgccgccgcttctgaccatgggccgccaccaccggtggtgcgcgctgagaaggagctcatgagctagcgagccagtccatgcgtgcccgatgtgcagtccgacttaccattaacatggagggaacattgcatcatgattttttatttccagattctgtggatgttttcttccttctttttttttggtcttcttattcttccattaacatgtgcgttgattctttgtatgttgatctggatttggtgtattaattgtgcaagttgtggtgaaatcaccaggataatttatctgtcatgtaaattatttttgatgcattacatctcttctctggaaatctggatggctcttgatttttgtagggtctttctttttttttttctttttccttcggtgtgaccagatctcttactattgccaggttcagtgtaatagaattagcaaggtggcccaagtaaatagtgagggcagctaccgtttttgttctttgtaacgtagtaacatttgtatcggagtttttttaattgaaattctttttgcaattttattacctgtt

SEQ ID NO: 78450 - DNA, 1146 bp, Zea Mays
gcccaccaaaccgcgccacccattgttgtcgcttctcacttctcactcaccaaccaacccaaccgagcaacttggctcgtaccgtacgtactacctgctccgacacgccgaggagctagagaggaccgcgcgcgtgctgctgacctgcgggagctaggacagacacgatacgacagataccatgtcgacgacgacgacgaaggcgagcgacccggggtccgcgtggttcggcagcggtgcacggacccggtcggcggcggggataagccacaacgcgcggctcgtcaccaccgcggtcgccgcgttcgtgtccgtgctcggcctcgccctcttcctccacctctacgtctgccacgtgcgccgccgcaaccgccgccgcgcggcggcagtgctgccgacgaccacggccgccgcggcggcggcggcggccccgaagcgcgggctggatcccgcggccgtcgcggcgctgccgaccgtcctctacagggacgcgggcggcgccgacgatggcgccgagtgcaccatctgcctcggcgccgtgcaggaaggcgagctggtgcgggcgctcccggcctgcggccacgtgttccacgtcccctgcgtcgacacctggcggagaaggtggtgcaggacgccgtcaaggaggaggccggcagctccacgccggagagggggatcggtgcctgcgcgtcgctgatgaagatgctcagcagggagaggccggcgccgcggaggccacacgccgacgccggggacttggacgacttggaacggcagcagcattctgttgccgtcaataattagcctattgttttttattagaaaaaaaaggaaagaaaggcggcctttttagtctggtcgttctccacatcatttgtatatcccgcatttgcgtgagtggtgcagtagtaagacaggtctgtgactgtgagctcttgactttttttgatgaatgtaagagcccatttcaaaagaattggtatggttcgaatctctacaatttagttcaaatttgaactcaatcccttttttttgtccactatatatttcgctcgagtttcgctgcttaattagcaggctgcaaggcatggatgcgaagcttcaagttttttgtcctacacctttgctgtgtgaaaaaaaaagata

SEQ ID NO: 78451 - DNA, 2616 bp, Zea Mays
attacctagctgcacgcagagagattgccaagataagatctgcactgccgccctcttttgcttgtctctttcactaaagagaggccggccagctgcatgcacccaggccaccagcgcgcgcaggagcagcttggtgtggttctatctgcctgcccctgcctcctgcggacggagtccttgtgcttgtggacggtgtggggttggtttcccaactcccttcccttcccaccatatatggccattaaatctttttcctcgacatgggcagccgagtgagagctttggagtacgggggagctagcgaatcgcatgcggtcgaaacagttcggtctctccaattaactagggagtgcggaagtgagtacgctcaagctggaggaggacaagaaccagttgtccaagggcttggacccttggagcaaccctaccgccgccaccagcaccctgcactacctgctccaggagaaggagagagcgcaggcgcatgagcagctccagatctaccaccagcaaggattcagctacctccagcaccgccggaggcagcagcagcagcagcagcagccgagggctgcaggagctggcagtgatggcgtcagcagcggcgagtcgacgcccgtggacgccctggcgaccgcattcgggagcggccgcatcgtgcggtctgccgccgggcgcaaggaccgccacagcaaggtgtgcaccgcgcgcgggctgcgcgaccgccgtgtccgcctcgccgcgcacacggccatccggttctacgacgtgcaggaccggctaggctacgaccgccccagcaaagccgtcgactggctcatccgtaacgctaaggccgccatcgacgagctttcggccgaccgggaagaggggcagcctgccgcggaggcagcggatgccactactaccgagccggccgagcaggtgacctcgacgtcctacgggttcgccatcggtggtgtggccggctccttcatgccacattcggtcggtgccgatgacgtctccggctccggctccggctccggctccggcaacgtcaagtctttgttcccctcgtcgtcgacaacgagcactacccccacccaggacgagtacaggggctccccgccggaccttctgtcgcgcacgaccagcagcaaccagcctcaggagctttgcctcactctccagtctaccaataaccaccaccaccagcagcagcagcagcagcagatcttcagccatgtgtccccgaaccaccacggtagtatgatctccgttgcaggcgtccaaggctggccggaggcgcacggccagagaatgccgccgtggcatgctccagagaacagcggcgcgggagacgacgggcgcggggccgccggaaatggcgacagttacatgttcggcgtgcccggcccacggcaagggttagaccacctgcagggccagctgatcttctcccaaggggaaccccttcagtccagtggcggcggctggccgtcgtcgtctgcccgcgcttggctcgaccccctcgtcgcgatccaccagcaccagccgtcgacgatgtccgggcaggtcggcttcggtcatctggttggcggcgccggaagcgggtttatggggttcctcgcgccgccggcccagcggctgcagctgcagagcgaggacgagcaaggaagcgaagcaatgagggagtgatgagcgtgattagctactactgctgaggtacggtgtgcgagcttaccacgcactgctctccattgatctgctcagttatatgtcattgtcatttcatgtaggagtttgtttaggtgatggaatttcgcatcattaattattagctgctgcaatattcaatcatgcctctgtataagtcgtccttggaacctgacagcgttactgttacattagtggctactactacgtacttttgtttttttatttcattctttttttttccatttcatggttgtcaacatggataagatgtgtggtgatgatgagatagacgggacgagatgtgatctcgatggggtttcccctctttggaccattatttaatgtttctcttatcacaccctagatcatatcctgctgattccataaagcaggcaaagcagcagccgatgcaatctatcagaggggggcaagaagaagaaagaaagcagcggcaaaaggatggagcaaactaaagacgaaataacaaagaacacgaaccgggccggcaggggcagcagggattcaaaatcagttcagtgtccctgtagcagttaggagagtgcaagcgctgtgctgtttgcttctgagttctgactctccatgacgataatgataggggccgcagggcaggcagcagaggaagaagtggcccggggcagacggccgcggtgggggatctgtgtgaactgcgaaagtaatttttagcaggccgaccaaatcattacccgagacaaatgaccgtctccattattggtcacaggagcatcagaacaatgttcgtcttcgaaaattatttacgcagacgagcgttctaaggtgttcattttcaaaaaccatcaatcaacaaagacggtccttcatcaacgaaggtggtcctcttaatatgtctgtattatattcataaatcgatttttt

SEQ ID NO: 78452 - DNA, 2508 bp, Zea Mays
ctctctctctctacacttcacccacacaaaaaaattaaaaccaaaaggaccagaaaactgaagggacacatgatcttctcctcagctcatatatggtactaggagtagtagctcatgtccttgtcaaggtgtaagatcgaaggagtactagtagaagtgtagaataataattatctcaccttttggtagagaggtcctaatctttttctttcttctcttttttttttgttgctccgagatcttcttttcctccctcctcctcccccggccagtgtaagattacctagctgcacgcagagagattgccaagataagatctgcactgccgccctcttttgcttgtctctttcactaaagagaggccggccagctgcatgcacccaggccaccagcgcgcgcaggagcagcttggtgtggttctatctgcctgcccctgcctcctgcggacggagtccttgtgcttgtggacggtgtggggttggtttcccaactcccttcccttcccaccatatatggccattaaatctttttcctcgacatgggcagccgagtgagagctttggagtacgggggagctagcgaatcgcatgcggtcgaaacagttcggtctctccaattaactagggagtgcggaagtgagtacgctcaagctggaggaggacaagaaccagttgtccaagggcttggacccttggagcaaccctaccgccgccaccagcaccctgcactacctgctccaggagaaggagagagcgcaggcgcatgagcagctccagatctaccaccagcaaggattcagctacctccagcaccgccggaggcagcagcagcagcagcagcagccgagggctgcaggagctggcagtgatggcgtcagcagcggcgagtcgacgcccgtggacgccctggcgaccgcattcgggagcggccgcatcgtgcggtctgccgccgggcgcaaggaccgccacagcaaggtgtgcaccgcgcgcgggctgcgcgaccgccgtgtccgcctcgccgcgcacacggccatccggttctacgacgtgcaggaccggctaggctacgaccgccccagcaaagccgtcgactggctcatccgtaacgctaaggccgccatcgacgagctttcggccgaccgggaagaggggcagcctgccgcggaggcagcggatgccactactaccgagccggccgagcaggtgacctcgacgtcctacgggttcgccatcggtggtgtggccggctccttcatgccacattcggtcggtgccgatgacgtctccggctccggctccggctccggctccggcaacgtcaagtctttgttcccctcgtcgtcgacaacgagcactacccccacccaggacgagtacaggggctccccgccggaccttctgtcgcgcacgaccagcagcaaccagcctcaggagctttgcctcactctccagtctaccaataaccaccaccaccagcagcagcagcagcagcagatcttcagccatgtgtccccgaaccaccacggtagtatgatctccgttgcaggcgtccaaggctggccggaggcgcacggccagagaatgccgccgtggcatgctccagagaacagcggcgcgggagacgacgggcgcggggccgccggaaatggcgacagttacatgttcggcgtgcccggcccacggcaagggttagaccacctgcagggccagctgatcttctcccaaggggaaccccttcagtccagtggcggcggctggccgtcgtcgtctgcccgcgcttggctcgaccccctcgtcgcgatccaccagcaccagccgtcgacgatgtccgggcaggtcggcttcggtcatctggttggcggcgccggaagcgggtttatggggttcctcgcgccgccggcccagcggctgcagctgcagagcgaggacgagcaaggaagcgaagcaatgagggagtgatgagcgtgattagctactactgctgaggcaaagcagcagccgatgcaatctatcagaggggggcaagaagaagaaagaaagcagcggcaaaaggatggagcaaactaaagacgaaataacaaagaacacgaaccgggccggcaggggcagcagggattcaaaatcagttcagtgtccctgtagcagttaggagagtgcaagcgctgtgctgtttgcttctgagttctgactctccatgacgataatgataggggccgcagggcaggcagcagaggaagaagtggcccggggcagacggccgcggtgggggatctgtgtgaactgcgaaagtaatttttagcaggccgaccaaatcattacccgagacaaatgaccgtctccattattggtcacaggagcatcagaacaatgttcgtcttcgaaaattatttacgcagacgagcgttctaaggtgttcattttcaaaaaccatcaatcaacaaagacggtccttcatcaacgaaggtggtcctcttaatatgtctgtattatattcataaatcgatttttt

SEQ ID NO: 78453 - DNA, 840 bp, Zea Mays
cggttgccacacccggcccagcacaggcgtagggtttattggcatctgtctcctgtcgcgccggccaccacagcgcagaagaacacagcacccgcctgcctcgccgccgcaatggccgccgccgcctccgctgcgagatccttcctccggtccagcggctcatcgtctctccgcagcgcggtggccagagccgcctcgcgtgcgggaccgggaccggctccgctgccgaggcggatgcccacctctgccccccgtgtactcctaaggtcgccggtggaaatgagcagcgtgtgtctggagtccttgatgcccatgcacagcgccacggcttcagcgctcatgacgtcgcttctcgccgccccggcttgcaagggattcggttggctatcagaaggtcaagctgaaactagatgaacttcatgggacccaaaagctggtaatgatgacgtgtgacggtctctagatgggaattagcagattattatcccgtcacctcagatcttcagatggatgatttgtcgttactggagatctgcagtgatggtatcttgtctggattatggatacctcgtgaatttaaagtacttggttggcgtctcagttaacatgttttgtgctctgggattgcagtttgtatgaaatttgcagaattgatcctgagatttattttggctggttagctgtcaaaaagactttggtcttgacgacttgcctgatcaagtagatctggaatgaataaacttaatagaagggttttcacaccttttgcgttttagtctaagcgtagtatgttcaaatgctgattgagcttcaaaattatctcaatccacatggtttctt

SEQ ID NO: 78454 - DNA, 1344 bp, Zea Mays
cggttgccacacccggcccagcacaggcgtagggtttattggcatctgtctcctgtcgcgccggccaccacagcgcagaagaacacagcacccgcctgcctcgccgccgcaatggccgccgccgcctccgctgcgagatccttcctccggtccagcggctcatcgtctctccgcagcgcggtggccagagccgcctcgcgtgcgggaccgggaccggctccgctgccgaggcggatgcccacctctgccccccgtgtactcctaaggtcgccggtggaaatgagcagcgtgtgtctggagtccttgatgcccatgcacagcgccacggcttcagcgctcatgacgtcgcttctcgccgccccggcttgcaagggattcggttggctatcagaaggtcaagctgaaactagatgaacttcatgggacccaaaagctggtaatgatgacgtgtgacggtctctagatgggaattagcagattattatcccgtcacctcagatcttcaggtccgttccgattttaaggaacatccatgacatgatacgtttattacaattttctagcaaatttctgttttcttacaaaatgtcctctgtggtagctgattctgataggcatagcgtgcaataatgatgtttatttctccaataagggctagttggggaactccaattttttgagggattttcgttttcccaagggaaaatgaactaatttcccttgaaaaaaatgaaaatcccttgggaaaatgttgttcccaaactagctctaaatattatgttacctcagttgtatttgttttcttgactttattgcatctctataggcctgtgattagtgcgatggaggtcaacttggatgaagactagactgctatttattttgccatctctgttgccttggttttgcccattataaatggaacatagagcaatgtagctttcgtcgctgttaatttatatgatgttattctagagcttgagcccagattattgtgtttctatttgtagatggatgatttgtcgttactggagatctgcagtgatggtatcttgtctggattatggatacctcgtgaatttaaagtacttggttggcgtctcagttaacatgttttgtgctctgggattgcagtttgtatgaaatttgcagaattgatcctgagatttattttggctggttagctgtcaaaaagactttggtcttgacgacttgcctgatcaagtagatctggaatgaataaacttaatagaagggttttcacaccttttgcgttttagtctaagcgtagtatgttcaaatgctgattgagcttcaaaattatctcaatccacatggtttctt

SEQ ID NO: 78455 - DNA, 2415 bp, Zea Mays
atttcacgcaggatcagtcgcaacgacgaaccaccggttgccacacccggcccagcacaggcgtagggtttattggcatctgtctcctgtcgcgccggccaccacagcgcagaagaacacagcacccgcctgcctcgccgccgcaatggccgccgccgcctccgctgcgagatccttcctccggtccagcggctcatcgtctctccgcagcgcggtggccagagccgcctcgcgtgcgggaccgggaccggctccgctgccgaggcggatgcccacctctgccccccgtgtactcctaaggtcgccggtggaaatgagcagcgtgtgtctggagtccttgatgcccatgcacagcgccacggcttcagcgctcatgacgtcgcttctcgccgccccggcttgcaagggattcggttggctatcagaaggtggtttcccatggcctcagtttcatttcctcgtgtcgcaatgttagattaatttgttatttaccatatttgcttgttggcacataggagatagcttatgccccatcacaattcatacgtgcacccgttttcctttgtggatgcatatctttttagaccatcaattcagtgataagaatttgatgttttggggggtggggggggggggggggggaggggtaattttggtctcaagcatcatgtttgctgcaacaaatttaacaagccaagtcaagcatcatgtagcatttgtaggatgtcctaaaaatctgtatatacattacttaatgtatatctaccttacatcagatcactagacataaaaccaggttcctaggtttgtgtctatatgtatttttagtttgccttgagtatccgtcttgttaccaccatggaaaccatacacattttcgaattaaaactgaaatatggtaacgaagttttgtattgaaattaatcttatactttccacatggtccttgttgtaggtcaagctgaaactagatgaacttcatgggacccaaaaggtgaacactttttatagatcccaccaataatgactgttgatggctagattccatcactatttcacgcgtcggaatgatttgtggaaagaagagcccactatcttcatcttatggaacttgccttaaagtcatctattgactattgtgcacttgcacattagcatgtacaatatggaacaaaagaagtctgcattttcatgagccatacattgtattgagccacatatttttattgttccttttggaactgcaaaatgcacctagcgctgctgtgccacgatcgttgtgccgtgtctaagattcccattgtcactttgagcgatcttttattgaagttctggaccttttggcaatatgagagatttctttcctgggtcgacttttgcctatggtttgctgaagtcgaactattgatgggtttacaaatagcgtttataaatttgaatacaacgtcatcattaattacaaatttgaggaaaaaaagagactgattcttttgtattggtccagctggtaatgatgacgtgtgacggtctctagatgggaattagcagattattatcccgtcacctcagatcttcaggtccgttccgattttaaggaacatccatgacatgatacgtttattacaattttctagcaaatttctgttttcttacaaaatgtcctctgtggtagctgattctgataggcatagcgtgcaataatgatgtttatttctccaataagggctagttggggaactccaattttttgagggattttcgttttcccaagggaaaatgaactaatttcccttgaaaaaaatgaaaatcccttgggaaaatgttgttcccaaactagctctaaatattatgttacctcagttgtatttgttttcttgactttattgcatctctataggcctgtgattagtgcgatggaggtcaacttggatgaagactagactgctatttattttgccatctctgttgccttggttttgcccattataaatggaacatagagcaatgtagctttcgtcgctgttaatttatatgatgttattctagagcttgagcccagattattgtgtttctatttgtagatggatgatttgtcgttactggagatctgcagtgatggtatcttgtctggattatggatacctcgtgaatttaaagtacttggttggcgtctcagttaacatgttttgtgctctgggattgcagtttgtatgaaatttgcagaattgatcctgagatttattttggctggttagctgtcaaaaagactttggtcttgacgacttgcctgatcaagtagatctggaatgaataaacttaatagaagggttttcacaccttttgcgttttagtctaagcgtagtatgttcaaatgctgattgagcttcaaaattatctcaatccacatggtttctt

SEQ ID NO: 78456 - DNA, 1401 bp, Zea Mays
cagcccaagccaggccaatttcacgcaggatcagtcgcaacgacgaaccaccggttgccacacccggcccagcacaggcgtagggtttattggcatctgtctcctgtcgcgccggccaccacagcgcagaagaacacagcacccgcctgcctcgccgccgcaatggccgccgccgcctccgctgcgagatccttcctccggtccagcggctcatcgtctctccgcagcgcggtggccagagccgcctcgcgtgcgggaccgggaccggctccgctgccgaggcggatgcccacctctgccccccgtgtactcctaaggtcgccggtggaaatgagcagcgtgtgtctggagtccttgatgcccatgcacagcgccacggcttcagcgctcatgacgtcgcttctcgccgccccggcttgcaagggattcggttggctatcagaaggtcaagctgaaactagatgaacttcatgggacccaaaaggtgaacactttttatagatcccaccaataatgactgttgatggctagattccatcactatttcacgcgtcggaatgatttgtggaaagaagagcccactatcttcatcttatggaacttgccttaaagtcatctattgactattgtgcacttgcacattagcatgtacaatatggaacaaaagaagtctgcattttcatgagccatacattgtattgagccacatatttttattgttccttttggaactgcaaaatgcacctagcgctgctgtgccacgatcgttgtgccgtgtctaagattcccattgtcactttgagcgatcttttattgaagttctggaccttttggcaatatgagagatttctttcctgggtcgacttttgcctatggtttgctgaagtcgaactattgatgggtttacaaatagcgtttataaatttgaatacaacgtcatcattaattacaaatttgaggaaaaaaagagactgattcttttgtattggtccagctggtaatgatgacgtgtgacggtctctagatgggaattagcagattattatcccgtcacctcagatcttcagatggatgatttgtcgttactggagatctgcagtgatggtatcttgtctggattatggatacctcgtgaatttaaagtacttggttggcgtctcagttaacatgttttgtgctctgggattgcagtttgtatgaaatttgcagaattgatcctgagatttattttggctggttagctgtcaaaaagactttggtcttgacgacttgcctgatcaagtagatctggaatgaataaacttaatagaagggttttcacaccttttgcgttttagtctaagcgtagtatgttcaaatgctgattgagcttcaaaattatctcaatccacatggtttctt

SEQ ID NO: 78457 - DNA, 2617 bp, Zea Mays
cataaacaacccattatgtgtaataatcgtgttgggtgacctatggcccaacgggcctataacagtccatatcatttaaatagcaaaaatatgctaaaatatacatatataaaggtttaaacataattgttagcttcaaatacatatttacacctacataaccaacaaaacaaatatatttgttgtgttttatactttatatttagtacaatatagatatttatatgggaaaatagaaaaaaaatcaagtcatgtaggatataacttgctgtggtgcacctagaccgacaaggacccgcttcgctttatgccatatcggatttgggtcagaccaaacccgtaccgggctttggaccgtccggctaacccgacccgctagacaagaaagaaaactacctgtgggctgtggcagcttcagaagtcgccgcgacaaggtgctgaattttgactttctaccagaaatcggagcgaaccaaactgccgggaaaacccctcgcctgcggcttcgcgtcggccgccgccgctgccgacactttaccgcgtgccttgcgcccccgcgccgccgatgcgatcagcgacgcacgccagatccgagcttctgtaggaccttcagccgtcgccgtcccatgggggactgcgtcgtcgaggacggccacgggcaccactactcggaggcggtggagggcgcggtttcgttgacggtagccgtggagctcgatgagcgggcggaagagtcgcgggaggaggaggagggtggcgggcagcggaagaaaatgggcgggatcccaagggagccgtcgttctcgcggtggtgcagggacccctctgccgcctccgcctccaataccgccgctgctgcggcgaccagtgacagcgacgcctcagaggagttcgagctgccgctcctgccatcctcctcgggcggcggcggctcaccgatggacattgaggtgggggcaacggcgagatctgatgatctgccgatctcgccgaggttgcttgcgaaggtcatcgggttgatagcgtgttggtacacactgagcacgtgcttgacgctgtacaacaaggagatgctgggaaagcacatgtggaagttcccggcgccattcctgatgaacacagtgcatttcacgatgcaggccgtggcgtcgagggccatcgtgtggttccagcaacgaggcctagagggagggccaagtaaaatgtcgtggaaggattactgtttacgagttgtcccaacagctttggctactgctcttgatataaatctgagcaacatttcacttgttttcattactgtgacatttgctacaatgtgcaaatctgcttctccaattttcattcttctgtttgctttcatgttcaggcttgagaaaccgagctttagccttcttggaatcatgctggttgtttcatttggagttctactaacagttgctaaagagacagaatttaatctatggggatttatgtttattatgcttgctgctgttatggctggtttccgctggtccatgactcagattcttctccagaaagaggaatatgcattaaagaatccttttaccttgatgagtcatgttgccccggtgatggcaatagtaacagcaattatttccatcgtgatggatccatggcatgacttcagagcaagtcacttttttgatagttctactcacataataagaagcagtgtgttgctgcttctaggtggggctttggcctttttcatggttttgacagaatatgtccttgtttctgtgactagcgctgtcacagtgactgtagcaggaattgtgaaggaagctgtcactattctggttgctgtgctattctttaatgatccatttacatggttaaaggcgcttgggctggcaataataatatttggtgtcagtctattcaatatttacaagtataaaaggttcaaaaaagggcatcacagtgaagatgctgggacaaatatccaatcttacaatgggacttcaaagtacgttatccttgatgatgatactgaagatcaggatgattcaggctgacctgaatatgaatgcagactactatatgcactggcgtttccagagaagcaagatcttctggtgcctgcatagacttacttccacaggctaactgatatcatactattttttgagttgatcaaccgctgtggccactggccagccatgcacgagcgtgacgcttgcagccgtgtgacaagttgagaagactacacgctcgtacatggaacatacaaggtacagcctggtatcagtacagatgttttctcctttcgttcaagacaaagaacggtgcatatatctgaacgaggcattctgcagtatgtccacgaagaaaatgttgcatcaattacaattagaaacacagatagaaactggtggtgctacaacaatattgttggacaaagtataagacaaatggggacaaagtcattgacaaatggaatggaacaccagctttactaattcaaggtggtctatggcttctcctaaggtcgggtgatgagtacaagtaacaagtgcatagttcagatgatcagccctgctggattattctccttcgggcttacatcaaatgtgcaggggaagatctctggggg

SEQ ID NO: 78458 - DNA, 2626 bp, Zea Mays
cataaacaacccattatgtgtaataatcgtgttgggtgacctatggcccaacgggcctataacagtccatatcatttaaatagcaaaaatatgctaaaatatacatatataaaggtttaaacataattgttagcttcaaatacatatttacacctacataaccaacaaaacaaatatatttgttgtgttttatactttatatttagtacaatatagatatttatatgggaaaatagaaaaaaaatcaagtcatgtaggatataacttgctgtggtgcacctagaccgacaaggacccgcttcgctttatgccatatcggatttgggtcagaccaaacccgtaccgggctttggaccgtccggctaacccgacccgctagacaagaaagaaaactacctgtgggctgtggcagcttcagaagtcgccgcgacaaggtgctgaattttgactttctaccagaaatcggagcgaaccaaactgccgggaaaacccctcgcctgcggcttcgcgtcggccgccgccgctgccgacactttaccgcgtgccttgcgcccccgcgccgccgatgcgatcagcgacgcacgccagatccgagcttctgtaggaccttcagccgtcgccgtcccatgggggactgcgtcgtcgaggacggccacgggcaccactactcggaggcggtggagggcgcggtttcgttgacggtagccgtggagctcgatgagcgggcggaagagtcgcgggaggaggaggagggtggcgggcagcggaagaaaatgggcgggatcccaagggagccgtcgttctcgcggtggtgcagggacccctctgccgcctccgcctccaataccgccgctgctgcggcgaccagtgacagcgacgcctcagaggagttcgagctgccgctcctgccatcctcctcgggcggcggcggctcaccgatggacattgaggtgggggcaacggcgagatctgatgatctgccgatctcgccgaggttgcttgcgaaggtcatcgggttgatagcgtgttggtacacactgagcacgtgcttgacgctgtacaacaaggagatgctgggaaagcacatgtggaagttcccggcgccattcctgatgaacacagtgcatttcacgatgcaggccgtggcgtcgagggccatcgtgtggttccagcaacgaggcctagagggagggccaagtaaaatgtcgtggaaggattactgtttacgagttgtcccaacagctttggctactgctcttgatataaatctgagcaacatttcacttgttttcattactgtgacatttgctacaatgtgcaaatctgcttctccaattttcattcttctgtttgctttcatgttcaggcttgagaaaccgagctttagccttcttggaatcatgctggttgtttcatttggagttctactaacagttgctaaagagacagaatttaatctatggggatttatgtttattatgcttgctgctgttatggctggtttccgctggtccatgactcagattcttctccagaaagaggaatatgcattaaagaatccttttaccttgatgagtcatgttgccccggtgatggcaatagtaacagcaattatttccatcgtgatggatccatggcatgacttcagagcaagtcacttttttgatagttctactcacataataagaagcagtgtgttgctgcttctaggtggggctttggcctttttcatggttttgacagaatatgtccttgtttctgtgactagcgctgtcacagtgactgtagcaggaattgtgaaggaagctgtcactattctggttgctgtgctattctttaatgatccatttacatggttaaaggcgcttgggctggcaataataatatttggtgtcagtctattcaatatttacaagtataaaaggttcaaaaaagggcatcacagtgaagatgctgggacaaatatccaatcttacaatgggacttcaaagtacgttatccttgatgatgatactgaagatcaggatgattcaggctgacctgaatatggtaggtaagaatgcagactactatatgcactggcgtttccagagaagcaagatcttctggtgcctgcatagacttacttccacaggctaactgatatcatactattttttgagttgatcaaccgctgtggccactggccagccatgcacgagcgtgacgcttgcagccgtgtgacaagttgagaagactacacgctcgtacatggaacatacaaggtacagcctggtatcagtacagatgttttctcctttcgttcaagacaaagaacggtgcatatatctgaacgaggcattctgcagtatgtccacgaagaaaatgttgcatcaattacaattagaaacacagatagaaactggtggtgctacaacaatattgttggacaaagtataagacaaatggggacaaagtcattgacaaatggaatggaacaccagctttactaattcaaggtggtctatggcttctcctaaggtcgggtgatgagtacaagtaacaagtgcatagttcagatgatcagccctgctggattattctccttcgggcttacatcaaatgtgcaggggaagatctctggggg

SEQ ID NO: 78459 - DNA, 2166 bp, Zea Mays
cttcagaagtcgccgcgacaaggtgctgaattttgactttctaccagaaatcggagcgaaccaaactgccgggaaaacccctcgcctgcggcttcgcgtcggccgccgccgctgccgacactttaccgcgtgccttgcgcccccgcgccgccgatgcgatcagcgacgcacgccagatccgagcttctgtaggaccttcagccgtcgccgtcccatgggggactgcgtcgtcgaggacggccacgggcaccactactcggaggcggtggagggcgcggtttcgttgacggtagccgtggagctcgatgagcgggcggaagagtcgcgggaggaggaggagggtggcgggcagcggaagaaaatgggcgggatcccaagggagccgtcgttctcgcggtggtgcagggacccctctgccgcctccgcctccaataccgccgctgctgcggcgaccagtgacagcgacgcctcagaggagttcgagctgccgctcctgccatcctcctcgggcggcggcggctcaccgatggacattgaggtgggggcaacggcgagatctgatgatctgccgatctcgccgaggttgcttgcgaaggtcatcgggttgatagcgtgttggtacacactgagcacgtgcttgacgctgtacaacaaggagatgctgggaaagcacatgtggaagttcccggcgccattcctgatgaacacagtgcatttcacgatgcaggccgtggcgtcgagggccatcgtgtggttccagcaacgaggcctagagggagggccaagtaaaatgtcgtggaaggattactgtttacgagttgtcccaacagctttggctactgctcttgatataaatctgagcaacatttcacttgttttcattactgtgacatttgctacaatgtgcaaatctgcttctccaattttcattcttctgtttgctttcatgttcaggcttgagaaaccgagctttagccttcttggaatcatgctggttgtttcatttggagttctactaacagttgctaaagagacagaatttaatctatggggatttatgtttattatgcttgctgctgttatggctggtttccgctggtccatgactcagattcttctccagaaagaggaatatgcattaaagaatccttttaccttgatgagtcatgttgccccggtgatggcaatagtaacagcaattatttccatcgtgatggatccatggcatgacttcagagcaagtcacttttttgatagttctactcacataataagaagcagtgtgttgctgcttctaggtggggctttggcctttttcatggttttgacagaatatgtccttgtttctgtgactagcgctgtcacagtgactgtagcaggaattgtgaaggaagctgtcactattctggtataaaaggttcaaaaaagggcatcacagtgaagatgctgggacaaatatccaatcttacaatgggacttcaaagtacgttatccttgatgatgatactgaagatcaggatgattcaggctgacctgaatatggtagaatgcagactactatatgcactggcgtttccagagaagcaagatcttctggtgcctgcatagacttacttccacaggctaactgatatcatactattttttgagttgatcaaccgctgtggccactggccagccatgcacgagcgtgacgcttgcagccgtgtgacaagttgagaagactacacgctcgtacatggaacatacaaggtacagcctggtatcagtacagatgttttctcctttcgttcaagacaaagaacggtgcatatatctgaacgaggcattctgcagtatgtccacgaagaaaatgttgcatcaattacaattagaaacacaggtaacacacttaactttatggatgaggatagggttcggttttgtagtgcattctgattgttgaagggagattcagcatcggaacatagctttcttttctttagttctttctttttttgagatgaaaaataaatagtactaacaatcttatatgtaataatgttgtatttacgggaatgtgtaccgtttcacgtaggagcatttcgcgccttattgtaatacctcatcttgagaggtcagtgccaagtcggcacggtccatctcaaatttcctttgcgtattttg

SEQ ID NO: 78460 - DNA, 2193 bp, Zea Mays
aagaaagaaaactacctgtgggctgtggcagcttcagaagtcgccgcgacaaggtgctgaattttgactttctaccagaaatcggagcgaaccaaactgccgggaaaacccctcgcctgcggcttcgcgtcggccgccgccgctgccgacactttaccgcgtgccttgcgcccccgcgccgccgatgcgatcagcgacgcacgccagatccgagcttctgtaggaccttcagccgtcgccgtcccatgggggactgcgtcgtcgaggacggccacgggcaccactactcggaggcggtggagggcgcggtttcgttgacggtagccgtggagctcgatgagcgggcggaagagtcgcgggaggaggaggagggtggcgggcagcggaagaaaatgggcgggatcccaagggagccgtcgttctcgcggtggtgcagggacccctctgccgcctccgcctccaataccgccgctgctgcggcgaccagtgacagcgacgcctcagaggagttcgagctgccgctcctgccatcctcctcgggcggcggcggctcaccgatggacattgaggtgggggcaacggcgagatctgatgatctgccgatctcgccgaggttgcttgcgaaggtcatcgggttgatagcgtgttggtacacactgagcacgtgcttgacgctgtacaacaaggagatgctgggaaagcacatgtggaagttcccggcgccattcctgatgaacacagtgcatttcacgatgcaggccgtggcgtcgagggccatcgtgtggttccagcaacgaggcctagagggagggccaagtaaaatgtcgtggaaggattactgtttacgagttgtcccaacagctttggctactgctcttgatataaatctgagcaacatttcacttgttttcattactgtgacatttgctacaatgtgcaaatctgcttctccaattttcattcttctgtttgctttcatgttcaggcttgagaaaccgagctttagccttcttggaatcatgctggttgtttcatttggagttctactaacagttgctaaagagacagaatttaatctatggggatttatgtttattatgcttgctgctgttatggctggtttccgctggtccatgactcagattcttctccagaaagaggaatatgcattaaagaatccttttaccttgatgagtcatgttgccccggtgatggcaatagtaacagcaattatttccatcgtgatggatccatggcatgacttcagagcaagtcacttttttgatagttctactcacataataagaagcagtgtgttgctgcttctaggtggggctttggcctttttcatggttttgacagaatatgtccttgtttctgtgactagcgctgtcacagtgactgtagcaggaattgtgaaggaagctgtcactattctggtataaaaggttcaaaaaagggcatcacagtgaagatgctgggacaaatatccaatcttacaatgggacttcaaagtacgttatccttgatgatgatactgaagatcaggatgattcaggctgacctgaatatgaatgcagactactatatgcactggcgtttccagagaagcaagatcttctggtgcctgcatagacttacttccacaggctaactgatatcatactattttttgagttgatcaaccgctgtggccactggccagccatgcacgagcgtgacgcttgcagccgtgtgacaagttgagaagactacacgctcgtacatggaacatacaaggtacagcctggtatcagtacagatgttttctcctttcgttcaagacaaagaacggtgcatatatctgaacgaggcattctgcagtatgtccacgaagaaaatgttgcatcaattacaattagaaacacaggtaacacacttaactttatggatgaggatagggttcggttttgtagtgcattctgattgttgaagggagattcagcatcggaacatagctttcttttctttagttctttctttttttgagatgaaaaataaatagtactaacaatcttatatgtaataatgttgtatttacgggaatgtgtaccgtttcacgtaggagcatttcgcgccttattgtaatacctcatcttgagaggtcagtgccaagtcggcacggtccatctcaaatttcctttgcgtattttg

SEQ ID NO: 78461 - DNA, 2673 bp, Zea Mays
cataaacaacccattatgtgtaataatcgtgttgggtgacctatggcccaacgggcctataacagtccatatcatttaaatagcaaaaatatgctaaaatatacatatataaaggtttaaacataattgttagcttcaaatacatatttacacctacataaccaacaaaacaaatatatttgttgtgttttatactttatatttagtacaatatagatatttatatgggaaaatagaaaaaaaatcaagtcatgtaggatataacttgctgtggtgcacctagaccgacaaggacccgcttcgctttatgccatatcggatttgggtcagaccaaacccgtaccgggctttggaccgtccggctaacccgacccgctagacaagaaagaaaactacctgtgggctgtggcagcttcagaagtcgccgcgacaaggtgctgaattttgactttctaccagaaatcggagcgaaccaaactgccgggaaaacccctcgcctgcggcttcgcgtcggccgccgccgctgccgacactttaccgcgtgccttgcgcccccgcgccgccgatgcgatcagcgacgcacgccagatccgagcttctgtaggaccttcagccgtcgccgtcccatgggggactgcgtcgtcgaggacggccacgggcaccactactcggaggcggtggagggcgcggtttcgttgacggtagccgtggagctcgatgagcgggcggaagagtcgcgggaggaggaggagggtggcgggcagcggaagaaaatgggcgggatcccaagggagccgtcgttctcgcggtggtgcagggacccctctgccgcctccgcctccaataccgccgctgctgcggcgaccagtgacagcgacgcctcagaggagttcgagctgccgctcctgccatcctcctcgggcggcggcggctcaccgatggacattgaggtgggggcaacggcgagatctgatgatctgccgatctcgccgaggttgcttgcgaaggtcatcgggttgatagcgtgttggtacacactgagcacgtgcttgacgctgtacaacaaggagatgctgggaaagcacatgtggaagttcccggcgccattcctgatgaacacagtgcatttcacgatgcaggccgtggcgtcgagggccatcgtgtggttccagcaacgaggcctagagggagggccaagtaaaatgtcgtggaaggattactgtttacgagttgtcccaacagctttggctactgctcttgatataaatctgagcaacatttcacttgttttcattactgtgacatttgctacaatgtgcaaatctgcttctccaattttcattcttctgtttgctttcatgttcaggcttgagaaaccgagctttagccttcttggaatcatgctggttgtttcatttggagttctactaacagttgctaaagagacagaatttaatctatggggatttatgtttattatgcttgctgctgttatggctggtttccgctggtccatgactcagattcttctccagaaagaggaatatgcattaaagaatccttttaccttgatgagtcatgttgccccggtgatggcaatagtaacagcaattatttccatcgtgatggatccatggcatgacttcagagcaagtcacttttttgatagttctactcacataataagaagcagtgtgttgctgcttctaggtggggctttggcctttttcatggttttgacagaatatgtccttgtttctgtgactagcgctgtcacagtgactgtagcaggaattgtgaaggaagctgtcactattctggttgctgtgctattctttaatgatccatttacatggttaaaggcgcttgggctggcaataataatatttggtgtcagtctattcaatatttacaagtataaaaggttcaaaaaagggcatcacagtgaagatgctgggacaaatatccaatcttacaatgggacttcaaagtacgttatccttgatgatgatactgaagatcaggatgattcaggctgacctgaatatggtagaatgcagactactatatgcactggcgtttccagagaagcaagatcttctggtgcctgcatagacttacttccacaggctaactgatatcatactattttttgagttgatcaaccgctgtggccactggccagccatgcacgagcgtgacgcttgcagccgtgtgacaagttgagaagactacacgctcgtacatggaacatacaaggtacagcctggtatcagtacagatgttttctcctttcgttcaagacaaagaacggtgcatatatctgaacgaggcattctgcagtatgtccacgaagaaaatgttgcatcaattacaattagaaacacaggtaacacacttaactttatggatgaggatagggttcggttttgtagtgcattctgattgttgaagggagattcagcatcggaacatagctttcttttctttagttctttctttttttgagatgaaaaataaatagtactaacaatcttatatgtaataatgttgtatttacgggaatgtgtaccgtttcacgtaggagcatttcgcgccttattgtaatacctcatcttgagaggtcagtgccaagtcggcacggtccatctcaaatttcctttgcgtattttg

SEQ ID NO: 78462 - DNA, 2585 bp, Zea Mays
cataaacaacccattatgtgtaataatcgtgttgggtgacctatggcccaacgggcctataacagtccatatcatttaaatagcaaaaatatgctaaaatatacatatataaaggtttaaacataattgttagcttcaaatacatatttacacctacataaccaacaaaacaaatatatttgttgtgttttatactttatatttagtacaatatagatatttatatgggaaaatagaaaaaaaatcaagtcatgtaggatataacttgctgtggtgcacctagaccgacaaggacccgcttcgctttatgccatatcggatttgggtcagaccaaacccgtaccgggctttggaccgtccggctaacccgacccgctagacaagaaagaaaactacctgtgggctgtggcagcttcagaagtcgccgcgacaaggtgctgaattttgactttctaccagaaatcggagcgaaccaaactgccgggaaaacccctcgcctgcggcttcgcgtcggccgccgccgctgccgacactttaccgcgtgccttgcgcccccgcgccgccgatgcgatcagcgacgcacgccagatccgagcttctgtaggaccttcagccgtcgccgtcccatgggggactgcgtcgtcgaggacggccacgggcaccactactcggaggcggtggagggcgcggtttcgttgacggtagccgtggagctcgatgagcgggcggaagagtcgcgggaggaggaggagggtggcgggcagcggaagaaaatgggcgggatcccaagggagccgtcgttctcgcggtggtgcagggacccctctgccgcctccgcctccaataccgccgctgctgcggcgaccagtgacagcgacgcctcagaggagttcgagctgccgctcctgccatcctcctcgggcggcggcggctcaccgatggacattgaggtgggggcaacggcgagatctgatgatctgccgatctcgccgaggttgcttgcgaaggtcatcgggttgatagcgtgttggtacacactgagcacgtgcttgacgctgtacaacaaggagatgctgggaaagcacatgtggaagttcccggcgccattcctgatgaacacagtgcatttcacgatgcaggccgtggcgtcgagggccatcgtgtggttccagcaacgaggcctagagggagggccaagtaaaatgtcgtggaaggattactgtttacgagttgtcccaacagctttggctactgctcttgatataaatctgagcaacatttcacttgttttcattactgtgacatttgctacaatgtgcaaatctgcttctccaattttcattcttctgtttgctttcatgttcaggcttgagaaaccgagctttagccttcttggaatcatgctggttgtttcatttggagttctactaacagttgctaaagagacagaatttaatctatggggatttatgtttattatgcttgctgctgttatggctggtttccgctggtccatgactcagattcttctccagaaagaggaatatgcattaaagaatccttttaccttgatgagtcatgttgccccggtgatggcaatagtaacagcaattatttccatcgtgatggatccatggcatgacttcagagcaagtcacttttttgatagttctactcacataataagaagcagtgtgttgctgcttctaggtggggctttggcctttttcatggttttgacagaatatgtccttgtttctgtgactagcgctgtcacagtgactgtagcaggaattgtgaaggaagctgtcactattctggttgctgtgctattctttaatgatccatttacatggttaaaggcgcttgggctggcaataataatatttggtgtcagtctattcaatatttacaagtataaaaggttcaaaaaagggcatcacagtgaagatgctgggacaaatatccaatcttacaatgggacttcaaagtacgttatccttgatgatgatactgaagatcaggatgattcaggctgacctgaatatgaatgcagactactatatgcactggcgtttccagagaagcaagatcttctggtgcctgcatagacttacttccacaggctaactgatatcatactattttttgagttgatcaaccgctgtggccactggccagccatgcacgagcgtgacgcttgcagccgtgtgacaagttgagaagactacacgctcgtacatggaacatacaagtatgtccacgaagaaaatgttgcatcaattacaattagaaacacaggtaacacacttaactttatggatgaggatagggttcggttttgtagtgcattctgattgttgaagggagattcagcatcggaacatagctttcttttctttagttctttctttttttgagatgaaaaataaatagtactaacaatcttatatgtaataatgttgtatttacgggaatgtgtaccgtttcacgtaggagcatttcgcgccttattgtaatacctcatcttgagaggtcagtgccaagtcggcacggtccatctcaaatttcctttgcgtattttg

SEQ ID NO: 78463 - DNA, 2594 bp, Zea Mays
cataaacaacccattatgtgtaataatcgtgttgggtgacctatggcccaacgggcctataacagtccatatcatttaaatagcaaaaatatgctaaaatatacatatataaaggtttaaacataattgttagcttcaaatacatatttacacctacataaccaacaaaacaaatatatttgttgtgttttatactttatatttagtacaatatagatatttatatgggaaaatagaaaaaaaatcaagtcatgtaggatataacttgctgtggtgcacctagaccgacaaggacccgcttcgctttatgccatatcggatttgggtcagaccaaacccgtaccgggctttggaccgtccggctaacccgacccgctagacaagaaagaaaactacctgtgggctgtggcagcttcagaagtcgccgcgacaaggtgctgaattttgactttctaccagaaatcggagcgaaccaaactgccgggaaaacccctcgcctgcggcttcgcgtcggccgccgccgctgccgacactttaccgcgtgccttgcgcccccgcgccgccgatgcgatcagcgacgcacgccagatccgagcttctgtaggaccttcagccgtcgccgtcccatgggggactgcgtcgtcgaggacggccacgggcaccactactcggaggcggtggagggcgcggtttcgttgacggtagccgtggagctcgatgagcgggcggaagagtcgcgggaggaggaggagggtggcgggcagcggaagaaaatgggcgggatcccaagggagccgtcgttctcgcggtggtgcagggacccctctgccgcctccgcctccaataccgccgctgctgcggcgaccagtgacagcgacgcctcagaggagttcgagctgccgctcctgccatcctcctcgggcggcggcggctcaccgatggacattgaggtgggggcaacggcgagatctgatgatctgccgatctcgccgaggttgcttgcgaaggtcatcgggttgatagcgtgttggtacacactgagcacgtgcttgacgctgtacaacaaggagatgctgggaaagcacatgtggaagttcccggcgccattcctgatgaacacagtgcatttcacgatgcaggccgtggcgtcgagggccatcgtgtggttccagcaacgaggcctagagggagggccaagtaaaatgtcgtggaaggattactgtttacgagttgtcccaacagctttggctactgctcttgatataaatctgagcaacatttcacttgttttcattactgtgacatttgctacaatgtgcaaatctgcttctccaattttcattcttctgtttgctttcatgttcaggcttgagaaaccgagctttagccttcttggaatcatgctggttgtttcatttggagttctactaacagttgctaaagagacagaatttaatctatggggatttatgtttattatgcttgctgctgttatggctggtttccgctggtccatgactcagattcttctccagaaagaggaatatgcattaaagaatccttttaccttgatgagtcatgttgccccggtgatggcaatagtaacagcaattatttccatcgtgatggatccatggcatgacttcagagcaagtcacttttttgatagttctactcacataataagaagcagtgtgttgctgcttctaggtggggctttggcctttttcatggttttgacagaatatgtccttgtttctgtgactagcgctgtcacagtgactgtagcaggaattgtgaaggaagctgtcactattctggttgctgtgctattctttaatgatccatttacatggttaaaggcgcttgggctggcaataataatatttggtgtcagtctattcaatatttacaagtataaaaggttcaaaaaagggcatcacagtgaagatgctgggacaaatatccaatcttacaatgggacttcaaagtacgttatccttgatgatgatactgaagatcaggatgattcaggctgacctgaatatggtaggtaagaatgcagactactatatgcactggcgtttccagagaagcaagatcttctggtgcctgcatagacttacttccacaggctaactgatatcatactattttttgagttgatcaaccgctgtggccactggccagccatgcacgagcgtgacgcttgcagccgtgtgacaagttgagaagactacacgctcgtacatggaacatacaagtatgtccacgaagaaaatgttgcatcaattacaattagaaacacaggtaacacacttaactttatggatgaggatagggttcggttttgtagtgcattctgattgttgaagggagattcagcatcggaacatagctttcttttctttagttctttctttttttgagatgaaaaataaatagtactaacaatcttatatgtaataatgttgtatttacgggaatgtgtaccgtttcacgtaggagcatttcgcgccttattgtaatacctcatcttgagaggtcagtgccaagtcggcacggtccatctcaaatttcctttgcgtattttg

SEQ ID NO: 78464 - DNA, 2660 bp, Zea Mays
cataaacaacccattatgtgtaataatcgtgttgggtgacctatggcccaacgggcctataacagtccatatcatttaaatagcaaaaatatgctaaaatatacatatataaaggtttaaacataattgttagcttcaaatacatatttacacctacataaccaacaaaacaaatatatttgttgtgttttatactttatatttagtacaatatagatatttatatgggaaaatagaaaaaaaatcaagtcatgtaggatataacttgctgtggtgcacctagaccgacaaggacccgcttcgctttatgccatatcggatttgggtcagaccaaacccgtaccgggctttggaccgtccggctaacccgacccgctagacaagaaagaaaactacctgtgggctgtggcagcttcagaagtcgccgcgacaaggtgctgaattttgactttctaccagaaatcggagcgaaccaaactgccgggaaaacccctcgcctgcggcttcgcgtcggccgccgccgctgccgacactttaccgcgtgccttgcgcccccgcgccgccgatgcgatcagcgacgcacgccagatccgagcttctgtaggaccttcagccgtcgccgtcccatgggggactgcgtcgtcgaggacggccacgggcaccactactcggaggcggtggagggcgcggtttcgttgacggtagccgtggagctcgatgagcgggcggaagagtcgcgggaggaggaggagggtggcgggcagcggaagaaaatgggcgggatcccaagggagccgtcgttctcgcggtggtgcagggacccctctgccgcctccgcctccaataccgccgctgctgcggcgaccagtgacagcgacgcctcagaggagttcgagctgccgctcctgccatcctcctcgggcggcggcggctcaccgatggacattgaggtgggggcaacggcgagatctgatgatctgccgatctcgccgaggttgcttgcgaaggtcatcgggttgatagcgtgttggtacacactgagcacgtgcttgacgctgtacaacaaggagatgctgggaaagcacatgtggaagttcccggcgccattcctgatgaacacagtgcatttcacgatgcaggccgtggcgtcgagggccatcgtgtggttccagcaacgaggcctagagggagggccaagtaaaatgtcgtggaaggattactgtttacgagttgtcccaacagctttggctactgctcttgatataaatctgagcaacatttcacttgttttcattactgtgacatttgctacaatgtgcaaatctgcttctccaattttcattcttctgtttgctttcatgttcaggcttgagaaaccgagctttagccttcttggaatcatgctggttgtttcatttggagttctactaacagttgctaaagagacagaatttaatctatggggatttatgtttattatgcttgctgctgttatggctggtttccgctggtccatgactcagattcttctccagaaagaggaatatgcattaaagaatccttttaccttgatgagtcatgttgccccggtgatggcaatagtaacagcaattatttccatcgtgatggatccatggcatgacttcagagcaagtcacttttttgatagttctactcacataataagaagcagtgtgttgctgcttctaggtggggctttggcctttttcatggttttgacagaatatgtccttgtttctgtgactagcgctgtcacagtgactgtagcaggaattgtgaaggaagctgtcactattctggttgctgtgctattctttaatgatccatttacatggttaaaggcgcttgggctggcaataataatatttggtgtcagtctattcaatatttacaagttcaaaaaagggcatcacagtgaagatgctgggacaaatatccaatcttacaatgggacttcaaagtacgttatccttgatgatgatactgaagatcaggatgattcaggctgacctgaatatgaatgcagactactatatgcactggcgtttccagagaagcaagatcttctggtgcctgcatagacttacttccacaggctaactgatatcatactattttttgagttgatcaaccgctgtggccactggccagccatgcacgagcgtgacgcttgcagccgtgtgacaagttgagaagactacacgctcgtacatggaacatacaaggtacagcctggtatcagtacagatgttttctcctttcgttcaagacaaagaacggtgcatatatctgaacgaggcattctgcagtatgtccacgaagaaaatgttgcatcaattacaattagaaacacaggtaacacacttaactttatggatgaggatagggttcggttttgtagtgcattctgattgttgaagggagattcagcatcggaacatagctttcttttctttagttctttctttttttgagatgaaaaataaatagtactaacaatcttatatgtaataatgttgtatttacgggaatgtgtaccgtttcacgtaggagcatttcgcgccttattgtaatacctcatcttgagaggtcagtgccaagtcggcacggtccatctcaaatttcctttgcgtattttg

SEQ ID NO: 78465 - DNA, 1615 bp, Zea Mays
attcattttcttcgccccatctccctctctgtccacctgtggttttgatcaatcgggggctttaagaaaattgatcctgaacaatgggagtttgcaaatgatgatttcattaggggacaacagcaccgactgaaaaatatacacaggcgtaagcctatattcagccattcatcgcatactcagggttctggaccattaccagataccgaaaggagggattatgaggaggaaatcgaaaggcttaagtgtgacaatgcagctctgacctcagagcttgaaaagaatgcacagaagaaacttgttacagagaaacgaatgcaggagctagaagataagttgatctttttggaggatcggcagaaaaatctgatggcgtatgtcagggatattgtacaggcaccaggatctttctctagctttgtgcagcaacctgatcatcacggaaagaaaaggagactaccagtacctatctctctctaccaagattctaatgctgaggggaaccaggttgtgcatgggggcttcatcaccaacccaccagcttgcagggaatcattcgacaagacggaatcttcgttgaactcattggagaatttccttcgggaagcgagtgaagcgttcaatatttcatatggtgatggcctccctggcccttcatctgctgtcgttatcacagagctccattcatccggagaaagtgatccccatgtgccatcacctgtctcaagaatgcatacatcttcggctggtgcgggagattcgctctcttcccgcgatttaacagagtcaactagctgcgctgagagccctcgcctcgctcagatccaaccctgtacagattcacggactaaggtgtctgagatcgatgtcaatcgggagcctgctgtcacagaaactggtccgacaagggaccaacctgccgaggagcctccccacgtagcagctggggtgaacgatggcttttggcagcagttcctcacagagcagcccggtcctgatgtacaccaggaggcccaatcagaaaggagagatggcgatgatgataagggcgatcagacgaggataggggaccgagaaaatttttggtgggggaagaagaatgttgagcagatgagagagaagctggggcgtctcacctcggtggagaaaacctgactgtatttcttgtagctggaaaaaaaaagttagcacagaaacacatataggacgctggtgcctctgactgacatgtactttgcagtgtaccatatatcttcgccaccagatatgctgactgacatcgacctcgtagtcgtacttcttccacctgtacttttgccgagtttacagtgagatttagttgttgctatactttttttcttttttcttttgagatggactagtcgctatacttctgttaggagttctgcattcgtacttggttagtagacacttcctggtactgttgtccaacgacgtggttatatatgtagatgatgataatattcacttcgttgttggatagtatctgtgtgtgtagactaaggacccaattcacttttgaaaaatcatctttttcatagccacaccttttttctgtcagaattttcaaatatgatgtacctctctatgccac

SEQ ID NO: 78466 - DNA, 932 bp, Zea Mays
ctaccccttgaatctgaacatatctctgttggccgtcgaccagttgttggcctcaaactgattttggaaggagccaaacagaatcgtctggctattcatttgcagcaccttggctcattaccaaaaatattcctacctcattgggactcctatattactattggacctccaaaatggcaaggtcctgaagaacaggacagccgatggtttgagccaatcaaatggaagaactttgctcatgttagcacagcacccatagagtacactgaaacaaatattacggacctatctggtgtttatattgttacaggagcacagttgggagtgtgggattttggtgcaaagagtgttctccaccttaaacttttgttctccagggttcctgggtgcacaattagaagatcagtgtgggaccacagcccatcaagttcctcggtacatagaacagatgaatcttcgtcatcctcaagtgataatgctaaacttctgaagatcgttgacctgacagaaacattcaagggcccacaagatgcgcctggccattggctgatcacaggtgctaagttgggtgtcgagaaaggcaggattgttgtgcgtgcaaagtactccttattgaattattaaccaaatgtttaaatcattcaatcactctgatattgagcactgtgttttaaggtagcatttgttcttttgtttttcatgtatggcttttgttcccccttgtaacatgatgtggatcatgtttcttgttgatgatgccgtgagtgaagcactacattcgttctcgaatatttgacgtccactagtccactagttcattactaatcagcgataaataaaaaagaactcgaatatttggcgtccgctagttcattactaaacaacgataaataagaaagaatggagggagtggcatatgaagatgttatggt

SEQ ID NO: 78467 - DNA, 2453 bp, Zea Mays
caagcgggggcataattgtgatatggtatacactattcttttaatagatagtaaagatagatactataataataaataggaggttgagatcgcgaggggagcaagcggaggtataattatgatatggtatacactattcttttaatagatagtaaagatagatactatactaataaatacaaacaggacgatagttgatgtagcggttgattcaaccttacataaaaccaaatatagcacgaaattaaggaaaaacaataaatgaagaaaaagaaaagccagtcaaacccaaccacctcggcatcggggtctccttcccctcctccggttgtccggtcccccagaaaccgtgtccttccgtcgtgacagctcccgaccttctggcggtcttcccctctcgtagtcggcgcgaatcccgaggtggaggaggaagaggtagagggggcgggccccatcatccatgagccttgcgggctccgcgctggaggcagcgctactggcggtggggcgcggcctcgacgcagctggagaccaccggctgctttactgcaagggagacggaaggctcgtcgcgctcgaggaccgtgcgcgggacctcccgctccccgacggcggcgtcctcccgagcgtgccccacgacgtcgaggtcgagcagtgccgcagagacctcgagcgcatccgccccttcccgtccgggtccggcccaagctccgccgcagcggacggtccctttgtctgcagcttcgataagatggctgagtatttcaacaggaagtcatgtttgtccgagacagtaccgctgggttccttcaactctctcttcagcttcaccggttcttggaagaatgatgcggcgaccacgaaggcccttgcgattgatggctattctctgcctctgtttcgagttaaaattaggaattctgaactgacgctgcttgagagcgttaagcgaaggatcccaaatgtttgggatccatcagcattggcaaggtcagtagctttattgagaactatggtacccatattattatctctgttacggttggtggtaaggatgaggtatacattaagcagcattcattgtcccaattgtcagagctggagttcaaaaattatgcgagggaaattgggagggaaagatttgcagatgtggaaaataagtcaaatgcatcttctatcaattacagtgagaaggatatgacagtaatattcagaaggaggggtggttgcgaccttgttcaaagttttagtgattggagaggaactgttgcctcagcaccagatgtcataggcatcacctttctatcaattgtctctcttgttgacgatataccaggaaagaagcaccttgctcgtgcagttgagctatacttgacctacaaacctccaattgaagaattacagtacttcttagattttcgagtcccactagtttgggctccagctccaccaggtattgctggtcaccataggaaagaaccagtctgcccatcgcttcagtttagcttaatgggcccaaagctcttcattagcacagaacagatctctgttggccgtcgaccagttgttggcctcaaactgattttggaaggagccaaacagaatcgtctggctattcatttgcagcaccttggctcattaccaaaaatattcctacctcattgggactcctatattactattggacctccaaaatggcaaggtcctgaagaacaggacagccgatggtttgagccaatcaaatggaagaactttgctcatgttagcacagcacccatagagtacactgaaacaaatattacggacctatctggtgtttatattgttacaggagcacagttgggagtgtgggattttggtgcaaagagtgttctccaccttaaacttttgttctccagggttcctgggtgcacaattagaagatcagtgtgggaccacagcccatcaagttcctcggtacatagaacagatgaatcttcgtcatcctcaagtgataatgctaaacttctgaagatcgttgacctgacagaaacattcaagggcccacaagatgcgcctggccattggctgatcacaggtgctaagttgggtgtcgagaaaggcaggattgttgtgcgtgcaaagtactccttattgaattattaaccaaatgtttaaatcattcaatcactctgatattgagcactgtgttttaaggtagcatttgttcttttgtttttcatgtatggcttttgttcccccttgtaacatgatgtggatcatgtttcttgttgatgatgccgtgagtgaagcactacattcgttctcgaatatttgacgtccactagtccactagttcattactaatcagcgataaataaaaaagaactcgaatatttggcgtccgctagttcattactaaacaacgataaataagaaagaatggagggagtggcatatgaagatgttatggt

SEQ ID NO: 78468 - DNA, 2347 bp, Zea Mays
caagcgggggcataattgtgatatggtatacactattcttttaatagatagtaaagatagatactataataataaataggaggttgagatcgcgaggggagcaagcggaggtataattatgatatggtatacactattcttttaatagatagtaaagatagatactatactaataaatacaaacaggacgatagttgatgtagcggttgattcaaccttacataaaaccaaatatagcacgaaattaaggaaaaacaataaatgaagaaaaagaaaagccagtcaaacccaaccacctcggcatcggggtctccttcccctcctccggttgtccggtcccccagaaaccgtgtccttccgtcgtgacagctcccgaccttctggcggtcttcccctctcgtagtcggcgcgaatcccgaggtggaggaggaagaggtagagggggcgggccccatcatccatgagccttgcgggctccgcgctggaggcagcgctactggcggtggggcgcggcctcgacgcagctggagaccaccggctgctttactgcaagggagacggaaggctcgtcgcgctcgaggaccgtgcgcgggacctcccgctccccgacggcggcgtcctcccgagcgtgccccacgacgtcgaggtcgagcagtgccgcagagacctcgagcgcatccgccccttcccgtccgggtccggcccaagctccgccgcagcggacggtccctttgtctgcagcttcgataagatggctgagtatttcaacaggaagtcatgtttgtccgagacagtaccgctgggttccttcaactctctcttcagcttcaccggttcttggaagaatgatgcggcgaccacgaaggcccttgcgattgatggctattctctgcctctgtttcgagttaaaattaggaattctgaactgacgctgcttgagagcgttaagcgaaggatcccaaatgtttgggatccatcagcattggcaagagctggagttcaaaaattatgcgagggaaattgggagggaaagatttgcagatgtggaaaataagtcaaatgcatcttctatcaattacagtgagaaggatatgacagtaatattcagaaggaggggtggttgcgaccttgttcaaagttttagtgattggagaggaactgttgcctcagcaccagatgtcataggcatcacctttctatcaattgtctctcttgttgacgatataccaggaaagaagcaccttgctcgtgcagttgagctatacttgacctacaaacctccaattgaagaattacagtacttcttagattttcgagtcccactagtttgggctccagctccaccaggtattgctggtcaccataggaaagaaccagtctgcccatcgcttcagtttagcttaatgggcccaaagctcttcattagcacagaacagatctctgttggccgtcgaccagttgttggcctcaaactgattttggaaggagccaaacagaatcgtctggctattcatttgcagcaccttggctcattaccaaaaatattcctacctcattgggactcctatattactattggacctccaaaatggcaaggtcctgaagaacaggacagccgatggtttgagccaatcaaatggaagaactttgctcatgttagcacagcacccatagagtacactgaaacaaatattacggacctatctggtgtttatattgttacaggagcacagttgggagtgtgggattttggtgcaaagagtgttctccaccttaaacttttgttctccagggttcctgggtgcacaattagaagatcagtgtgggaccacagcccatcaagttcctcggtacatagaacagatgaatcttcgtcatcctcaagtgataatgctaaacttctgaagatcgttgacctgacagaaacattcaagggcccacaagatgcgcctggccattggctgatcacaggtgctaagttgggtgtcgagaaaggcaggattgttgtgcgtgcaaagtactccttattgaattattaaccaaatgtttaaatcattcaatcactctgatattgagcactgtgttttaaggtagcatttgttcttttgtttttcatgtatggcttttgttcccccttgtaacatgatgtggatcatgtttcttgttgatgatgccgtgagtgaagcactacattcgttctcgaatatttgacgtccactagtccactagttcattactaatcagcgataaataaaaaagaactcgaatatttggcgtccgctagttcattactaaacaacgataaataagaaagaatggagggagtggcatatgaagatgttatggt

SEQ ID NO: 78469 - DNA, 2373 bp, Zea Mays
caagcgggggcataattgtgatatggtatacactattcttttaatagatagtaaagatagatactataataataaataggaggttgagatcgcgaggggagcaagcggaggtataattatgatatggtatacactattcttttaatagatagtaaagatagatactatactaataaatacaaacaggacgatagttgatgtagcggttgattcaaccttacataaaaccaaatatagcacgaaattaaggaaaaacaataaatgaagaaaaagaaaagccagtcaaacccaaccacctcggcatcggggtctccttcccctcctccggttgtccggtcccccagaaaccgtgtccttccgtcgtgacagctcccgaccttctggcggtcttcccctctcgtagtcggcgcgaatcccgaggtggaggaggaagaggtagagggggcgggccccatcatccatgagccttgcgggctccgcgctggaggcagcgctactggcggtggggcgcggcctcgacgcagctggagaccaccggctgctttactgcaagggagacggaaggctcgtcgcgctcgaggaccgtgcgcgggacctcccgctccccgacggcggcgtcctcccgagcgtgccccacgacgtcgaggtcgagcagtgccgcagagacctcgagcgcatccgccccttcccgtccgggtccggcccaagctccgccgcagcggacggtccctttgtctgcagcttcgataagatggctgagtatttcaacaggaagtcatgtttgtccgagacagtaccgctgggttccttcaactctctcttcagcttcaccggttcttggaagaatgatgcggcgaccacgaaggcccttgcgattgatggctattctctgcctctgtttcgagttaaaattaggaattctgaactgacgctgcttgagagcgttaagcgaaggatcccaaatgtttgggatccatcagcattggcaaggtcacattcattgtcccaattgtcagagctggagttcaaaaattatgcgagggaaattgggagggaaagatttgcagatgtggaaaataagtcaaatgcatcttctatcaattacagtgagaaggatatgacagtaatattcagaaggaggggtggttgcgaccttgttcaaagttttagtgattggagaggaactgttgcctcagcaccagatgtcataggcatcacctttctatcaattgtctctcttgttgacgatataccaggaaagaagcaccttgctcgtgcagttgagctatacttgacctacaaacctccaattgaagaattacagtacttcttagattttcgagtcccactagtttgggctccagctccaccaggtattgctggtcaccataggaaagaaccagtctgcccatcgcttcagtttagcttaatgggcccaaagctcttcattagcacagaacagatctctgttggccgtcgaccagttgttggcctcaaactgattttggaaggagccaaacagaatcgtctggctattcatttgcagcaccttggctcattaccaaaaatattcctacctcattgggactcctatattactattggacctccaaaatggcaaggtcctgaagaacaggacagccgatggtttgagccaatcaaatggaagaactttgctcatgttagcacagcacccatagagtacactgaaacaaatattacggacctatctggtgtttatattgttacaggagcacagttgggagtgtgggattttggtgcaaagagtgttctccaccttaaacttttgttctccagggttcctgggtgcacaattagaagatcagtgtgggaccacagcccatcaagttcctcggtacatagaacagatgaatcttcgtcatcctcaagtgataatgctaaacttctgaagatcgttgacctgacagaaacattcaagggcccacaagatgcgcctggccattggctgatcacaggtgctaagttgggtgtcgagaaaggcaggattgttgtgcgtgcaaagtactccttattgaattattaaccaaatgtttaaatcattcaatcactctgatattgagcactgtgttttaaggtagcatttgttcttttgtttttcatgtatggcttttgttcccccttgtaacatgatgtggatcatgtttcttgttgatgatgccgtgagtgaagcactacattcgttctcgaatatttgacgtccactagtccactagttcattactaatcagcgataaataaaaaagaactcgaatatttggcgtccgctagttcattactaaacaacgataaataagaaagaatggagggagtggcatatgaagatgttatggt

SEQ ID NO: 78470 - DNA, 2006 bp, Zea Mays
tagagatgggtgcataaggagagagattatggtaaatcattaagcatcagcatagacgttaattcctaaagtgtaaaacaggcggttagataggttcaactgcctttttaacttgcattgagcattggtgctaactcaccttaccttccaagcatcaggtgccaatggtatggtaaagaagaaacggtttttggctaagcgcccccaccccccattgtgcatgctcaatagtccgagcccaaccggacacccctaacacacgccaggtcattcaacgcatgccggcatcgctcgctccttacgctactcgtttgtcttctgtaggagctaccgtttcagccgccgccgctggcaccctcaggtgcttcccaatcctgccaaaagtcccagcaatcgccgagattcatcgagaccccagccccctagacgaccagatcctgcgctcgacagctgcggctccgcgaaggcgccaggcagcctgcggcttgtgtggcggcatggtggtgccccagctgctcagggagtatgcaacgccagcaacagcatccaagctttattgagaactatggtacccatattattatctctgttacggttggtggtaaggatgaggtatacattaagcagcattcattgtcccaattgtcagagctggagttcaaaaattatgcgagggaaattgggagggaaagatttgcagatgtggaaaataagtcaaatgcatcttctatcaattacagtgagaaggatatgacagtaatattcagaaggaggggtggttgcgaccttgttcaaagttttagtgattggagaggaactgttgcctcagcaccagatgtcataggcatcacctttctatcaattgtctctcttgttgacgatataccaggaaagaagcaccttgctcgtgcagttgagctatacttgacctacaaacctccaattgaagaattacagtacttcttagattttcgagtcccactagtttgggctccagctccaccaggtattgctggtcaccataggaaagaaccagtctgcccatcgcttcagtttagcttaatgggcccaaagctcttcattagcacagaacagatctctgttggccgtcgaccagttgttggcctcaaactgattttggaaggagccaaacagaatcgtctggctattcatttgcagcaccttggctcattaccaaaaatattcctacctcattgggactcctatattactattggacctccaaaatggcaaggtcctgaagaacaggacagccgatggtttgagccaatcaaatggaagaactttgctcatgttagcacagcacccatagagtacactgaaacaaatattacggacctatctggtgtttatattgttacaggagcacagttgggagtgtgggattttggtgcaaagagtgttctccaccttaaacttttgttctccagggttcctgggtgcacaattagaagatcagtgtgggaccacagcccatcaagttcctcggtacatagaacagatgaatcttcgtcatcctcaagtgataatgctaaacttctgaagatcgttgacctgacagaaacattcaagggcccacaagatgcgcctggccattggctgatcacaggtgctaagttgggtgtcgagaaaggcaggattgttgtgcgtgcaaagtactccttattgaattattaaccaaatgtttaaatcattcaatcactctgatattgagcactgtgttttaaggtagcatttgttcttttgtttttcatgtatggcttttgttcccccttgtaacatgatgtggatcatgtttcttgttgatgatgccgtgagtgaagcactacattcgttctcgaatatttgacgtccactagtccactagttcattactaatcagcgataaataaaaaagaactcgaatatttggcgtccgctagttcattactaaacaacgataaataagaaagaatggagggagtggcatatgaagatgttatggt

SEQ ID NO: 78471 - DNA, 2413 bp, Zea Mays
gatttagatcaaatccgaacacaggtaaccaaatagcttagtttagggtttgggtgctcggtgtcagacagtaggaggcatgagcggatctgaatcccctggatagggtgctacagcccaggtccagcccaagaaacattgggcatttacaattcatggtgtttagcttagagatgggtgcataaggagagagattatggtaaatcattaagcatcagcatagacgttaattcctaaagtgtaaaacaggcggttagataggttcaactgcctttttaacttgcattgagcattggtgctaactcaccttaccttccaagcatcaggtgccaatggtatggtaaagaagaaacggtttttggctaagcgcccccaccccccattgtgcatgctcaatagtccgagcccaaccggacacccctaacacacgccaggtcattcaacgcatgccggcatcgctcgctccttacgctactcgtttgtcttctgtaggagctaccgtttcagccgccgccgctggcaccctcaggtgcttcccaatcctgccaaaagtcccagcaatcgccgagattcatcgagaccccagccccctagacgaccagatcctgcgctcgacagctgcggctccgcgaaggcgccaggcagcctgcggcttgtgtggcggcatggtggtgccccagctgctcagggagtatgcaacgccagcaacagcatccaagatggctgagtatttcaacaggaagtcatgtttgtccgagacagtaccgctgggttccttcaactctctcttcagcttcaccggttcttggaagaatgatgcggcgaccacgaaggcccttgcgattgatggctattctctgcctctgtttcgagttaaaattaggaattctgaactgacgctgcttgagagcgttaagcgaaggatcccaaatgtttgggatccatcagcattggcaagctttattgagaactatggtacccatattattatctctgttacggttggtggtaaggatgaggtatacattaagcagcattcattgtcccaattgtcagagctggagttcaaaaattatgcgagggaaattgggagggaaagatttgcagatgtggaaaataagtcaaatgcatcttctatcaattacagtgagaaggatatgacagtaatattcagaaggaggggtggttgcgaccttgttcaaagttttagtgattggagaggaactgttgcctcagcaccagatgtcataggcatcacctttctatcaattgtctctcttgttgacgatataccaggaaagaagcaccttgctcgtgcagttgagctatacttgacctacaaacctccaattgaagaattacagtacttcttagattttcgagtcccactagtttgggctccagctccaccaggtattgctggtcaccataggaaagaaccagtctgcccatcgcttcagtttagcttaatgggcccaaagctcttcattagcacagaacagatctctgttggccgtcgaccagttgttggcctcaaactgattttggaaggagccaaacagaatcgtctggctattcatttgcagcaccttggctcattaccaaaaatattcctacctcattgggactcctatattactattggacctccaaaatggcaaggtcctgaagaacaggacagccgatggtttgagccaatcaaatggaagaactttgctcatgttagcacagcacccatagagtacactgaaacaaatattacggacctatctggtgtttatattgttacaggagcacagttgggagtgtgggattttggtgcaaagagtgttctccaccttaaacttttgttctccagggttcctgggtgcacaattagaagatcagtgtgggaccacagcccatcaagttcctcggtacatagaacagatgaatcttcgtcatcctcaagtgataatgctaaacttctgaagatcgttgacctgacagaaacattcaagggcccacaagatgcgcctggccattggctgatcacaggtgctaagttgggtgtcgagaaaggcaggattgttgtgcgtgcaaagtactccttattgaattattaaccaaatgtttaaatcattcaatcactctgatattgagcactgtgttttaaggtagcatttgttcttttgtttttcatgtatggcttttgttcccccttgtaacatgatgtggatcatgtttcttgttgatgatgccgtgagtgaagcactacattcgttctcgaatatttgacgtccactagtccactagttcattactaatcagcgataaataaaaaagaactcgaatatttggcgtccgctagttcattactaaacaacgataaataagaaagaatggagggagtggcatatgaagatgttatggt

SEQ ID NO: 78472 - DNA, 427 bp, Zea Mays
cggacatactgattctatgagtggaatagtgccagaccaggatttgggtgattgagtattcccagccaccgctactacacaccgtcagtcggacgtgtgtgcgcggcgctcgagctcggccccgggaggccgggacgctggatgctgcccgcctgctctacttccgttggcgcgctgcagagttcgcacgctaggcggtggcgcgcattcgcctccgtccgcttgtcgcagcctcgcgctgggcgatggcaacgcggttgcaccgtcgcagcgttgcgcttgtcggccgccggtgcctgcctaccggcttccctagggtttgtgattggggattgtggttgcctctcagaaggagagaccgagaggcgagagcagcagggcgcaggagagatctgctacaggcgactcgagatgagatggcgtcgag

SEQ ID NO: 78473 - DNA, 3042 bp, Zea Mays
actgtagctcttagttcttctcctctctctctctctctctctcctctcccctctcctgtcgcactctcctgttccggccaccagcgtgcccagcatggtgcaacgctcgggtagaggagggcggagctggtcttcaggggtagcttgaactggcgaccggattggtttggagaccggtttgtccctgatttggtgccccaagtgcaagatggcccgagtgattgaactgaggatgccaggaaggtgcccatactacagatggcagagggagtattttgagaaattggtgaaggagaggttgattgccttgttattcgatgattgggaggaagatgatggagaggtggattccaagaaggtttctgaagtaggaaatagtgaagacattgcaacttctgtttgtaatggttgtagtacctgtggtagtagtggtgatgtacatgttttaatgatctgtctgtaatgatgtatatgaacaattgaagaagttggaagggaatgttgaactttgtcaatacagttcacagatcattgaaaacagaaaacagtcacaccatagcattgttgaaaccatcagcattcattacatcccaacatgaccttgttcatagcattcaaaagagacatcattacaacattcaaaagagacatcattacattcatggctcagcttaaactgttcttagccctcagattacaaaagagatatgcaaccaccttttcagggctcagcttagactattcttagcccttagattacaaaagagacatgtcatagcactcgaagggacatgctcctcggcttcaagcattgaacttgatcttctttcttgttgcaagctatttccttcttagggggagcatcaaccattgaactgggaccgtcttcttgcactgacatgttcacttcaactcgtggtggttccaatgttagtacccttcttgtggatacctataattctgcttccttggctgcttgctcagcctctagtgccctcctagccttttctcttgcagcttgtgcccttgttcttggagatggttcagctagtggttcagcttgtgcacctgttgcagcttgtgggtgagctagtgcacctgttgcagcttgtgggtgagcttgtgcacctgttgcagcttttgggtcagctgctgcacttgagcagcttctggttcagcccccttagctttcttcctctctccagttgtcttggtctttctggttctcttcctacaaaggatgaatagttagtaggcatttctaacataagtacaaaggatgaaacattcataacttaacctctttttcgttccagttagaggcatttccaacttcccttcctatggtcattttcaccacagttggcgcacttaacttgtcttctagccttacttgtcctctctagaggagataagaatctgtttttcttctgccttcccacacctctcctcttgaatattggtggctgcaatttgaaatctttatccaccttaggccattgtgacatgtcagtaatgttaggccatcccttgtcatatgctgcccttagcattgaaacaaagaaagccatgtccacgtagggttctagctgaggttgtctgcaagtagtgattacaacgaaagcatgtgggcatggcttccttgtcacctgccactacctacatgtgcattcctttttctctaagtatacaacatgcctcctcacttcttgatccctatacatcactgtcacctcagtctggtcaggtataccctttgtcactttcaaatggttcagtcctttggaggcagcattcaactgttgcacaacagctggcaagatcaccccatctagtgcccttgctatgctcctcctcttctcaaataacacacccccttctctctaatggcatcaaccatgcaatgcaatggtagatccttcagctgtttaatccatgcattccaacactcagctagattattgttgatgtactcacacttcacctatgtattgaacttggaccttgcccagaagagactgtagtgttcatctaaccaagtttgtacactagggctggctgcaatcactttgtccatgaaatacttgtacatcctatctgagtatgctctatctgctggccacatgttagctccatatacatctccagtaaaccctttcttcatattctctatcaagtgcctggaacattctctttgttcagcccaaggaaatacctgctggactgctgcttctagacccttacaggcatctgtgcatactgccaaatgtggcacaaatcctatggcctttccaagctggtccataaaccaaacccaattgtccctagtctcagagtcaagaacccaaaggccaatggaaacatccaattgtgtccatctaagcctaaggcagctggcatgtgaccattccaaaggccattcagagctgtggactctacactaatgtaaggcctacaaccatttaaaaatccttcaatgctaccttggaatgcacagaaaaacctgctggaatgtaacttattatctactatgactgtatcaatctctactatacacccgggtgaccttagctctacctctgctttgaacctatacaaccaatcaaaagaatcattccaactaccaaataatttgtttgctgccctttgtctcccataccatactgtctagtagttgattttcaaaccatacttttcctccaaagctgactgaagttcaatggctcccatgtttggcttcttcttcaacaatggtatagctctttctgcaacccaggcttgggaggccattgtgccttgtactctacttgtagatgcacaactatatttgcctcagtttatctgcacctggaaaaagatttaaaaaactctgttagtgcaaaataactttgtatgaacaaaattaaagggataattatcaaaatgtgtaccctgacactattatcagccgttgttctagctctaataatccaggggcatcctgttgattttgcaataacctgctgttgatttgtagatttgagtcactgacaaacggctgac

SEQ ID NO: 78474 - DNA, 2999 bp, Zea Mays
gttgacccgatccactgtagctcttagttcttctcctctctctctctctctctctcctctcccctctcctgtcgcactctcctgttccggccaccagcgtgcccagcatggtgcaacgctcgggtagaggagggcggagctggtcttcaggggtagcttgaactggcgaccggattggtttggagaccgatgccaggaaggtgcccatactacagatggcagagggagtattttgagaaattggtgaaggagaggttgattgccttgttattcgatgattgggaggaagatgatggagaggtggattccaagaaggtttctgaagtaggaaatagtgaagacattgcaacttctgtttgtaatggttgtagtacctgtggtagtagtggtgatgtacatgttttaatgatctgtctgtaatgatgtatatgaacaattgaagaagttggaagggaatgttgaactttgtcaatacagttcacagatcattgaaaacagaaaacagtcacaccatagcattgttgaaaccatcagcattcattacatcccaacatgaccttgttcatagcattcaaaagagacatcattacaacattcaaaagagacatcattacattcatggctcagcttaaactgttcttagccctcagattacaaaagagatatgcaaccaccttttcagggctcagcttagactattcttagcccttagattacaaaagagacatgtcatagcactcgaagggacatgctcctcggcttcaagcattgaacttgatcttctttcttgttgcaagctatttccttcttagggggagcatcaaccattgaactgggaccgtcttcttgcactgacatgttcacttcaactcgtggtggttccaatgttagtacccttcttgtggatacctataattctgcttccttggctgcttgctcagcctctagtgccctcctagccttttctcttgcagcttgtgcccttgttcttggagatggttcagctagtggttcagcttgtgcacctgttgcagcttgtgggtgagctagtgcacctgttgcagcttgtgggtgagcttgtgcacctgttgcagcttttgggtcagctgctgcacttgagcagcttctggttcagcccccttagctttcttcctctctccagttgtcttggtctttctggttctcttcctacaaaggatgaatagttagtaggcatttctaacataagtacaaaggatgaaacattcataacttaacctctttttcgttccagttagaggcatttccaacttcccttcctatggtcattttcaccacagttggcgcacttaacttgtcttctagccttacttgtcctctctagaggagataagaatctgtttttcttctgccttcccacacctctcctcttgaatattggtggctgcaatttgaaatctttatccaccttaggccattgtgacatgtcagtaatgttaggccatcccttgtcatatgctgcccttagcattgaaacaaagaaagccatgtccacgtagggttctagctgaggttgtctgcaagtagtgattacaacgaaagcatgtgggcatggcttccttgtcacctgccactacctacatgtgcattcctttttctctaagtatacaacatgcctcctcacttcttgatccctatacatcactgtcacctcagtctggtcaggtataccctttgtcactttcaaatggttcagtcctttggaggcagcattcaactgttgcacaacagctggcaagatcaccccatctagtgcccttgctatgctcctcctcttctcaaataacacacccccttctctctaatggcatcaaccatgcaatgcaatggtagatccttcagctgtttaatccatgcattccaacactcagctagattattgttgatgtactcacacttcacctatgtattgaacttggaccttgcccagaagagactgtagtgttcatctaaccaagtttgtacactagggctggctgcaatcactttgtccatgaaatacttgtacatcctatctgagtatgctctatctgctggccacatgttagctccatatacatctccagtaaaccctttcttcatattctctatcaagtgcctggaacattctctttgttcagcccaaggaaatacctgctggactgctgcttctagacccttacaggcatctgtgcatactgccaaatgtggcacaaatcctatggcctttccaagctggtccataaaccaaacccaattgtccctagtctcagagtcaagaacccaaaggccaatggaaacatccaattgtgtccatctaagcctaaggcagctggcatgtgaccattccaaaggccattcagagctgtggactctacactaatgtaaggcctacaaccatttaaaaatccttcaatgctaccttggaatgcacagaaaaacctgctggaatgtaacttattatctactatgactgtatcaatctctactatacacccgggtgaccttagctctacctctgctttgaacctatacaaccaatcaaaagaatcattccaactaccaaataatttgtttgctgccctttgtctcccataccatactgtctagtagttgattttcaaaccatacttttcctccaaagctgactgaagttcaatggctcccatgtttggcttcttcttcaacaatggtatagctctttctgcaacccaggcttgggaggccattgtgccttgtactctacttgtagatgcacaactatatttgcctcagtttatctgcacctggaaaaagatttaaaaaactctgttagtgcaaaataactttgtatgaacaaaattaaagggataattatcaaaatgtgtaccctgacactattatcagccgttgttctagctctaataatccaggggcatcctgttgattttgcaataacctgctgttgatttgtagatttgagtcactgacaaacggctgac

SEQ ID NO: 78475 - DNA, 3085 bp, Zea Mays
cagccagggaaatccctgttttgccctcgctcgctttcctttgccttctttgccgccgtcgttgacccgatccactgtagctcttagttcttctcctctctctctctctctctctcctctcccctctcctgtcgcactctcctgttccggccaccagcgtgcccagcatggtgcaacgctcgggtagaggagggcggagctggtcttcaggggtagcttgaactggcgaccggattggtttggagaccggtttgtccctgatttggtgccccaagtgcaagatggcccgagtgattgaactgagggtgaagagggagaatgagaacctaggccaaatgccaggaaggtgcccatactacagatggcagagggagtattttgagaaattggtgaaggagaggttgattgccttgttattcgatgattgggaggaagatgatggagaggtggattccaagaaggtttctgaagtaggaaatagtgaagacattgcaacttctgtttgtaatggttgtagtacctgtggtagtagtggtgatgtacatgttttaatgatctgtctgtaatgatgtatatgaacaattgaagaagttggaagggaatgttgaactttgtcaatacagttcacagatcattgaaaacagaaaacagtcacaccatagcattgttgaaaccatcagcattcattacatcccaacatgaccttgttcatagcattcaaaagagacatcattacaacattcaaaagagacatcattacattcatggctcagcttaaactgttcttagccctcagattacaaaagagatatgcaaccaccttttcagggctcagcttagactattcttagcccttagattacaaaagagacatgtcatagcactcgaagggacatgctcctcggcttcaagcattgaacttgatcttctttcttgttgcaagctatttccttcttagggggagcatcaaccattgaactgggaccgtcttcttgcactgacatgttcacttcaactcgtggtggttccaatgttagtacccttcttgtggatacctataattctgcttccttggctgcttgctcagcctctagtgccctcctagccttttctcttgcagcttgtgcccttgttcttggagatggttcagctagtggttcagcttgtgcacctgttgcagcttttgggtcagctgctgcacttgagcagcttctggttcagcccccttagctttcttcctctctccagttgtcttggtctttctggttctcttcctacaaaggatgaatagttagtaggcatttctaacataagtacaaaggatgaaacattcataacttaacctctttttcgttccagttagaggcatttccaacttcccttcctatggtcattttcaccacagttggcgcacttaacttgtcttctagccttacttgtcctctctagaggagataagaatctgtttttcttctgccttcccacacctctcctcttgaatattggtggctgcaatttgaaatctttatccaccttaggccattgtgacatgtcagtaatgttaggccatcccttgtcatatgctgcccttagcattgaaacaaagaaagccatgtccacgtagggttctagctgaggttgtctgcaagtagtgattacaacgaaagcatgtgggcatggcttccttgtcacctgccactacctacatgtgcattcctttttctctaagtatacaacatgcctcctcacttcttgatccctatacatcactgtcacctcagtctggtcaggtataccctttgtcactttcaaatggttcagtcctttggaggcagcattcaactgttgcacaacagctggcaagatcaccccatctagtgcccttgctatgctcctcctcttctcaaataacacacccccttctctctaatggcatcaaccatgcaatgcaatggtagatccttcagctgtttaatccatgcattccaacactcagctagattattgttgatgtactcacacttcacctatgtattgaacttggaccttgcccagaagagactgtagtgttcatctaaccaagtttgtacactagggctggctgcaatcactttgtccatgaaatacttgtacatcctatctgagtatgctctatctgctggccacatgttagctccatatacatctccagtaaaccctttcttcatattctctatcaagtgcctggaacattctctttgttcagcccaaggaaatacctgctggactgctgcttctagacccttacaggcatctgtgcatactgccaaatgtggcacaaatcctatggcctttccaagctggtccataaaccaaacccaattgtccctagtctcagagtcaagaacccaaaggccaatggaaacatccaattgtgtccatctaagcctaaggcagctggcatgtgaccattccaaaggccattcagagctgtggactctacactaatgtaaggcctacaaccatttaaaaatccttcaatgctaccttggaatgcacagaaaaacctgctggaatgtaacttattatctactatgactgtatcaatctctactatacacccgggtgaccttagctctacctctgctttgaacctatacaaccaatcaaaagaatcattccaactaccaaataatttgtttgctgccctttgtctcccataccatactgtctagtagttgattttcaaaccatacttttcctccaaagctgactgaagttcaatggctcccatgtttggcttcttcttcaacaatggtatagctctttctgcaacccaggcttgggaggccattgtgccttgtactctacttgtagatgcacaactatatttgcctcagtttatctgcacctggaaaaagatttaaaaaactctgttagtgcaaaataactttgtatgaacaaaattaaagggataattatcaaaatgtgtaccctgacactattatcagccgttgttctagctctaataatccaggggcatcctgttgattttgcaataacctgctgttgatttgtagatttgagtcactgacaaacggctgac

SEQ ID NO: 78476 - DNA, 1532 bp, Zea Mays
cgagcagacgctgtcgtactggaccttggacgcatggagtatcgaagaggagtctgagatttgttctctgttcgtcagctatggaggagctgaagaacacgagcccacgaggcagcgcagggacaagaagtgccatattggagagatagctgcaaagtcatccgagcctagaatagccggttcaaaacgacgatgaaggcgttatccacgtcggcagaaattctccaagccgcccgatcgtgaatcaatggcattcattgcggtctcgatagcgtgtggaatacgactctcaccccctcgttccgaggagcgaggagcaggccgcctgcgtaatgtcgaagtactcgatcagcagcttctcttctcgacgtggcgcctccgccaccctcctccccgcgcgagtacctctggtctgggctccagcacgctgaattagtgcatcaaggttcatgactcagactgcatatggcactatcaaaacctgtttacacgaaacacggtgttatgaagtcaagttacaaatggagcatgttagcccaaataggaaaagaaagctaagtaagtgatctcgcaccaacttaattcagaacaagcaacaaaaaaggatgaatatcttactagatgtctaccttgtgatttgttcatgaaatttgtcatgaagatcatactaatgtgtgctatgcccctttgagcatacctcgtgtcgaagcacgccatgtgcatagagaattgctaaaccagcaaagataattatcaacaggtaccatagtaaatacattgttataatggtgtgcgccagaaaagaaaaaatttattaggtgcggccacaccctctcaacggcgtgtcacttcgcattgtggccactttgatccggatttagttaaaactctaaaagttggtccacgaagagatttggctaatcaaaggcacatcaggctgggatccagtcaattaagaaatatttaacatgcatcctacattatttggttactttatgaccaaggaatacttgatacagagaacgtcttgctctatcagagggtaccagctttaaatcaaaaaccaaatttcagagaaaaaaatacagatggtggctctggatatctcctgctctaacagctccacaaaaattgcattcaacacaggcgacaaacattcgagaacagaggtagtacaaaacatgtactgttgtacatgatatgctagtctataatcaagaacgatagcagacgccttcgcaacacgactcaggatacccgcacataggagctgctacagtgaactacctacgtcaaaagatggtgctggcaggattccgctcgaaaagatccctaggatatagtacgaccatagcataccgatgctaggtagagattcttagaccatttgtcctgcaatgaaacaagagtacattttgtcagaaccagccgtcagttgcagataagatactgaatgaggtactactgcaggcttgttaaccttcacatgtttactagggaaattaattgtcctcagtgtctcttgggtttca

SEQ ID NO: 78477 - DNA, 1510 bp, Zea Mays
cgagcagacgctgtcgtactggaccgtactcctctcttcctgtgctcctccatttcaattccatggctccgcctccgtctaactaattgatgatgaaaattggttcatcagtctcacggtatcattaaatttgattcctatactatgcttgcgattctgtgtcatctgcttgttttttgttggattggaccaaacttttggacagttggacgcatggagtatcgaagaggagtctgagatttgttctctgttcgtcagctatggaggagctgaagaacacgagcccacgaggcagcgcagggacaagaagtgccatattggagagatagctgcaaagtcatccgagcctagaatagccggttcaaaacgacgatgaaggcgttatccacgtcggcagaaattctccaagccgcccgatcgtgaatcaatggcattcattgcggtctcgatagcgtgtggaatacgactctcaccccctcgttccgaggagcgaggagcaggccgcctgcgtaatgtcgaagtactcgatcagcagcttctcttctcgacgtggcgcctccgccaccctcctccccgcgcgagtacctctggtctgggctccagcacgctgaattagtgcatcaaggttcatgactcagactgcatatggcactatcaaaacctgtttacacgaaacacggtgttatgaagtcaagttacaaatggagcatgttagcccaaataggaaaagaaagctaagtaccatagtaaatacattgttataatggtgtgcgccagaaaagaaaaaatttattaggtgcggccacaccctctcaacggcgtgtcacttcgcattgtggccactttgatccggatttagttaaaactctaaaagttggtccacgaagagatttggctaatcaaaggcacatcaggctgggatccagtcaattaagaaatatttaacatgcatcctacattatttggttactttatgaccaaggaatacttgatacagagaacgtcttgctctatcagagggtaccagctttaaatcaaaaaccaaatttcagagaaaaaaatacagatggtggctctggatatctcctgctctaacagctccacaaaaattgcattcaacacaggcgacaaacattcgagaacagaggtagtacaaaacatgtactgttgtacatgatatgctagtctataatcaagaacgatagcagacgccttcgcaacacgactcaggatacccgcacataggagctgctacagtgaactacctacgtcaaaagatggtgctggcaggattccgctcgaaaagatccctaggatatagtacgaccatagcataccgatgctaggtagagattcttagaccatttgtcctgcaatgaaacaagagtacattttgtcagaaccagccgtcagttgcagataagatactgaatgaggtactactgcaggcttgttaaccttcacatgtttactagggaaattaattgtcctcagtgtctcttgggtttca

SEQ ID NO: 78478 - DNA, 1520 bp, Zea Mays
cgagcagacgctgtcgtactggaccttggacgcatggagtatcgaagaggagtctgagatttgttctctgttcgtcagctatggaggagctgaagaacacgagcccacgaggcagcgcagggacaagaagtgccatattggagagatagctgcaaagtcatccgagcctagaatagccggttcaaaacgacgatgaaggcgttatccacgtcggcagaaattctccaagccgcccgatcgtgaatcaatggcattcattgcggtctcgatagcgtgtggaatacgactctcaccccctcgttccgaggagcgaggagcaggccgcctgcgtaatgtcgaagtactcgatcagcagcttctcttctcgacgtggcgcctccgccaccctcctccccgcgcgagtacctctggtctgggctccagcacgctgaattagtgcatcaaggttcatgactcagactgcatatggcactatcaaaacctgtttacacgaaacacggtgttatgaagtcaagttacaaatggagcatgttagcccaaataggaaaagaaagctaagtaagtgatctcgcaccaacttaattcagaacaagcaacaaaaaaggatgaatatcttactagatgtctaccttgtgatttgttcatgaaatttgtcatgaagatcatactaatgtgtgctatgcccctttgagcatacctcgtgtcgaagcacgccatgtgcatagagaattgctaaaccagcaaagataattatcaacaggtaccatagtaaatacattgttataatggtgtgcgccagaaaagaaaaaatttattaggtgcggccacaccctctcaacggcgtgtcacttcgcattgtggccactttgatccggatttagttaaaactctaaaagttggtccacgaagagatttggctaatcaaaggcacatcaggctgggatccagtcaattaaggttttgtcttacttacctcgggtgaagacaaggcttttttatgcactgagagaacgtcttgctctatcagagggtaccagctttaaatcaaaaaccaaatttcagagaaaaaaatacagatggtggctctggatatctcctgctctaacagctccacaaaaattgcattcaacacaggcgacaaacattcgagaacagaggtagtacaaaacatgtactgttgtacatgatatgctagtctataatcaagaacgatagcagacgccttcgcaacacgactcaggatacccgcacataggagctgctacagtgaactacctacgtcaaaagatggtgctggcaggattccgctcgaaaagatccctaggatatagtacgaccatagcataccgatgctaggtagagattcttagaccatttgtcctgcaatgaaacaagagtacattttgtcagaaccagccgtcagttgcagataagatactgaatgaggtactactgcaggcttgttaaccttcacatgtttactagggaaattaattgtcctcagtgtctcttgggtttca

SEQ ID NO: 78479 - DNA, 1729 bp, Zea Mays
cgagcagacgctgtcgtactggaccgtactcctctcttcctgtgctcctccatttcaattccatggctccgcctccgtctaactaattgatgatgaaaattggttcatcagtctcacgttggacgcatggagtatcgaagaggagtctgagatttgttctctgttcgtcagctatggaggagctgaagaacacgagcccacgaggcagcgcagggacaagaagtgccatattggagagatagctgcaaagtcatccgagcctagaatagccggttcaaaacgacgatgaaggcgttatccacgtcggcagaaattctccaagccgcccgatcgtgaatcaatggcattcattgcggtctcgatagcgtgtggaatacgactctcaccccctcgttccgaggagcgaggagcaggccgcctgcgtaatgtcgaagtactcgatcagcagcttctcttctcgacgtggcgcctccgccaccctcctccccgcgcgagtacctctggtctgggctccagcacgctgaattagtgcatcaaggttcatgactcagactgcatatggcactatcaaaacctgtttacacgaaacacggtgttatgaagtcaagttacaaatggagcatgttagcccaaataggaaaagaaagctaagtaagtgatctcgcaccaacttaattcagaacaagcaacaaaaaaggatgaatatcttactagatgtctaccttgtgatttgttcatgaaatttgtcatgaagatcatactaatgtgtgctatgcccctttgagcatacctcgtgtcgaagcacgccatgtgcatagagaattgctaaaccagcaaagataattatcaacaggtaccatagtaaatacattgttataatggtgtgcgccagaaaagaaaaaatttattaggtgcggccacaccctctcaacggcgtgtcacttcgcattgtggccactttgatccggatttagttaaaactctaaaaggtacaaatcattctgccacttttttatccaagttggtccacgaagagatttggctaatcaaaggcacatcaggctgggatccagtcaattaaggttttgtcttacttacctcgggtgaagacaaggcttttttatgcactgaggttgctctcggttgcactgcagaaatatttaacatgcatcctacattatttggttactttatgaccaaggaatacttgatacagagaacgtcttgctctatcagagggtaccagctttaaatcaaaaaccaaatttcagagaaaaaaatacagatggtggctctggatatctcctgctctaacagctccacaaaaattgcattcaacacaggcgacaaacattcgagaacagaggtagtacaaaacatgtactgttgtacatgatatgctagtctataatcaagaacgatagcagacgccttcgcaacacgactcaggatacccgcacataggagctgctacagtgaactacctacgtcaaaagatggtgctggcaggattccgctcgaaaagatccctaggatatagtacgaccatagcataccgatgctaggtagagattcttagaccatttgtcctgcaatgaaacaagagtacattttgtcagaaccagccgtcagttgcagataagatactgaatgaggtactactgcaggcttgttaaccttcacatgtttactagggaaattaattgtcctcagtgtctcttgggtttca

SEQ ID NO: 78480 - DNA, 1836 bp, Zea Mays
cgagcagacgctgtcgtactggaccgtactcctctcttcctgtgctcctccatttcaattccatggctccgcctccgtctaactaattgatgatgaaaattggttcatcagtctcacgttggacgcatggagtatcgaagaggagtctgagatttgttctctgttcgtcagctatggaggagctgaagaacacgagcccacgaggcagcgcagggacaagaagtgccatattggagagatagctgcaaagtcatccgagcctagaatagccggttcaaaacgacgatgaaggcgttatccacgtcggcagaaattctccaagccgcccgatcgtgaatcaatggcattcattgcggtctcgatagcgtgtggaatacgactctcaccccctcgttccgaggagcgaggagcaggccgcctgcgtaatgtcgaagtactcgatcagcagcttctcttctcgacgtggcgcctccgccaccctcctccccgcgcgagtacctctggtctgggctccagcacgctgaattagtgcatcaaggttcatgactcagactgcatatggcactatcaaaacctgtttacacgaaacacggtgttatgaagtcaagttacaaatggagcatgttagcccaaataggaaaagaaagctaagtaccatagtaaatacattgttataatggtgtgcgccagaaaagaaaaaatttattaggtgcggccacaccctctcaacggcgtgtcacttcgcattgtggccactttgatccggatttagttaaaactctaaaaggtacaaatcattctgccacttttttatccaagttggtccacgaagagatttggctaatcaaaggcacatcaggctgggatccagtcaattaaggttttgtcttacttacctcgggtgaagacaaggcttttttatgcactgaggttgctctcggttgcactgcagaaatatttaacatgcatcctacattatttggttactttatgaccaaggaatacttgatacagagaacgtcttgctctatcagagggtaccagctttaaatcaaaaaccaaatttcagagaaaaaaatacagatgccaatatcaatcttgggcccatctcctgtactgaaatcagcccaaacaacatggttccaagaaattgggtgtgctgtggcgaccgggctttccctacgggctggtcatcatttcgggagcgtcgtggctacctccggtgctgcggccagcgcgactaggccagatcgacccagcgcgatgacggctgtgcgcggcgtcctcggacatcgctccgccagctcaaatctccaagcgctcgagctcggaactcctccaaccggtcatcagctgccagcaatcgacctccatccgcagagcactcaccgaaaggtggctctggatatctcctgctctaacagctccacaaaaattgcattcaacacaggcgacaaacattcgagaacagaggtagtacaaaacatgtactgttgtacatgatatgctagtctataatcaagaacgatagcagacgccttcgcaacacgactcaggatacccgcacataggagctgctacagtgaactacctacgtcaaaagatggtgctggcaggattccgctcgaaaagatccctaggatatagtacgaccatagcataccgatgctaggtagagattcttagaccatttgtcctgcaatgaaacaagagtacattttgtcagaaccagccgtcagttgcagataagatactgaatgaggtactactgcaggcttgttaaccttcacatgtttactagggaaattaattgtcctcagtgtctcttgggtttca

SEQ ID NO: 78481 - DNA, 1857 bp, Zea Mays
cgagcagacgctgtcgtactggaccttggacgcatggagtatcgaagaggagtctgagatttgttctctgttcgtcagctatggaggagctgaagaacacgagcccacgaggcagcgcagggacaagaagtgccatattggagagatagctgcaaagtcatccgagcctagaatagccggttcaaaacgacgatgaaggcgttatccacgtcggcagaaattctccaagccgcccgatcgtgaatcaatggcattcattgcggtctcgatagcgtgtggaatacgactctcaccccctcgttccgaggagcgaggagcaggccgcctgcgtaatgtcgaagtactcgatcagcagcttctcttctcgacgtggcgcctccgccaccctcctccccgcgcgagtacctctggtctgggctccagcacgctgaattagtgcatcaaggttcatgactcagactgcatatggcactatcaaaacctgtttacacgaaacacggtgttatgaagtcaagttacaaatggagcatgttagcccaaataggaaaagaaagctaagtaagtgatctcgcaccaacttaattcagaacaagcaacaaaaaaggatgaatatcttactagatgtctaccttgtgatttgttcatgaaatttgtcatgaagatcatactaatgtgtgctatgcccctttgagcatacctcgtgtcgaagcacgccatgtgcatagagaattgctaaaccagcaaagataattatcaacaggtaccatagtaaatacattgttataatggtgtgcgccagaaaagaaaaaatttattaggtgcggccacaccctctcaacggcgtgtcacttcgcattgtggccactttgatccggatttagttaaaactctaaaaggtacaaatcattctgccacttttttatccaagttggtccacgaagagatttggctaatcaaaggcacatcaggctgggatccagtcaattaaggttttgtcttacttacctcgggtgaagacaaggcttttttatgcactgaggttgctctcggttgcactgcagaaatatttaacatgcatcctacattatttggttactttatgaccaaggaatacttgatacagagaacgtcttgctctatcagagggtaccagctttaaatcaaaaaccaaatttcagagaaaaaaatacagatgccaatatcaatcttgggcccatctcctgtactgaaatcagcccaaacaacatggttccaagaaattgggtgtgctgtggcgaccgggctttccctacgggctggtcatcatttcgggagcgtcgtggctacctccggtgctgcggccagcgcgactaggccagatcgacccagcgcgatgacggctgtgcgcggcgtcctcggacatcgctccgccagctcaaatctccaagcgctcgagctcggaactcctccaaccggtcatcagctgccagcaatcgacctccatccgcagagcactcaccgaaaggtggctctggatatctcctgctctaacagctccacaaaaattgcattcaacacaggcgacaaacattcgagaacagaggtagtacaaaacatgtactgttgtacatgatatgctagtctataatcaagaacgatagcagacgccttcgcaacacgactcaggatacccgcacataggagctgctacagtgaactacctacgtcaaaagatggtgctggcaggattccgctcgaaaagatccctaggatatagtacgaccatagcataccgatgctaggtagagattcttagaccatttgtccttcacatgtttactagggaaattaattgtcctcagtgtctcttgggtttca

SEQ ID NO: 78482 - DNA, 1722 bp, Zea Mays
cgagcagacgctgtcgtactggaccttggacgcatggagtatcgaagaggagtctgagatttgttctctgttcgtcagctatggaggagctgaagaacacgagcccacgaggcagcgcagggacaagaagtgccatattggagagatagctgcaaagtcatccgagcctagaatagccggttcaaaacgacgatgaaggcgttatccacgtcggcagaaattctccaagccgcccgatcgtgaatcaatggcattcattgcggtctcgatagcgtgtggaatacgactctcaccccctcgttccgaggagcgaggagcaggccgcctgcgtaatgtcgaagtactcgatcagcagcttctcttctcgacgtggcgcctccgccaccctcctccccgcgcgagtacctctggtctgggctccagcacgctgaattagtgcatcaaggttcatgactcagactgcatatggcactatcaaaacctgtttacacgaaacacggtgttatgaagtcaagttacaaatggagcatgttagcccaaataggaaaagaaagctaaatcatactaatgtgtgctatgcccctttgagcatacctcgtgtcgaagcacgccatgtgcatagagaattgctaaaccagcaaagataattatcaacaggtaccatagtaaatacattgttataatggtgtgcgccagaaaagaaaaaatttattaggtgcggccacaccctctcaacggcgtgtcacttcgcattgtggccactttgatccggatttagttaaaactctaaaagttggtccacgaagagatttggctaatcaaaggcacatcaggctgggatccagtcaattaaggttttgtcttacttacctcgggtgaagacaaggcttttttatgcactgaggttgctctcggttgcactgcagaaatatttaacatgcatcctacattatttggttactttatgaccaaggaatacttgatacagagaacgtcttgctctatcagagggtaccagctttaaatcaaaaaccaaatttcagagaaaaaaatacagatgccaatatcaatcttgggcccatctcctgtactgaaatcagcccaaacaacatggttccaagaaattgggtgtgctgtggcgaccgggctttccctacgggctggtcatcatttcgggagcgtcgtggctacctccggtgctgcggccagcgcgactaggccagatcgacccagcgcgatgacggctgtgcgcggcgtcctcggacatcgctccgccagctcaaatctccaagcgctcgagctcggaactcctccaaccggtcatcagctgccagcaatcgacctccatccgcagagcactcaccgaaaggtggctctggatatctcctgctctaacagctccacaaaaattgcattcaacacaggcgacaaacattcgagaacagaggtagtacaaaacatgtactgttgtacatgatatgctagtctataatcaagaacgatagcagacgccttcgcaacacgactcaggatacccgcacataggagctgctacagtgaactacctacgtcaaaagatggtgctggcaggattccgctcgaaaagatccctaggatatagtacgaccatagcataccgatgctaggtagagattcttagaccatttgtccttcacatgtttactagggaaattaattgtcctcagtgtctcttgggtttca

SEQ ID NO: 78483 - DNA, 1898 bp, Zea Mays
cgagcagacgctgtcgtactggaccgtactcctctcttcctgtgctcctccatttcaattccatggctccgcctccgtctaactaattgatgatgaaaattggttcatcagtctcacgttggacgcatggagtatcgaagaggagtctgagatttgttctctgttcgtcagctatggaggagctgaagaacacgagcccacgaggcagcgcagggacaagaagtgccatattggagagatagctgcaaagtcatccgagcctagaatagccggttcaaaacgacgatgaaggcgttatccacgtcggcagaaattctccaagccgcccgatcgtgaatcaatggcattcattgcggtctcgatagcgtgtggaatacgactctcaccccctcgttccgaggagcgaggagcaggccgcctgcgtaatgtcgaagtactcgatcagcagcttctcttctcgacgtggcgcctccgccaccctcctccccgcgcgagtacctctggtctgggctccagcacgctgaattagtgcatcaaggttcatgactcagactgcatatggcactatcaaaacctgtttacacgaaacacggtgttatgaagtcaagttacaaatggagcatgttagcccaaataggaaaagaaagctaagtaagtgatctcgcaccaacttaattcagaacaagcaacaaaaaaggatgaatatcttactagatgtctaccttgtgatttgttcatgaaatttgtcatgaagatcatactaatgtgtgctatgcccctttgagcatacctcgtgtcgaagcacgccatgtgcatagagaattgctaaaccagcaaagataattatcaacaggtaccatagtaaatacattgttataatggtgtgcgccagaaaagaaaaaatttattaggtgcggccacaccctctcaacggcgtgtcacttcgcattgtggccactttgatccggatttagttaaaactctaaaaggtacaaatcattctgccacttttttatccaagttggtccacgaagagatttggctaatcaaaggcacatcaggctgggatccagtcaattaaggttttgtcttacttacctcgggtgaagacaaggcttttttatgcactgaggttgctctcggttgcactgcagaaatatttaacatgcatcctacattatttggttactttatgaccaaggaatacttgatacagagaacgtcttgctctatcagagggtaccagctttaaatcaaaaaccaaatttcagagaaaaaaatacagatgggttccaagaaattgggtgtgctgtggcgaccgggctttccctacgggctggtcatcatttcgggagcgtcgtggctacctccggtgctgcggccagcgcgactaggccagatcgacccagcgcgatgacggctgtgcgcggcgtcctcggacatcgctccgccagctcaaatctccaagcgctcgagctcggaactcctccaaccggtcatcagctgccagcaatcgacctccatccgcagagcactcaccgaaaggtggctctggatatctcctgctctaacagctccacaaaaattgcattcaacacaggcgacaaacattcgagaacagaggtagtacaaaacatgtactgttgtacatgatatgctagtctataatcaagaacgatagcagacgccttcgcaacacgactcaggatacccgcacataggagctgctacagtgaactacctacgtcaaaagatggtgctggcaggattccgctcgaaaagatccctaggatatagtacgaccatagcataccgatgctaggtagagattcttagaccatttgtccttcacatgtttactagggaaattaattgtcctcagtgtctcttgggtttca

SEQ ID NO: 78484 - DNA, 1711 bp, Zea Mays
cgagcagacgctgtcgtactggaccttggacgcatggagtatcgaagaggagtctgagatttgttctctgttcgtcagctatggaggagctgaagaacacgagcccacgaggcagcgcagggacaagaagtgccatattggagagatagctgcaaagtcatccgagcctagaatagccggttcaaaacgacgatgaaggcgttatccacgtcggcagaaattctccaagccgcccgatcgtgaatcaatggcattcattgcggtctcgatagcgtgtggaatacgactctcaccccctcgttccgaggagcgaggagcaggccgcctgcgtaatgtcgaagtactcgatcagcagcttctcttctcgacgtggcgcctccgccaccctcctccccgcgcgagtacctctggtctgggctccagcacgctgaattagtgcatcaaggttcatgactcagactgcatatggcactatcaaaacctgtttacacgaaacacggtgttatgaagtcaagttacaaatggagcatgttagcccaaataggaaaagaaagctaagtaccatagtaaatacattgttataatggtgtgcgccagaaaagaaaaaatttattaggtgcggccacaccctctcaacggcgtgtcacttcgcattgtggccactttgatccggatttagttaaaactctaaaagttggtccacgaagagatttggctaatcaaaggcacatcaggctgggatccagtcaattaaggttttgtcttacttacctcgggtgaagacaaggcttttttatgcactgaggttgctctcggttgcactgcagaaatatttaacatgcatcctacattatttggttactttatgaccaaggaatacttgatacagagaacgtcttgctctatcagagggtaccagctttaaatcaaaaaccaaatttcagagaaaaaaatacagatgccaatatcaatcttgggcccatctcctgtactgaaatcagcccaaacaacatggttccaagaaattgggtgtgctgtggcgaccgggctttccctacgggctggtcatcatttcgggagcgtcgtggctacctccggtgctgcggccagcgcgactaggccagatcgacccagcgcgatgacggctgtgcgcggcgtcctcggacatcgctccgccagctcaaatctccaagcgctcgagctcggaactcctccaaccggtcatcagctgccagcaatcgacctccatccgcagagcactcaccgaaaggtggctctggatatctcctgctctaacagctccacaaaaattgcattcaacacaggcgacaaacattcgagaacagaggtagtacaaaacatgtactgttgtacatgatatgctagtctataatcaagaacgatagcagacgccttcgcaacacgactcaggatacccgcacataggagctgctacagtgaactacctacgtcaaaagatggtgctggcaggattccgctcgaaaagatccctaggatatagtacgaccatagcataccgatgctaggtagagattcttagaccatttgtcctgcaatgaaacaagagtacattttgtcagaaccagccgtcagttgcagataagatactgaatgaggtactactgcaggcttgttaaccttcacatgtttactagggaaattaattgtcctcagtgtctcttgggtttca

SEQ ID NO: 78485 - DNA, 1815 bp, Zea Mays
cgagcagacgctgtcgtactggaccgtactcctctcttcctgtgctcctccatttcaattccatggctccgcctccgtctaactaattgatgatgaaaattggttcatcagtctcacgttggacgcatggagtatcgaagaggagtctgagatttgttctctgttcgtcagctatggaggagctgaagaacacgagcccacgaggcagcgcagggacaagaagtgccatattggagagatagctgcaaagtcatccgagcctagaatagccggttcaaaacgacgatgaaggcgttatccacgtcggcagaaattctccaagccgcccgatcgtgaatcaatggcattcattgcggtctcgatagcgtgtggaatacgactctcaccccctcgttccgaggagcgaggagcaggccgcctgcgtaatgtcgaagtactcgatcagcagcttctcttctcgacgtggcgcctccgccaccctcctccccgcgcgagtacctctggtctgggctccagcacgctgaattagtgcatcaaggttcatgactcagactgcatatggcactatcaaaacctgtttacacgaaacacggtgttatgaagtcaagttacaaatggagcatgttagcccaaataggaaaagaaagctaaatcatactaatgtgtgctatgcccctttgagcatacctcgtgtcgaagcacgccatgtgcatagagaattgctaaaccagcaaagataattatcaacaggtaccatagtaaatacattgttataatggtgtgcgccagaaaagaaaaaatttattaggtgcggccacaccctctcaacggcgtgtcacttcgcattgtggccactttgatccggatttagttaaaactctaaaagttggtccacgaagagatttggctaatcaaaggcacatcaggctgggatccagtcaattaaggttttgtcttacttacctcgggtgaagacaaggcttttttatgcactgaggttgctctcggttgcactgcagaaatatttaacatgcatcctacattatttggttactttatgaccaaggaatacttgatacagagaacgtcttgctctatcagagggtaccagctttaaatcaaaaaccaaatttcagagaaaaaaatacagatgccaatatcaatcttgggcccatctcctgtactgaaatcagcccaaacaacatggttccaagaaattgggtgtgctgtggcgaccgggctttccctacgggctggtcatcatttcgggagcgtcgtggctacctccggtgctgcggccagcgcgactaggccagatcgacccagcgcgatgacggctgtgcgcggcgtcctcggacatcgctccgccagctcaaatctccaagcgctcgagctcggaactcctccaaccggtcatcagctgccagcaatcgacctccatccgcagagcactcaccgaaaggtggctctggatatctcctgctctaacagctccacaaaaattgcattcaacacaggcgacaaacattcgagaacagaggtagtacaaaacatgtactgttgtacatgatatgctagtctataatcaagaacgatagcagacgccttcgcaacacgactcaggatacccgcacataggagctgctacagtgaactacctacgtcaaaagatggtgctggcaggattccgctcgaaaagatccctaggatatagtacgaccatagcataccgatgctaggtagagattcttagaccatttgtccttcacatgtttactagggaaattaattgtcctcagtgtctcttgggtttca

SEQ ID NO: 78486 - DNA, 1381 bp, Zea Mays
ctgcccgcgagttcgccgtcgcagtggccgactccttgccctgccaccggcaccaccctgccctgcccgcgagttcgtcgttgcagtcgcctgcagagcgccgcgagttcctcgtctttacctgcccagcgtcgctgcacctccccgtcgccccgtgagttcgccgtcgcagttgcatcttctccgtgcctcctcggattctagcgcgatggaccgaaggccagcgccaaaatcccgtcggtctgcattgaatgccgccataggtacgatttctggaggctggcatccatcgtcacaagataatcgtcgcagccccacgaacgacagtcatgcaacacatgcacaacctgaagctttgtcggcagctgcatctgtgcaaaaccctctggacaacagcattgatgcctcgtggatgcttcctgattacaagtatatcttaattttgtgcagcatactaccctcccaagataactactataggaatctgatgaaccaagatgatacagataatttaggcttggaggattgcgtgcaagttgatcctcttgtagctaatatgaattcccagacaaaaccaaagggccgctcaaaaaatttcactgatgatgaggacattctattgttgtcagtgtatctcaatgttagcaaagatcctactgctggaagggaccaaaaagatagcagattttgggaaagaattgaaaagtattatcatgtcaatttaacatttgaatcagatcgcaattgctcttcattgcgtcatcgatggggtataatccaaaaggaagtaagtcttttccaaagttactatgaagccatacaaaggaagaatgaaagtggaaagacaatgaatgacaagacacgagccaaagtggtcatcaataaaggactccacaatggctaccaagaagctggatcctcacaacggtaatgaagacgatggacatgacacccctagaccaccaggaaggaaagccgagaaagaaaaattgcgagcacggaagcaagaggacaatgacaatgatgcattgatggaagaactaaaaaaattagagagtcaagattggagatagaaaatgatcgaaaggcacgagaagacaagttattagagctggagagtagtaaacttgatcttgagcgtgaacaacgtgacgacaaggtgatgagaaccgacacaagtacaatggatgatgagtcaaaacaatattttaagttagtgaaagaggaaattttggcgcgacgttttgggagaaagcaagattgaggggtcatgttattagagttggttttagtcatactgaacatatttgtattttttctgtctcttcaatatagtatttttcctgaaacgactacaagatctgtttccaatatagtattt

SEQ ID NO: 78487 - DNA, 1409 bp, Zea Mays
cgagtacctacaaccggcccgcgagccctgccaccggcaccgccccaccctgcccgcgagttcgccgtcgcagtggccgactccttgccctgccaccggcaccaccctgccctgcccgcgagttcgtcgttgcagtcgcctgcagagcgccgcgagttcctcgtctttacctgcccagcgtcgctgcacctccccgtcgccccgtgagttcgccgtcgcagttgcatcttctccgtgcctcctcggattctagcgcgatggaccgaaggccagcgccaaaatcccgtcggtctgcattgaatgccgccataggtacgatttctggaggctggcatccatcgtcacaagataatcgtcgcagccccacgaacgacagtcatgcaacacatgcacaacctgaagctttgtcggcagctgcatctgtgcaaaaccctctggacaacagcattgatgcctcgtggatgcttcctgattacaacatactaccctcccaagataactactataggaatctgatgaaccaagatgatacagataatttaggcttggaggattgcgtgcaagttgatcctcttgtagctaatatgaattcccagacaaaaccaaagggccgctcaaaaaatttcactgatgatgaggacattctattgttgtcagtgtatctcaatgttagcaaagatcctactgctggaagggaccaaaaagatagcagattttgggaaagaattgaaaagtattatcatgtcaatttaacatttgaatcagatcgcaattgctcttcattgcgtcatcgatggggtataatccaaaaggaagtaagtcttttccaaagttactatgaagccatacaaaggaagaatgaaagtggaaagacaatgaatgacaagacacgagccaaagtggtcatcaataaaggactccacaatggctaccaagaagctggatcctcacaacggtaatgaagacgatggacatgacacccctagaccaccaggaaggaaagccgagaaagaaaaattgcgagcacggaagcaagaggacaatgacaatgatgcattgatggaagaactaaaaaaattagagagtcaagattggagatagaaaatgatcgaaaggcacgagaagacaagttattagagctggagagtagtaaacttgatcttgagcgtgaacaacgtgacgacaaggtgatgagaaccgacacaagtacaatggatgatgagtcaaaacaatattttaagttagtgaaagaggaaattttggcgcgacgttttgggagaaagcaagattgaggggtcatgttattagagttggttttagtcatactgaacatatttgtattttttctgtctcttcaatatagtatttttcctgaaacgactacaagatctgtttccaatatagtattt

SEQ ID NO: 78488 - DNA, 862 bp, Zea Mays
agctgttcagcatattgatactaaatttcacaagaagtttcatctctgaaagacacaatatcacggaaagatatggaaatcgatcaactcctgaagaacaaagccaaatctccaggttcatcaatagatagaaatgacagtcgccaacagatccggcgactatcagggactggatcaagtgaagccgaatgtgaagataacatgtctgatgatggctgctcagtagcaggaaccgagtattcagtaggtggtgcttcagaggcgacagcagaacggatgcagaaggccccatcaaggatagccaggctattccacacaaagaatggacagcctgcaaactccaaaccaaaaccaagggagtctgctctgaaaccaccaggtcgcacgacatctacaggaggaagccaggcgacaggaggatctttagtgaaaccccctaagaggcggtagagaaataaagattccatcatctaggatttgccatgttgatgggggtatgtgacgatgtcactgtaacgggttcacttgtcatcaccatgatgagcagccgactgtaggctggatgttgtatgagctggacgccatgaggttggtttctcagccctgctgaccatcacgttagttatcgactatgttactgaccatcatcaactttttatctatactatacttaaagcaccagtttcaacggtcgtcccacgtcatctttttacagataacctctcacagctatctcaaattaatctgttgcacgcctataaatggccaaacggcggcccggcacgggccagacgcccgcggaccacaactctggcccaggcatatcatgtcggcctgctgactgtgccgagccagcccgtcg

SEQ ID NO: 78489 - DNA, 3536 bp, Zea Mays
gaaaagctacttgagcctgagcgctgcgcagaattccgtccggcacgaggtggacgagaggagggataaggaacagaagccttcgagctcacgctgatccgcctcccgcattgccttgaagcctctcgattcgggcggacccgagctgccccgcgcggagggctcgatctgggcccagatcggccagcatttcactcccgtgcttgcaagtgcgcgtgcgcggtgaggcactgaggcatggggaaggtggaagacgagtacgagtcccatgcagccaaccggcggggtgaggtgatagattggctcgctgagttgctgccggagttcgacttgccgctggattcctcagacgaggagctgcgggagtacctcattgatggcacggcactatgttacattgcagagaaactaatgcccggcattcaggaggaaatgtggggtggtaatgcatgggatcagaggtcgaacgtgaagaagttcctctattttgttgcggagatggggctgccaggcttcagtgtcaaggatctggaggaggggtctgtgtcttctgtggtggagtgtctcttggctctaaaggataatgtgactacaggattgggtcaaaacgttacaaacaatgctgctaaaacaccccttagaaggaaacttgaacttgaatctgatgggcctataatttcagttatgacaccagggagaagacctggggaggaaagatggaaaggccactgggatcctaagtctcaacaaagaagtattcttcattctggacaaaaggtccatgatgctttccaacttaagcgaggttcctacactgatcttcctgctgccaaagtttcagagatgatgcatccaagaagtctagataatgcccctactcaatcacttcttagagttgttaatggcattctagatgagagcattgagaggaaaagaggagaaataccacatcgtgctgtttacttgctaaggaatgttgttcaagagattgagcaccgcattgctattcaagcggatcacataagaaatcatcatcaagactcgggaagacaagtatcgttcaaaaattaaagcactcgagacattagtaaatggcacaaatgaagaaaatgagatgacagtagatcgacttgagctagttgaggtagaaaaatcaaaacttgatgagaaaagaaaactaggtgaacaagacatggttcggctgatgcaagaaaaggagaatgcagaaaatactattgcttcccttcagcaagaaatacaggtcttgagtaggatgcatgaacagtaccacgagagaaaggaaacagaagccaggcagatggaggaacacttggctatgagacttaaggaggctgagtttcttttaatgcaatcagaaaagaaagttgaagaaattgaatctgtttcccaactgaaatctcaactttggaccaggaaggcaaacattttccagagttttatggataatcaaaaattgtccattaaggacataaggatatcatctcagtccattaagcaggaaatgtttgcccttcaaatgaaatggatagatgaaatatctagcattggacgtgagttgaaaggcttggtagatgctgctgacaattaccataaggttcttgctgaaaatcagaagctatttaatgaggtacaggaactaaaaggcaatatcagggtttattgtcgtgtcagaccatttcttcctggtcaagatggaaaaacaaccattattgattatattggtgaaaatggtgagattctcatcacaaatcccttcaagcaagggaaggatgtgtgtcgaatgttcaagtttaataaagtgtttaatacacatgcttctcaagctgaggtattctctgatatccaacctctgatcagatcagttcttgatgggtttaatgtgtgcatttttgcctatggtcaaactggatccggaaagacttacacaatgagtgggccaggcacatcaaaagaagattggggtgttaactatcgagctttaaatgacttgttcgacatctctctaagtagaaggaatgctttctcatatgaggtgggagtgcagatggttgagatttataacgagcaagtgcgggatcttctctcaaatgatattgcacaaaaaagacttggaatttggagtacatctcagcctaatggacttgttgtccctgatgcaagtttacatccagtcaaatcaacactagatgtgctacagttgatggaaattggacaaacaaatagagcagttggatcaacagctctgaatgaaaggagcagtcgatctcacagcattctgactgtgcatgttagaggggtggatctgaagaatggatctacttccagaggatgtctacatctaattgatcttgctgggagtgaaagagttgagcgatctgaagcaattggagatagattaaaagaagcacagtatattaacaaatccctctctgctcttggtgatgtgattttttctttggcacagaaaaatgcccatgttccttatcgaaacagcaagctgactcaagttctacagagctctttaggtgggcaagcaaagacactgatgtttgttcaaattaatccggatactggatcatattcagaaacaataagcactttgaagtttgctgaaagggtttctggagttgagttaggtgctgcaagaagtaacaaagagggtaaagatataaaagagctgctagaacaggtttcatctctgaaagacacaatatcacggaaagatatggaaatcgatcaactcctgaagaacaaagccaaatctccaggttcatcaatagatagaaatgacagtcgccaacagatccggcgactatcagggactggatcaagtgaagccgaatgtgaagataacatgtctgatgatggctgctcagtagcaggaaccgagtattcagtaggtggtgcttcagaggcgacagcagaacggatgcagaaggccccatcaaggatagccaggctattccacacaaagaatggacagcctgcaaactccaaaccaaaaccaagggagtctgctctgaaaccaccaggtcgcacgacatctacaggaggaagccaggcgacaggaggatctttagtgaaaccccctaagaggcggtagagaaataaagattccatcatctaggatttgccatgttgatgggggtatgtgacgatgtcactgtaacgggttcacttgtcatcaccatgatgagcagccgactgtaggctggatgttgtatgagctggacgccatgaggttggtttctcagccctgctgaccatcacgttagttatcgactatgttactgaccatcatcaactttttatctatactatacttaaagcaccagtttcaacggtcgtcccacgtcatctttttacagataacctctcacagctatctcaaattaatctgttgcacgcctataaatggccaaacggcggcccggcacgggccagacgcccgcggaccacaactctggcccaggcatatcatgtcggcctgctgactgtgccgagccagcccgtcg

SEQ ID NO: 78490 - DNA, 3565 bp, Zea Mays
gaaaagctacttgagcctgagcgctgcgcagaattccgtccggcacgaggtggacgagaggagggataaggaacagaagccttcgagctcacgctgatccgcctcccgcattgccttgaagcctctcgattcgggcggacccgagctgccccgcgcggagggctcgatctgggcccagatcggccagcatttcactcccgtgcttgcaagtgcgcgtgcgcggtgaggcactgaggcatggggaaggtggaagacgagtacgagtcccatgcagccaaccggcggggtgaggtgatagattggctcgctgagttgctgccggagttcgacttgccgctggattcctcagacgaggagctgcgggagtacctcattgatggcacggcactatgttacattgcagagaaactaatgcccggcattcaggaggaaatgtggggtggtaatgcatgggatcagaggtcgaacgtgaagaagttcctctattttgttgcggagatggggctgccaggcttcagtgtcaaggatctggaggaggggtctgtgtcttctgtggtggagtgtctcttggctctaaaggataatgtgactacaggattgggtcaaaacgttacaaacaatgctgctaaaacaccccttagaaggaaacttgaacttgaatctgatgggcctataatttcagttatgacaccagggagaagacctggggaggaaagatggaaaggccactgggatcctaagtctcaacaaagaagtattcttcattctgcatgctcaccttactttgcaggacaaaaggtccatgatgctttccaacttaagcgaggttcctacactgatcttcctgctgccaaagtttcagagatgatgcatccaagaagtctagataatgcccctactcaatcacttcttagagttgttaatggcattctagatgagagcattgagaggaaaagaggagaaataccacatcgtgctgtttacttgctaaggaatgttgttcaagagattgagcaccgcattgctattcaagcggatcacataagaaatcaaaatagcatcatcaagactcgggaagacaagtatcgttcaaaaattaaagcactcgagacattagtaaatggcacaaatgaagaaaatgagatgacagtagatcgacttgagctagttgaggtagaaaaatcaaaacttgatgagaaaagaaaactaggtgaacaagacatggttcggctgatgcaagaaaaggagaatgcagaaaatactattgcttcccttcagcaagaaatacaggtcttgagtaggatgcatgaacagtaccacgagagaaaggaaacagaagccaggcagatggaggaacacttggctatgagacttaaggaggctgagtttcttttaatgcaatcagaaaagaaagttgaagaaattgaatctgtttcccaactgaaatctcaactttggaccaggaaggcaaacattttccagagttttatggataatcaaaaattgtccattaaggacataaggatatcatctcagtccattaagcaggaaatgtttgcccttcaaatgaaatggatagatgaaatatctagcattggacgtgagttgaaaggcttggtagatgctgctgacaattaccataaggttcttgctgaaaatcagaagctatttaatgaggtacaggaactaaaaggcaatatcagggtttattgtcgtgtcagaccatttcttcctggtcaagatggaaaaacaaccattattgattatattggtgaaaatggtgagattctcatcacaaatcccttcaagcaagggaaggatgtgtgtcgaatgttcaagtttaataaagtgtttaatacacatgcttctcaagctgaggtattctctgatatccaacctctgatcagatcagttcttgatgggtttaatgtgtgcatttttgcctatggtcaaactggatccggaaagacttacacaatgagtgggccaggcacatcaaaagaagattggggtgttaactatcgagctttaaatgacttgttcgacatctctctaagtagaaggaatgctttctcatatgaggtgggagtgcagatggttgagatttataacgagcaagtgcgggatcttctctcaaatgatattgcacaaaaaagacttggaatttggagtacatctcagcctaatggacttgttgtccctgatgcaagtttacatccagtcaaatcaacactagatgtgctacagttgatggaaattggacaaacaaatagagcagttggatcaacagctctgaatgaaaggagcagtcgatctcacagcattctgactgtgcatgttagaggggtggatctgaagaatggatctacttccagaggatgtctacatctaattgatcttgctgggagtgaaagagttgagcgatctgaagcaattggagatagattaaaagaagcacagtatattaacaaatccctctctgctcttggtgatgtgattttttctttggcacagaaaaatgcccatgttccttatcgaaacagcaagctgactcaagttctacagagctctttaggtgggcaagcaaagacactgatgtttgttcaaattaatccggatactggatcatattcagaaacaataagcactttgaagtttgctgaaagggtttctggagttgagttaggtgctgcaagaagtaacaaagagggtaaagatataaaagagctgctagaacaggtttcatctctgaaagacacaatatcacggaaagatatggaaatcgatcaactcctgaagaacaaagccaaatctccaggttcatcaatagatagaaatgacagtcgccaacagatccggcgactatcagggactggatcaagtgaagccgaatgtgaagataacatgtctgatgatggctgctcagtagcaggaaccgagtattcagtaggtggtgcttcagaggcgacagcagaacggatgcagaaggccccatcaaggatagccaggctattccacacaaagaatggacagcctgcaaactccaaaccaaaaccaagggagtctgctctgaaaccaccaggtcgcacgacatctacaggaggaagccaggcgacaggaggatctttagtgaaaccccctaagaggcggtagagaaataaagattccatcatctaggatttgccatgttgatgggggtatgtgacgatgtcactgtaacgggttcacttgtcatcaccatgatgagcagccgactgtaggctggatgttgtatgagctggacgccatgaggttggtttctcagccctgctgaccatcacgttagttatcgactatgttactgaccatcatcaactttttatctatactatacttaaagcaccagtttcaacggtcgtcccacgtcatctttttacagataacctctcacagctatctcaaattaatctgttgcacgcctataaatggccaaacggcggcccggcacgggccagacgcccgcggaccacaactctggcccaggcatatcatgtcggcctgctgactgtgccgagccagcccgtcg

SEQ ID NO: 78491 - DNA, 3533 bp, Zea Mays
cacaggacaggacggcagggaaaagctacttgagcctgagcgctgcgcagaattccgtccggcacgaggtggacgagaggagggataaggaacagaagccttcgagctcacgctgatccgcctcccgcattgccttgaagcctctcgattcgggcggacccgagctgccccgcgcggagggctcgatctgggcccagatcggccagcatttcactcccgtgcttgcaagtgcgcgtgcgcggtgaggcactgaggcatggggaaggtggaagacgagtacgagtcccatgcagccaaccggcggggtgaggtgatagattggctcgctgagttgctgccggagttcgacttgccgctggattcctcagacgaggagctgcgggagtacctcattgatggcacggcactatgttacattgcagagaaactaatgcccggcattcaggaggaaatgtggggtggtaatgcatgggatcagaggtcgaacgtgaagaagttcctctattttgttgcggagatggggctgccaggcttcagtgtcaaggatctggaggaggggtctgtgtcttctgtggtggagtgtctcttggctctaaaggataatgtgactacaggattgggtcaaaacgttacaaacaatgctgctaaaacaccccttagaaggaaacttgaacttgaatctgatgggcctataatttcagttatgacaccagggagaagacctggggaggaaagatggaaaggccactgggatcctaagtctcaacaaagaagtattcttcattctggacaaaaggtccatgatgctttccaacttaagcgaggttcctacactgatcttcctgctgccaaagtttcagagatgatgcatccaagaagtctagataatgcccctactcaatcacttcttagagttgttaatggcattctagatgagagcattgagaggaaaagaggagaaataccacatcgtgctgtttacttgctaaggaatgttgttcaagagattgagcaccgcattgctattcaagcggatcacataagaaatcaaaatagcatcatcaagactcgggaagacaagtatcgttcaaaaattaaagcactcgagacattagtaaatggcacaaatgaagaaaatgaggtagaaaaatcaaaacttgatgagaaaagaaaactaggtgaacaagacatggttcggctgatgcaagaaaaggagaatgcagaaaatactattgcttcccttcagcaagaaatacaggtcttgagtaggatgcatgaacagtaccacgagagaaaggaaacagaagccaggcagatggaggaacacttggctatgagacttaaggaggctgagtttcttttaatgcaatcagaaaagaaagttgaagaaattgaatctgtttcccaactgaaatctcaactttggaccaggaaggcaaacattttccagagttttatggataatcaaaaattgtccattaaggacataaggatatcatctcagtccattaagcaggaaatgtttgcccttcaaatgaaatggatagatgaaatatctagcattggacgtgagttgaaaggcttggtagatgctgctgacaattaccataaggttcttgctgaaaatcagaagctatttaatgaggtacaggaactaaaaggcaatatcagggtttattgtcgtgtcagaccatttcttcctggtcaagatggaaaaacaaccattattgattatattggtgaaaatggtgagattctcatcacaaatcccttcaagcaagggaaggatgtgtgtcgaatgttcaagtttaataaagtgtttaatacacatgcttctcaagctgaggtattctctgatatccaacctctgatcagatcagttcttgatgggtttaatgtgtgcatttttgcctatggtcaaactggatccggaaagacttacacaatgagtgggccaggcacatcaaaagaagattggggtgttaactatcgagctttaaatgacttgttcgacatctctctaagtagaaggaatgctttctcatatgaggtgggagtgcagatggttgagatttataacgagcaagtgcgggatcttctctcaaatgatattgcacaaaaaagacttggaatttggagtacatctcagcctaatggacttgttgtccctgatgcaagtttacatccagtcaaatcaacactagatgtgctacagttgatggaaattggacaaacaaatagagcagttggatcaacagctctgaatgaaaggagcagtcgatctcacagcattctgactgtgcatgttagaggggtggatctgaagaatggatctacttccagaggatgtctacatctaattgatcttgctgggagtgaaagagttgagcgatctgaagcaattggagatagattaaaagaagcacagtatattaacaaatccctctctgctcttggtgatgtgattttttctttggcacagaaaaatgcccatgttccttatcgaaacagcaagctgactcaagttctacagagctctttaggtgggcaagcaaagacactgatgtttgttcaaattaatccggatactggatcatattcagaaacaataagcactttgaagtttgctgaaagggtttctggagttgagttaggtgctgcaagaagtaacaaagagggtaaagatataaaagagctgctagaacaggtttcatctctgaaagacacaatatcacggaaagatatggaaatcgatcaactcctgaagaacaaagccaaatctccaggttcatcaatagatagaaatgacagtcgccaacagatccggcgactatcagggactggatcaagtgaagccgaatgtgaagataacatgtctgatgatggctgctcagtagcaggaaccgagtattcagtaggtggtgcttcagaggcgacagcagaacggatgcagaaggccccatcaaggatagccaggctattccacacaaagaatggacagcctgcaaactccaaaccaaaaccaagggagtctgctctgaaaccaccaggtcgcacgacatctacaggaggaagccaggcgacaggaggatctttagtgaaaccccctaagaggcggtagagaaataaagattccatcatctaggatttgccatgttgatgggggtatgtgacgatgtcactgtaacgggttcacttgtcatcaccatgatgagcagccgactgtaggctggatgttgtatgagctggacgccatgaggttggtttctcagccctgctgaccatcacgttagttatcgactatgttactgaccatcatcaactttttatctatactatacttaaagcaccagtttcaacggtcgtcccacgtcatctttttacagataacctctcacagctatctcaaattaatctgttgcacgcctataaatggccaaacggcggcccggcacgggccagacgcccgcggaccacaactctggcccaggcatatcatgtcggcctgctgactgtgccgagccagcccgtcg

SEQ ID NO: 78492 - DNA, 3638 bp, Zea Mays
aaaaaactggtttagggccttttaatcgcgggatttaggtgggatactggatgggggagggaccgcatggtactgcactggccaccggccttaacttgcaagcaaaaacaaaaatcaaaacccaactaaccagcagacccagtgaagcggagaagccacaggacaggacggcagggaaaagctacttgagcctgagcgctgcgcagaattccgtccggcacgaggtggacgagaggagggataaggaacagaagccttcgagctcacgctgatccgcctcccgcattgccttgaagcctctcgattcgggcggacccgagctgccccgcgcggagggctcgatctgggcccagatcggccagcatttcactcccgtgcttgcaagtgcgcgtgcgcggtgaggcactgaggcatggggaaggtggaagacgagtacgagtcccatgcagccaaccggcggggtgaggtgatagattggctcgctgagttgctgccggagttcgacttgccgctggattcctcagacgaggagctgcgggagtacctcattgatggcacggcactatgttacattgcagagaaactaatgcccggcattcaggaggaaatgtggggtggtaatgcatgggatcagaggtcgaacgtgaagaagttcctctattttgttgcggagatggggctgccaggcttcagtgtcaaggatctggaggaggggtctgtgtcttctgtggtggagtgtctcttggctctaaaggataatgtgactacaggattggttatgacaccagggagaagacctggggaggaaagatggaaaggccactgggatcctaagtctcaacaaagaagtattcttcattctggacaaaaggtccatgatgctttccaacttaagcgaggttcctacactgatcttcctgctgccaaagtttcagagatgatgcatccaagaagtctagataatgcccctactcaatcacttcttagagttgttaatggcattctagatgagagcattgagaggaaaagaggagaaataccacatcgtgctgtttacttgctaaggaatgttgttcaagagattgagcaccgcattgctattcaagcggatcacataagaaatcaaaatagcatcatcaagactcgggaagacaagtatcgttcaaaaattaaagcactcgagacattagtaaatggcacaaatgaagaaaatgagatgacagtagatcgacttgagctagttgaggtagaaaaatcaaaacttgatgagaaaagaaaactaggtgaacaagacatggttcggctgatgcaagaaaaggagaatgcagaaaatactattgcttcccttcagcaagaaatacaggtcttgagtaggatgcatgaacagtaccacgagagaaaggaaacagaagccaggcagatggaggaacacttggctatgagacttaaggaggctgagtttcttttaatgcaatcagaaaagaaagttgaagaaattgaatctgtttcccaactgaaatctcaactttggaccaggaaggcaaacattttccagagttttatggataatcaaaaattgtccattaaggacataaggatatcatctcagtccattaagcaggaaatgtttgcccttcaaatgaaatggatagatgaaatatctagcattggacgtgagttgaaaggcttggtagatgctgctgacaattaccataaggttcttgctgaaaatcagaagctatttaatgaggtacaggaactaaaaggcaatatcagggtttattgtcgtgtcagaccatttcttcctggtcaagatggaaaaacaaccattattgattatattggtgaaaatggtgagattctcatcacaaatcccttcaagcaagggaaggatgtgtgtcgaatgttcaagtttaataaagtgtttaatacacatgcttctcaagctgaggtattctctgatatccaacctctgatcagatcagttcttgatgggtttaatgtgtgcatttttgcctatggtcaaactggatccggaaagacttacacaatgagtgggccaggcacatcaaaagaagattggggtgttaactatcgagctttaaatgacttgttcgacatctctctaagtagaaggaatgctttctcatatgaggtgggagtgcagatggttgagatttataacgagcaagtgcgggatcttctctcaaatgatattgcacaaaaaagacttggaatttggagtacatctcagcctaatggacttgttgtccctgatgcaagtttacatccagtcaaatcaacactagatgtgctacagttgatggaaattggacaaacaaatagagcagttggatcaacagctctgaatgaaaggagcagtcgatctcacagcattctgactgtgcatgttagaggggtggatctgaagaatggatctacttccagaggatgtctacatctaattgatcttgctgggagtgaaagagttgagcgatctgaagcaattggagatagattaaaagaagcacagtatattaacaaatccctctctgctcttggtgatgtgattttttctttggcacagaaaaatgcccatgttccttatcgaaacagcaagctgactcaagttctacagagctctttaggtgggcaagcaaagacactgatgtttgttcaaattaatccggatactggatcatattcagaaacaataagcactttgaagtttgctgaaagggtttctggagttgagttaggtgctgcaagaagtaacaaagagggtaaagatataaaagagctgctagaacaggtttcatctctgaaagacacaatatcacggaaagatatggaaatcgatcaactcctgaagaacaaagccaaatctccaggttcatcaatagatagaaatgacagtcgccaacagatccggcgactatcagggactggatcaagtgaagccgaatgtgaagataacatgtctgatgatggctgctcagtagcaggaaccgagtattcagtaggtggtgcttcagaggcgacagcagaacggatgcagaaggccccatcaaggatagccaggctattccacacaaagaatggacagcctgcaaactccaaaccaaaaccaagggagtctgctctgaaaccaccaggtcgcacgacatctacaggaggaagccaggcgacaggaggatctttagtgaaaccccctaagaggcggtagagaaataaagattccatcatctaggatttgccatgttgatgggggtatgtgacgatgtcactgtaacgggttcacttgtcatcaccatgatgagcagccgactgtaggctggatgttgtatgagctggacgccatgaggttggtttctcagccctgctgaccatcacgttagttatcgactatgttactgaccatcatcaactttttatctatactatacttaaagcaccagtttcaacggtcgtcccacgtcatctttttacagataacctctcacagctatctcaaattaatctgttgcacgcctataaatggccaaacggcggcccggcacgggccagacgcccgcggaccacaactctggcccaggcatatcatgtcggcctgctgactgtgccgagccagcccgtcg

SEQ ID NO: 78493 - DNA, 2308 bp, Zea Mays
ctagagccggcctaccgcggggtacgtggcgacacctctcctgcaacgtgtccggcgcggacgacaggcatcgccgtcgccgtcacccaatggcctcggtgtccgtcgtgctgctacagcgctcctcctcgcgcgtccgaggatatatacggctccagcgcatcgccagctcttcagttacgttggttttggagggcgaggggcattggtggtggagcaacagccgcggccgcgacgagaggtttggcgcaagaacggtgcaccatatggcgggatcagtagagggggaaaacggcggcgtgccggtgggtggtcaagttgcgatggcgccgggcgtggtgaccggcggtgtggaggatgcctatggcgaggaccgcgcgaccgaggaccagactgtcacaccgtgggccgtctgcatcgcaagtggtcactccctgctgagggatccaaggcacaacaaagggctctctttcacggagaaagagcgggacacgcactacctgcgaggattattgcctccggtagtgctatctcaggacctccaggagaagaggatgttgcagaatgttaggcagttccaggtcccgttgcagcgctacactgcgctaatggaccttcaggagagaaatgagaggctattttacaagctcttgattgacaatgtcgaagaactgcttcctgttgtgtatacaccaacagtgggggaagcttgccagaagtatgggtcgatcttcagacgaccgcagggtttatacatcagcctcaaggagaagggaaggatcttggaggtactgaggaactggacagagaagagtattcaggttattgtggtcactgatggtgagcgcattttaggcctgggagatcttggttgccagggcatgggaattcctgtggggaagcttgcactgtatactgctcttggaggtgtacggccatccgcttgcttacctattaccattgatgtgggaacaaataatgaagacctactgaaggatgaattctacattggcttaaagcaaagaagagcaactggccaggaatactctgaatttctggatgagtttatggccgcagttaggcagaactatggacaaaaagttcttgtccagtttgaggactttgcaaaccacaatgcatttacacttcttgagaagtacaggacaaaccatcttgtatttaatgatgatatccagggcacggctgctgtagttcttgcagggattattgctgctctgaagtctgttggtgggactctagctgatcatacattcttgttcttcggtgcaggagaggctggtacgggcattgctgaactagttgctctcgagatatccagacaggcaaatgtttcagtagaagaggctcgcaaaaagatctggctggttgattcaaagggactaattgtggcctcacgtgaagagactctccagccatttaagaagcgatatgcacatgagcatgaacctgtcaaagatcttttaggtgctgttaaggctatcagaccaactgcactcataggatcagctggtgtaggtcaaagtttcactaaagaggtgattgaggttatgtcttcgattaatgagagacccattgtccttgctctatcgaacccgacgtcacagtctgaatgtactgctgaacaagcatatacatggagtcaggcaaacaatgcatacattttccctgggtttggtctaggggtggtgatctcaggagccgtccgggtgtcagacgatatggttcttgctgctgctgaagcactagcggaacaggtaaccccggagcatattgagaaaggcctgatctacccgcccttctccatcatcaggaagatttcagctaacatagctgcccatgtcgccgcaaaagcttatgatctcggaatggctacccagctccctcggccaaaagacctggtgaagtacgctgagagctgcatgtacagccccgtctaccgatcgtacaggtgatgtgagcggacagtgctggatgcacctgaggatatatatgcatacctgctatgcttgttgttcatgtcgtcactgtgacgagtccgctgctgatactgcacgtgcgtactctatgtatgtagctgtgtaataaagttcaggggatgtaaattgacactcctaccaagtatgctgatgtatgttctcatgcgtgtcggggtttcttatacatggtttgtgttagatttagtatgaagatgacctctattttatttgatacaaatcgaataaattgtaggtttatattaaggccatgttcgtttttcttctaggattattattataatccagtttct

SEQ ID NO: 78494 - DNA, 2385 bp, Zea Mays
ctagagccggcctaccgcggggtacgtggcgacacctctcctgcaacgtgtccggcgcggacgacaggcatcgccgtcgccgtcacccaatggcctcggtgtccgtcgtgctgctacagcgctcctcctcgcgcgtccgaggatatatacggctccagcgcatcgccagctcttcagttacgttggttttggagggcgaggggcattggtggtggagcaacagccgcggccgcgacgagaggtttggcgcaagaacggtgcaccatatggcgggatcagtagagggggaaaacggcggcgtgccggtgggtggtcaagttgcgatggcgccgggcgtggtgaccggcggtgtggaggatgcctatggcgaggaccgcgcgaccgaggaccagactgtcacaccgtgggccgtctgcatcgcaagtggtcactccctgctgagggatccaaggcacaacaaagggctctctttcacggagaaagagcgggacacgcactacctgcgaggattattgcctccggtagtgctatctcaggacctccaggagaagaggatgttgcagaatgttaggcagttccaggtcccgttgcagcgctacactgcgctaatggaccttcaggagagaaatgagaggctattttacaagctcttgattgacaatgtcgaagaactgcttcctgttgtgtatacaccaacagtgggggaagcttgccagaagtatgggtcgatcttcagacgaccgcagggtttatacatcagcctcaaggagaagggaaggatcttggaggtactgaggaactggacagagaagagtattcaggttattgtggtcactgatggtgagcgcattttaggcctgggagatcttggttgccagggcatgggaattcctgtggggaagcttgcactgtatactgctcttggaggtgtacggccatccgctgtgagctttaacatgtgaatatacagttttaaattagtctatacctactgaaggatgaattctacattggcttaaagcaaagaagagcaactggccaggaatactctgaatttctggatgagtttatggccgcagttaggcagaactatggacaaaaagttcttgtccagtttgaggactttgcaaaccacaatgcatttacacttcttgagaagtacaggacaaaccatcttgtatttaatgatgatatccagggcacggctgctgtagttcttgcagggattattgctgctctgaagtctgttggtgggactctagctgatcatacattcttgttcttcggtgcaggagaggctggtacgggcattgctgaactagttgctctcgagatatccagacaggcaaatgtttcagtagaagaggctcgcaaaaagatctggctggttgattcaaagggactaattgtggcctcacgtgaagagactctccagccatttaagaagcgatatgcacatgagcatgaacctgtcaaagatcttttaggtgctgttaaggctatcagaccaactgcactcataggatcagctggtgtaggtcaaagtttcactaaagaggtgattgaggttatgtcttcgattaatgagagacccattgtccttgctctatcgaacccgacgtcacagtctgaatgtactgctgaacaagcatatacatggagtcaggggcgtgccatatttggcagtggaagcccatttgatccggtgaaatataatgacaagctgtttgtgcctgcccaggcaaacaatgcatacattttccctgggtttggtctaggggtggtgatctcaggagccgtccgggtgtcagacgatatggttcttgctgctgctgaagcactagcggaacaggtaaccccggagcatattgagaaaggcctgatctacccgcccttctccatcatcaggaagatttcagctaacatagctgcccatgtcgccgcaaaagcttatgatctcggaatggctacccagctccctcggccaaaagacctggtgaagtacgctgagagctgcatgtacagccccgtctaccgatcgtacaggtgatgtgagcggacagtgctggatgcacctgaggatatatatgcatacctgctatgcttgttgttcatgtcgtcactgtgacgagtccgctgctgatactgcacgtgcgtactctatgtatgtagctgtgtaataaagttcaggggatgtaaattgacactcctaccaagtatgctgatgtatgttctcatgcgtgtcggggtttcttatacatggtttgtgttagatttagtatgaagatgacctctattttatttgatacaaatcgaataaattgtaggtttatattaaggccatgttcgtttttcttctaggattattattataatccagtttct

SEQ ID NO: 78495 - DNA, 2397 bp, Zea Mays
ctagagccggcctaccgcggggtacgtggcgacacctctcctgcaacgtgtccggcgcggacgacaggcatcgccgtcgccgtcacccaatggcctcggtgtccgtcgtgctgctacagcgctcctcctcgcgcgtccgaggatatatacggctccagcgcatcgccagctcttcagttacgttggttttggagggcgaggggcattggtggtggagcaacagccgcggccgcgacgagaggtttggcgcaagaacggtgcaccatatggcgggatcagtagagggggaaaacggcggcgtgccggtgggtggtcaagttgcgatggcgccgggcgtggtgaccggcggtgtggaggatgcctatggcgaggaccgcgcgaccgaggaccagactgtcacaccgtgggccgtctgcatcgcaagtggtcactccctgctgagggatccaaggcacaacaaagggctctctttcacggagaaagagcgggacacgcactacctgcgaggattattgcctccggtagtgctatctcaggacctccaggagaagaggatgttgcagaatgttaggcagttccaggtcccgttgcagcgctacactgcgctaatggaccttcaggagagaaatgagaggctattttacaagctcttgattgacaatgtcgaagaactgcttcctgttgtgtatacaccaacagtgggggaagcttgccagaagtatgggtcgatcttcagacgaccgcagggtttatacatcagcctcaaggagaagggaaggatcttggaggtactgaggaactggacagagaagagtattcaggttattgtggtcactgatggtgagcgcattttaggcctgggagatcttggttgccagggcatgggaattcctgtggggaagcttgcactgtatactgctcttggaggtgtacggccatccgctgtgagctttaacattgcttacctattaccattgatgtgggaacaaataatgaagacctactgaaggatgaattctacattggcttaaagcaaagaagagcaactggccaggaatactctgaatttctggatgagtttatggccgcagttaggcagaactatggacaaaaagttcttgtccagtttgaggactttgcaaaccacaatgcatttacacttcttgagaagtacaggacaaaccatcttgtatttaatgatgatatccagggcacggctgctgtagttcttgcagggattattgctgctctgaagtctgttggtgggactctagctgatcatacattcttgttcttcggtgcaggagaggctggtacgggcattgctgaactagttgctctcgagatatccagacaggcaaatgtttcagtagaagaggctcgcaaaaagatctggctggttgattcaaagggactaattgtggcctcacgtgaagagactctccagccatttaagaagcgatatgcacatgagcatgaacctgtcaaagatcttttaggtgctgttaaggctatcagaccaactgcactcataggatcagctggtgtaggtcaaagtttcactaaagaggtgattgaggttatgtcttcgattaatgagagacccattgtccttgctctatcgaacccgacgtcacagtctgaatgtactgctgaacaagcatatacatggagtcaggggcgtgccatatttggcagtggaagcccatttgatccggtgaaatataatgacaagctgtttgtgcctgcccaggcaaacaatgcatacattttccctgggtttggtctaggggtggtgatctcaggagccgtccgggtgtcagacgatatggttcttgctgctgctgaagcactagcggaacaggtaaccccggagcatattgagaaaggcctgatctacccgcccttctccatcatcaggaagatttcagctaacatagctgcccatgtcgccgcaaaagcttatgatctcggaatggctacccagctccctcggccaaaagacctggtgaagtacgctgagagctgcatgtacagccccgtctaccgatcgtacaggtgatgtgagcggacagtgctggatgcacctgaggatatatatgcatacctgctatgcttgttgttcatgtcgtcactgtgacgagtccgctgctgatactgcacgtgcgtactctatgtatgtagctgtgtaataaagttcaggggatgtaaattgacactcctaccaagtatgctgatgtatgttctcatgcgtgtcggggtttcttatacatggtttgtgttagatttagtatgaagatgacctctattttatttgatacaaatcgaataaattgtaggtttatattaaggccatgttcgtttttcttctaggattattattataatccagtttct

SEQ ID NO: 78496 - DNA, 2346 bp, Zea Mays
ctagagccggcctaccgcggggtacgtggcgacacctctcctgcaacgtgtccggcgcggacgacaggcatcgccgtcgccgtcacccaatggcctcggtgtccgtcgtgctgctacagcgctcctcctcgcgcgtccgaggatatatacggctccagcgcatcgccagctcttcagttacgttggttttggagggcgaggggcattggtggtggagcaacagccgcggccgcgacgagaggtttggcgcaagaacggtgcaccatatggcgggatcagtagagggggaaaacggcggcgtgccggtgggtggtcaagttgcgatggcgccgggcgtggtgaccggcggtgtggaggatgcctatggcgaggaccgcgcgaccgaggaccagactgtcacaccgtgggccgtctgcatcgcaagtggtcactccctgctgagggatccaaggcacaacaaagggctctctttcacggagaaagagcgggacacgcactacctgcgaggattattgcctccggtagtgctatctcaggacctccaggagaagaggatgttgcagaatgttaggcagttccaggtcccgttgcagcgctacactgcgctaatggaccttcaggagagaaatgagaggctattttacaagctcttgattgacaatgtcgaagaactgcttcctgttgtgtatacaccaacagtgggggaagcttgccagaagtatgggtcgatcttcagacgaccgcagggtttatacatcagcctcaaggagaagggaaggatcttggaggtactgaggaactggacagagaagagtattcaggttattgtggtcactgatggtgagcgcattttaggcctgggagatcttggttgccagggcatgggaattcctgtggggaagcttgcactgtatactgctcttggaggtgtacggccatccgcttgcttacctattaccattgatgtgggaacaaataatgaagacctactgaaggatgaattctacattggcttaaagcaaagaagagcaactggccaggaatactctgaatttctggatgagtttatggccgcagttaggcagaactatggacaaaaagttcttgtccagtttgaggactttgcaaaccacaatgcatttacacttcttgagaagtacaggacaaaccatcttgtatttaatgatgatatccagggcacggctgctgtagttcttgcagggattattgctgctctgaagtctgttggtgggactctagctgatcatacattcttgttcttcggtgcaggagaggctggtacgggcattgctgaactagttgctctcgagatatccagacaggcaaatgtttcagtagaagaggctcgcaaaaagatctggctggttgattcaaagggactaattgtggcctcacgtgaagagactctccagccatttaagaagcgatatgcacatgagcatgaacctgtcaaagatcttttaggtgctgttaaggctatcagaccaactgcactcataggatcagctggtgtaggtcaaagtttcactaaagaggtgattgaggttatgtcttcgattaatgagagacccattgtccttgctctatcgaacccgacgtcacagtctgaatgtactgctgaacaagcatatacatggagtcaggggcgtgccatatttggcagtggaagcccatttgatccggtgaaatataatgacaagctgtttgtgcctgcccaggggtggtgatctcaggagccgtccgggtgtcagacgatatggttcttgctgctgctgaagcactagcggaacaggtaaccccggagcatattgagaaaggcctgatctacccgcccttctccatcatcaggaagatttcagctaacatagctgcccatgtcgccgcaaaagcttatgatctcggaatggctacccagctccctcggccaaaagacctggtgaagtacgctgagagctgcatgtacagccccgtctaccgatcgtacaggtgatgtgagcggacagtgctggatgcacctgaggatatatatgcatacctgctatgcttgttgttcatgtcgtcactgtgacgagtccgctgctgatactgcacgtgcgtactctatgtatgtagctgtgtaataaagttcaggggatgtaaattgacactcctaccaagtatgctgatgtatgttctcatgcgtgtcggggtttcttatacatggtttgtgttagatttagtatgaagatgacctctattttatttgatacaaatcgaataaattgtaggtttatattaaggccatgttcgtttttcttctaggattattattataatccagtttct

SEQ ID NO: 78497 - DNA, 2487 bp, Zea Mays
gtgagaatggcatgaagcgagggaaggggtgaaccttatatgctatttgattcacatatttgtaacataacagccagttttgaaaaatcagagggcaagacattctagagccggcctaccgcggggtacgtggcgacacctctcctgcaacgtgtccggcgcggacgacaggcatcgccgtcgccgtcacccaatggcctcggtgtccgtcgtgctgctacagcgctcctcctcgcgcgtccgaggatatatacggctccagcgcatcgccagctcttcagttacgttggttttggagggcgaggggcattggtggtggagcaacagccgcggccgcgacgagaggtttggcgcaagaacggtgcaccatatggcgggatcagtagagggggaaaacggcggcgtgccggtgggtggtcaagttgcgatggcgccgggcgtggtgaccggcggtgtggaggatgcctatggcgaggaccgcgcgaccgaggaccagactgtcacaccgtgggccgtctgcatcgcaagtggtcactccctgctgagggatccaaggcacaacaaagggctctctttcacggagaaagagcgggacacgcactacctgcgaggattattgcctccggtagtgctatctcaggacctccaggagaagaggatgttgcagaatgttaggcagttccaggtcccgttgcagcgctacactgcgctaatggaccttcaggagagaaatgagaggctattttacaagctcttgattgacaatgtcgaagaactgcttcctgttgtgtatacaccaacagtgggggaagcttgccagaagtatgggtcgatcttcagacgaccgcagggtttatacatcagcctcaaggagaagggaaggatcttggaggtactgaggaactggacagagaagagtattcaggttattgtggtcactgatggtgagcgcattttaggcctgggagatcttggttgccagggcatgggaattcctgtggggaagcttgcactgtatactgctcttggaggtgtacggccatccgcttgcttacctattaccattgatgtgggaacaaataatgaagacctactgaaggatgaattctacattggcttaaagcaaagaagagcaactggccaggaatactctgaatttctggatgagtttatggccgcagttaggcagaactatggacaaaaagttcttgtccagtttgaggactttgcaaaccacaatgcatttacacttcttgagaagtacaggacaaaccatcttgtatttaatgatgatatccagggcacggctgctgtagttcttgcagggattattgctgctctgaagtctgttggtgggactctagctgatcatacattcttgttcttcggtgcaggagaggctggtacgggcattgctgaactagttgctctcgagatatccagacaggcaaatgtttcagtagaagaggctcgcaaaaagatctggctggttgattcaaagggactaattgtggcctcacgtgaagagactctccagccatttaagaagcgatatgcacatgagcatgaacctgtcaaagatcttttaggtgctgttaaggctatcagaccaactgcactcataggatcagctggtgtaggtcaaagtttcactaaagaggtgattgaggttatgtcttcgattaatgagagacccattgtccttgctctatcgaacccgacgtcacagtctgaatgtactgctgaacaagcatatacatggagtcaggggcgtgccatatttggcagtggaagcccatttgatccggtgaaatataatgacaagctgtttgtgcctgcccaggcaaacaatgcatacattttccctgggtttggtctaggggtggtgatctcaggagccgtccgggtgtcagacgatatggttcttgctgctgctgaagcactagcggaacaggtaaccccggagcatattgagaaaggcctgatctacccgcccttctccatcatcaggaagatttcagctaacatagctgcccatgtcgccgcaaaagcttatgatctcggaatggctacccagctccctcggccaaaagacctggtgaagtacgctgagagctgcatgtacagccccgtctaccgatcgtacaggtgatgtgagcggacagtgctggatgcacctgaggatatatatgcatacctgctatgcttgttgttcatgtcgtcactgtgacgagtccgctgctgatactgcacgtgcgtactctatgtatgtagctgtgtaataaagttcaggggatgtaaattgacactcctaccaagtatgctgatgtatgttctcatgcgtgtcggggtttcttatacatggtttgtgttagatttagtatgaagatgacctctattttatttgatacaaatcgaataaattgtaggtttatattaaggccatgttcgtttttcttctaggattattattataatccagtttct

SEQ ID NO: 78498 - DNA, 3080 bp, Zea Mays
gctgttcctgtttgcgacactccctgctaccactcagccgagccgagtagccgaccgaatcggcgtctcctccctccgcagctccgtttctccgacgcgctcagccgccggctaaccatctcaattctcacgacgtcaccgcctagtcgccctcactgacgacgcggcgccatgcctcctccccaggatggggtcgatgactccgcggcgcgggtcccgctcctcccgccccctgctccgcgccgcgcggccgtgaggctgcacccgctcccgctcctcatcgccgcgacactggcggcctcctaccgcctcctcttcctcgcgcccgcgccatcctactaccagtccctcctcctctccctcggttccaacgacaccgccgccgcccacctgcacgcgctcaccatccgcccccacctagcgggcacgggcgccaacgccctcgccgccgcgcacgtcgccgccacgctctcctcccactccttccggacccgcctcacgagctactccgtgctcctctcctaccctgcgtaccgctctctctcactctccgcgccggatcgcgacactgtgctcttcgctttgaagcaggaaacctacgcaggcgacccttacgaggcggtctccgccgaggccgtccccaccttcctcgcctacgcggcctccggttcggtctccgccgaggccgtctacgccaactacggccgcgcagaagatttcgcttacctcgccgcccgcggcatcgacgtcaccgggaaggtcgccgtcgcgcgctacggcgaagtgttccgcggcgacatcgtcaggaacgcgcgggatgccggcgccgccgcggcggtgatttactccgacgcgaaggactacgcggccgggaagaccttcccggacggaccgtggatgccgccgacaggcgtgcaggtgggtagcacgttcaagggggtgggggaccccacaacgccgatgtgggcgtcgtcggagggctgcgagcgcctgaccatcgcggaggcgatgagctccgatgacatgccggggataccggcgctgccggtgtcctggaaggatggggagaccatactacagctcatcggcggcgatgtggcgcccgagaattggcaaggaggcgatggcgcggcggcctataggtttgggcctggcccggcagtgctcaatctgacctacacagggaatgagacgatggttactattcagaatgtcatttcggtgattgaagggggagaagaacctgaacggtatgatcaaaatccccaatcaccttacccccaatacctccttccaaactccaatttaggtaaggggcactgtatcatctacagtacaaatccgtctgtgggctcaagcattcagcctgaatgcgatggatggaaatttaaccttcgttaggtgaatgtgactagcaaaattgaagtgtatgagacactttttttctttgaacagtgtgtatggcacactttttcattgaaacggtgtgctcacacacactaaaagtatttgtaatcatactacagaggcagagttatggaactttgggtggctagtgatgaaacagtcaccatgaaccacttagtgttaaagatatatcacagatcttgtatggtatttcgaactacttagtcgcttacaaattgcaatctcattctttgaaagtttaaaaaaatctgtacaaattctgtgcaattatcattctaaaacatgcaggtatgtaatccttggaaatcaccgtgatgcatggacatttggggcagttgatccgaacagcgggacagcatccttgcttgagctcaacggttgtctgagctgcaaaagaagggctggagacctcgacggaccatcatcttgtgcaactgggatgccgaagaacaggatccactgaatgggtcgaggagaacagggcaatgctaacttcaagaactgttgcttacctaaatgttgattctgcagtggctggtcatggattttatgcatctgcaactcctcaacttgatgaattgcttaaagaagctagtaagcaggtccaaaatccggacaatgggacacagagtctctatgatttgtggatgtcttctaacagttctcctttgattggaagattaggagggggaagttcggattattctgcatttgttcaacacattggtattccatcagtggacatggcgattgggtcagactatccggtctatcatagcttgtatgatgacttcatatggatggaaaagtttggagatcccttgttccagaggcatgttgcagctgcaagcatgtgggggcttgttgctcttaggctctcagatgaggagatcctacccttcaactacagcaattatgccacagagcttgagaatggagcattgggcataagtgaaagagtacagggaatgcctgtcagcttatcacccctgcacaagtcaatcaaagagttcagaaaggcagttgcaaaagtggattctgaattgaaggctctacagacatggaaaatttggtccccatggagaaacaaccccttaaaggtcagagacatcaatgatcggttgatgatgaccgaacgggcattcacagaccgggaaggactgtctggacggccatggtacaaacacctgatttacgcaccttcgctgcacaacgattacggggctgaagtgtatccaggcattggtgacgccattgagagggtgaagaaaacaaatacttctgaatccttgcaatctatacaacatgagatttacagggtctctcgagtcataaaccaggcagcgcttgttttaagtggagggctcacgtgaatgcagtagctggactgatacagtattgcatagtatggtgatattaaggggaaaaataaatttcactggcagtcattacatttgtgccgagttcttattttgattctggtacctataaattgcatattactctttccaaacttatccggttcctattttaaatcgtattctcaaaatttgtcatgggttcttatttcaaatttcaataaacactcggctccataaacttattgttatagtatcccggtcaatatcccatctccctgcactacggtctac

SEQ ID NO: 78499 - DNA, 2484 bp, Zea Mays
gctgttcctgtttgcgacactccctgctaccactcagccgagccgagtagccgaccgaatcggcgtctcctccctccgcagctccgtttctccgacgcgctcagccgccggctaaccatctcaattctcacgacgtcaccgcctagtcgccctcactgacgacgcggcgccatgcctcctcttcctcgcgcccgcgccatcctactaccagtccctcctcctctccctcggttccaacgacaccgccgccgcccacctgcacgcgctcaccatccgcccccacctagcgggcacgggcgccaacgccctcgccgccgcgcacgtcgccgccacgctctcctcccactccttccggacccgcctcacgagctactccgtgctcctctcctaccctgcgtaccgctctctctcactctccgcgccggatcgcgacactgtgctcttcgctttgaagcaggaaacctacgcaggcgacccttacgaggcggtctccgccgaggccgtccccaccttcctcgcctacgcggcctccggttcggtctccgccgaggccgtctacgccaactacggccgcgcagaagatttcgcttacctcgccgcccgcggcatcgacgtcaccgggaaggtcgccgtcgcgcgctacggcgaagtgttccgcggcgacatcgtcaggaacgcgcgggatgccggcgccgccgcggcggtgatttactccgacgcgaaggactacgcggccgggaagaccttcccggacggaccgtggatgccgccgacaggcgtgcaggtgggtagcacgttcaagggggtgggggaccccacaacgccgatgtgggcgtcgtcggagggctgcgagcgcctgaccatcgcggaggcgatgagctccgatgacatgccggggataccggcgctgccggtgtcctggaaggatggggagaccatactacagctcatcggcggcgatgtggcgcccgagaattggcaaggaggcgatggcgcggcggcctataggtttgggcctggcccggcagtgctcaatctgacctacacagggaatgagacgatggttactattcagaatgtcatttcggtgattgaagggggagaagaacctgaacggtatgtaatccttggaaatcaccgtgatgcatggacatttggggcagttgatccgaacagcgggacagcatccttgcttgagctagctcaacggttgtctgagctgcaaaagaagggctggagacctcgacggaccatcatcttgtgcaactgggatgccgaagaacaggatccactgaatgggtcgaggagaacagggcaatgctaacttcaagaactgttgcttacctaaatgttgattctgcagtggctggtcatggattttatgcatctgcaactcctcaacttgatgaattgcttaaagaagctagtaagcaggtccaaaatccggacaatgggacacagagtctctatgatttgtggatgtcttctaacagttctcctttgattggaagattaggagggggaagttcggattattctgcatttgttcaacacattggtattccatcagtggacatggcgattgggtcagactatccggtctatcatagcttgtatgatgacttcatatggatggaaaagtttggagatcccttgttccagaggcatgttgcagctgcaagcatgtgggggcttgttgctcttaggctctcagatgaggagatcctacccttcaactacagcaattatgccacagagcttgagaatggagcattgggcataagtgaaagagtacagggaatgcctgtcagcttatcacccctgcacaagtcaatcaaagagttcagaaaggcagttgcaaaagtggattctgaattgaaggctctacagacatggaaaatttggtccccatggagaaacaaccccttaaaggtcagagacatcaatgatcggttgatgatgaccgaacgggcattcacagaccgggaaggactgtctggacggccatggtacaaacacctgatttacgcaccttcgctgcacaacgattacggggctgaagtgtatccaggcattggtgacgccattgagagggtgaagaaaacaaatacttctgaatccttgcaatctatacaacatgagatttacagggtctctcgagtcataaaccaggcagcgcttgttttaagtggagggctcacgtgaatgcagtagctggactgatacagtattgcatagtatggtgatattaaggggaaaaataaatttcactggcagtcattacatttgtgccgagttcttattttgattctggtacctataaattgcatattactctttccaaacttatccggttcctattttaaatcgtattctcaaaatttgtcatgggttcttatttcaaatttcaataaacactcggctccataaacttattgttatagtatcccggtcaatatcccatctccctgcactacggtctac

SEQ ID NO: 78500 - DNA, 2758 bp, Zea Mays
gctgttcctgtttgcgacactccctgctaccactcagccgagccgagtagccgaccgaatcggcgtctcctccctccgcagctccgtttctccgacgcgctcagccgccggctaaccatctcaattctcacgacgtcaccgcctagtcgccctcactgacgacgcggcgccatgcctcctcttcctcgcgcccgcgccatcctactaccagtccctcctcctctccctcggttccaacgacaccgccgccgcccacctgcacgcgctcaccatccgcccccacctagcgggcacgggcgccaacgccctcgccgccgcgcacgtcgccgccacgctctcctcccactccttccggacccgcctcacgagctactccgtgctcctctcctaccctgcgtaccgctctctctcactctccgcgccggatcgcgacactgtgctcttcgctttgaagcaggaaacctacgcaggcgacccttacgaggcggtctccgccgaggccgtccccaccttcctcgcctacgcggcctccggttcggtctccgccgaggccgtctacgccaactacggccgcgcagaagatttcgcttacctcgccgcccgcggcatcgacgtcaccgggaaggtcgccgtcgcgcgctacggcgaagtgttccgcggcgacatcgtcaggaacgcgcgggatgccggcgccgccgcggcggtgatttactccgacgcgaaggactacgcggccgggaagaccttcccggacggaccgtggatgccgccgacaggcgtgcaggtgggtagcacgttcaagggggtgggggaccccacaacgccgatgtgggcgtcgtcggagggctgcgagcgcctgaccatcgcggaggcgatgagctccgatgacatgccggggataccggcgctgccggtgtcctggaaggatggggagaccatactacagctcatcggcggcgatgtggcgcccgagaattggcaaggaggcgatggcgcggcggcctataggtttgggcctggcccggcagtgctcaatctgacctacacagtgagtggctcttttttgggaaatttggattcataccattaaaagatcaccacttttgatccataccattactatctcacttacatgtgggtccacatgagtcaatgacatatggggtccatggtatatatctaaagtttggatcttttaatggtatagatccaattgttccctctttttatgtgcaggagttgacttgggacaggggaacttggaaaggacagagaacatcttattttcctatttgttgttttctttgcataggggaatgagacgatggttactattcagaatgtcatttcggtgattgaagggggagaagaacctgaacggtatgtaatccttggaaatcaccgtgatgcatggacatttggggcagttgatccgaacagcgggacagcatccttgcttgagctagctcaacggttgtctgagctgcaaaagaagggctggagacctcgacggaccatcatcttgtgcaactgggatgccgaagagtatggattgacaggatccactgaatgggtcgaggagaacagggcaatgctaacttcaagaactgttgcttacctaaatgttgattctgcagtggctggtcatggattttatgcatctgcaactcctcaacttgatgaattgcttaaagaagctagtaagcaggtccaaaatccggacaatgggacacagagtctctatgatttgtggatgtcttctaacagttctcctttgattggaagattaggagggggaagttcggattattctgcatttgttcaacacattggtattccatcagtggacatggcgattgggtcagactatccggtctatcatagcttgtatgatgacttcatatggatggaaaagtttggagatcccttgttccagaggcatgttgcagctgcaagcatgtgggggcttgttgctcttaggctctcagatgaggagatcctacccttcaactacagcaattatgccacagagcttgagaatggagcattgggcataagtgaaagagtacagggaatgcctgtcagcttatcacccctgcacaagtcaatcaaagagttcagaaaggcagttgcaaaagtggattctgaattgaaggctctacagacatggaaaatttggtccccatggagaaacaaccccttaaaggtcagagacatcaatgatcggttgatgatgaccgaacgggcattcacagaccgggaaggactgtctggacggccatggtacaaacacctgatttacgcaccttcgctgcacaacgattacggggctgaagtgtatccaggcattggtgacgccattgagagggtgaagaaaacaaatacttctgaatccttgcaatctatacaacatgagatttacagggtctctcgagtcataaaccaggcagcgcttgttttaagtggagggctcacgtgaatgcagtagctggactgatacagtattgcatagtatggtgatattaaggggaaaaataaatttcactggcagtcattacatttgtgccgagttcttattttgattctggtacctataaattgcatattactctttccaaacttatccggttcctattttaaatcgtattctcaaaatttgtcatgggttcttatttcaaatttcaataaacactcggctccataaacttattgttatagtatcccggtcaatatcccatctccctgcactacggtctac

SEQ ID NO: 78501 - DNA, 3069 bp, Zea Mays
gctgttcctgtttgcgacactccctgctaccactcagccgagccgagtagccgaccgaatcggcgtctcctccctccgcagctccgtttctccgacgcgctcagccgccggctaaccatctcaattctcacgacgtcaccgcctagtcgccctcactgacgacgcggcgccatgcctcctcttcctcgcgcccgcgccatcctactaccagtccctcctcctctccctcggttccaacgacaccgccgccgcccacctgcacgcgctcaccatccgcccccacctagcgggcacgggcgccaacgccctcgccgccgcgcacgtcgccgccacgctctcctcccactccttccggacccgcctcacgagctactccgtgctcctctcctaccctgcgtaccgctctctctcactctccgcgccggatcgcgacactgtgctcttcgctttgaagcaggaaacctacgcaggcgacccttacgaggcggtctccgccgaggccgtccccaccttcctcgcctacgcggcctccggttcggtctccgccgaggccgtctacgccaactacggccgcgcagaagatttcgcttacctcgccgcccgcggcatcgacgtcaccgggaaggtcgccgtcgcgcgctacggcgaagtgttccgcggcgacatcgtcaggaacgcgcgggatgccggcgccgccgcggcggtgatttactccgacgcgaaggactacgcggccgggaagaccttcccggacggaccgtggatgccgccgacaggcgtgcaggtgggtagcacgttcaagggggtgggggaccccacaacgccgatgtgggcgtcgtcggagggctgcgagcgcctgaccatcgcggaggcgatgagctccgatgacatgccggggataccggcgctgccggtgtcctggaaggatggggagaccatactacagctcatcggcggcgatgtggcgcccgagaattggcaaggaggcgatggcgcggcggcctataggtttgggcctggcccggcagtgctcaatctgacctacacagggaatgagacgatggttactattcagaatgtcatttcggtgattgaagggggagaagaacctgaacggtatgatcaaaatccccaatcaccttacccccaatacctccttccaaactccaatttaggtaaggggcactgtatcatctacagtacaaatccgtctgtgggctcaagcattcagcctgaatgcgatggatggaaatttaaccttcgttaggtgaatgtgactagcaaaattgaagtgtatgagacactttttttctttgaacagtgtgtatggcacactttttcattgaaacggtgtgctcacacacactaaaagtatttgtaatcatactacagaggcagagttatggaactttgggtggctagtgatgaaacagtcaccatgaaccacttagtgttaaagatatatcacagatcttgtatgtaatccttggaaatcaccgtgatgcatggacatttggggcagttgatccgaacagcgggacagcatccttgcttgagctcaacggttgtctgagctgcaaaagaagggctggagacctcgacggaccatcatcttgtgcaactgggatgccgaagagtatggattgacaggatccactgaatgggtcgaggagaacagggcaatgctaacttcaagaactgttgcttacctaaatgttgattctgcagtggctggtcatggattttatgcatctgcaactcctcaacttgatgaattgcttaaagaagctagtaagcaggtccaaaatccggacaatgggacacagagtctctatgatttgtggatgtcttctaacagttctcctttggtaagtagttaatgttagctaaaacccattcctttttcttaacacaagcttgtcttccacttccagtatttcaagtggttagcatgtaaagggaatcgtagacctagttttattttgtctttgttccaagttcaggctgtgttgcttttgctgcattagatgcaagtttaagatttgttatgtattaatgagggttctattgacaaacgtatgcattaagattggaagattaggagggggaagttcggattattctgcatttgttcaacacattggtattccatcagtggacatggcgattgggtcagactatccggtctatcatagcttgtatgatgacttcatatggatggaaaagtttggagatcccttgttccagaggcatgttgcagctgcaagcatgtgggggcttgttgctcttaggctctcagatgaggagatcctacccttcaactacagcaattatgccacagagcttgagaatggagcattgggcataagtgaaagagtacagggaatgcctgtcagcttatcacccctgcacaagtcaatcaaagagttcagaaaggcagttgcaaaagtggattctgaattgaaggctctacagacatggaaaatttggtccccatggagaaacaaccccttaaaggtcagagacatcaatgatcggttgatgatgaccgaacgggcattcacagaccgggaaggactgtctggacggccatggtacaaacacctgatttacgcaccttcgctgcacaacgattacggggctgaagtgtatccaggcattggtgacgccattgagagggtgaagaaaacaaatacttctgaatccttgcaatctatacaacatgagatttacagggtctctcgagtcataaaccaggcagcgcttgttttaagtggagggctcacgtgaatgcagtagctggactgatacagtattgcatagtatggtgatattaaggggaaaaataaatttcactggcagtcattacatttgtgccgagttcttattttgattctggtacctataaattgcatattactctttccaaacttatccggttcctattttaaatcgtattctcaaaatttgtcatgggttcttatttcaaatttcaataaacactcggctccataaacttattgttatagtatcccggtcaatatcccatctccctgcactacggtctac

SEQ ID NO: 78502 - DNA, 3036 bp, Zea Mays
gctgttcctgtttgcgacactccctgctaccactcagccgagccgagtagccgaccgaatcggcgtctcctccctccgcagctccgtttctccgacgcgctcagccgccggctaaccatctcaattctcacgacgtcaccgcctagtcgccctcactgacgacgcggcgccatgcctcctcttcctcgcgcccgcgccatcctactaccagtccctcctcctctccctcggttccaacgacaccgccgccgcccacctgcacgcgctcaccatccgcccccacctagcgggcacgggcgccaacgccctcgccgccgcgcacgtcgccgccacgctctcctcccactccttccggacccgcctcacgagctactccgtgctcctctcctaccctgcgtaccgctctctctcactctccgcgccggatcgcgacactgtgctcttcgctttgaagcaggaaacctacgcaggcgacccttacgaggcggtctccgccgaggccgtccccaccttcctcgcctacgcggcctccggttcggtctccgccgaggccgtctacgccaactacggccgcgcagaagatttcgcttacctcgccgcccgcggcatcgacgtcaccgggaaggtcgccgtcgcgcgctacggcgaagtgttccgcggcgacatcgtcaggaacgcgcgggatgccggcgccgccgcggcggtgatttactccgacgcgaaggactacgcggccgggaagaccttcccggacggaccgtggatgccgccgacaggcgtgcaggtgggtagcacgttcaagggggtgggggaccccacaacgccgatgtgggcgtcgtcggagggctgcgagcgcctgaccatcgcggaggcgatgagctccgatgacatgccggggataccggcgctgccggtgtcctggaaggatggggagaccatactacagctcatcggcggcgatgtggcgcccgagaattggcaaggaggcgatggcgcggcggcctataggtttgggcctggcccggcagtgctcaatctgacctacacagagttgacttgggacaggggaacttggaaaggacagagaacatcttattttcctatttgttgttttctttgcataggggaatgagacgatggttactattcagaatgtcatttcggtgattgaagggggagaagaacctgaacggtatgatcaaaatccccaatcaccttacccccaatacctccttccaaactccaatttaggtaaggggcactgtatcatctacagtacaaatccgtctgtgggctcaagcattcagcctgaatgcgatggatggaaatttaaccttcgttaggtgaatgtgactagcaaaattgaagtgtatgagacactttttttctttgaacagtgtgtatggcacactttttcattgaaacggtgtgctcacacacactaaaagtatttgtaatcatactacagaggcagagttatggaactttgggtggctagtgatgaaacagtcaccatgaaccacttagtgttaaagatatatcacagatcttgtatggtatttcgaactacttagtcgcttacaaattgcaatctcattctttgaaagtttaaaaaaatctgtacaaattctgtgcaattatcattctaaaacatgcaggtatgtaatccttggaaatcaccgtgatgcatggacatttggggcagttgatccgaacagcgggacagcatccttgcttgagctagctcaacggttgtctgagctgcaaaagaagggctggagacctcgacggaccatcatcttgtgcaactgggatgccgaagagtatggattgacaggatccactgaatgggtcgaggagaacagggcaatgctaacttcaagaactgttgcttacctaaatgttgattctgcagtggctggtcatggattttatgcatctgcaactcctcaacttgatgaattgcttaaagaagctagtaagcaggtccaaaatccggacaatgggacacagagtctctatgatttgtggatgtcttctaacagttctcctttgattggaagattaggagggggaagttcggattattctgcatttgttcaacacattggtattccatcagtggacatggcgattgggtcagactatccggtctatcatagcttgtatgatgacttcatatggatggaaaagtttggagatcccttgttccagaggcatgttgcagctgcaagcatgtgggggcttgttgctcttaggctctcagatgaggagatcctacccttcaactacagcaattatgccacagagcttgagaatggagcattgggcataagtgaaagagtacagggaatgcctgtcagcttatcacccctgcacaagtcaatcaaagagttcagaaaggcagttgcaaaagtggattctgaattgaaggctctacagacatggaaaatttggtccccatggagaaacaaccccttaaaggtcagagacatcaatgatcggttgatgatgaccgaacgggcattcacagaccgggaaggactgtctggacggccatggtacaaacacctgatttacgcaccttcgctgcacaacgattacggggctgaagtgtatccaggcattggtgacgccattgagagggtgaagaaaacaaatacttctgaatccttgcaatctatacaacatgagatttacagggtctctcgagtcataaaccaggcagcgcttgttttaagtggagggctcacgtgaatgcagtagctggactgatacagtattgcatagtatggtgatattaaggggaaaaataaatttcactggcagtcattacatttgtgccgagttcttattttgattctggtacctataaattgcatattactctttccaaacttatccggttcctattttaaatcgtattctcaaaatttgtcatgggttcttatttcaaatttcaataaacactcggctccataaacttattgttatagtatcccggtcaatatcccatctccctgcactacggtctac

SEQ ID NO: 78503 - DNA, 3170 bp, Zea Mays
gctgttcctgtttgcgacactccctgctaccactcagccgagccgagtagccgaccgaatcggcgtctcctccctccgcagctccgtttctccgacgcgctcagccgccggctaaccatctcaattctcacgacgtcaccgcctagtcgccctcactgacgacgcggcgccatgcctcctcttcctcgcgcccgcgccatcctactaccagtccctcctcctctccctcggttccaacgacaccgccgccgcccacctgcacgcgctcaccatccgcccccacctagcgggcacgggcgccaacgccctcgccgccgcgcacgtcgccgccacgctctcctcccactccttccggacccgcctcacgagctactccgtgctcctctcctaccctgcgtaccgctctctctcactctccgcgccggatcgcgacactgtgctcttcgctttgaagcaggaaacctacgcaggcgacccttacgaggcggtctccgccgaggccgtccccaccttcctcgcctacgcggcctccggttcggtctccgccgaggccgtctacgccaactacggccgcgcagaagatttcgcttacctcgccgcccgcggcatcgacgtcaccgggaaggtcgccgtcgcgcgctacggcgaagtgttccgcggcgacatcgtcaggaacgcgcgggatgccggcgccgccgcggcggtgatttactccgacgcgaaggactacgcggccgggaagaccttcccggacggaccgtggatgccgccgacaggcgtgcaggtgggtagcacgttcaagggggtgggggaccccacaacgccgatgtgggcgtcgtcggagggctgcgagcgcctgaccatcgcggaggcgatgagctccgatgacatgccggggataccggcgctgccggtgtcctggaaggatggggagaccatactacagctcatcggcggcgatgtggcgcccgagaattggcaaggaggcgatggcgcggcggcctataggtttgggcctggcccggcagtgctcaatctgacctacacagggaatgagacgatggttactattcagaatgtcatttcggtgattgaagggggagaagaacctgaacggtatgatcaaaatccccaatcaccttacccccaatacctccttccaaactccaatttaggtaaggggcactgtatcatctacagtacaaatccgtctgtgggctcaagcattcagcctgaatgcgatggatggaaatttaaccttcgttaggtgaatgtgactagcaaaattgaagtgtatgagacactttttttctttgaacagtgtgtatggcacactttttcattgaaacggtgtgctcacacacactaaaagtatttgtaatcatactacagaggcagagttatggaactttgggtggctagtgatgaaacagtcaccatgaaccacttagtgttaaagatatatcacagatcttgtatggtatttcgaactacttagtcgcttacaaattgcaatctcattctttgaaagtttaaaaaaatctgtacaaattctgtgcaattatcattctaaaacatgcaggtatgtaatccttggaaatcaccgtgatgcatggacatttggggcagttgatccgaacagcgggacagcatccttgcttgagctagctcaacggttgtctgagctgcaaaagaagggctggagacctcgacggaccatcatcttgtgcaactgggatgccgaagaacaggatccactgaatgggtcgaggagaacagggcaatgctaacttcaagaactgttgcttacctaaatgttgattctgcagtggctggtcatggattttatgcatctgcaactcctcaacttgatgaattgcttaaagaagctagtaagcaggtccaaaatccggacaatgggacacagagtctctatgatttgtggatgtcttctaacagttctcctttggtaagtagttaatgttagctaaaacccattcctttttcttaacacaagcttgtcttccacttccagtatttcaagtggttagcatgtaaagggaatcgtagacctagttttattttgtctttgttccaagttcaggctgtgttgcttttgctgcattagatgcaagtttaagatttgttatgtattaatgagggttctattgacaaacgtatgcattaagattggaagattaggagggggaagttcggattattctgcatttgttcaacacattggtattccatcagtggacatggcgattgggtcagactatccggtctatcatagcttgtatgatgacttcatatggatggaaaagtttggagatcccttgttccagaggcatgttgcagctgcaagcatgtgggggcttgttgctcttaggctctcagatgaggagatcctacccttcaactacagcaattatgccacagagcttgagaatggagcattgggcataagtgaaagagtacagggaatgcctgtcagcttatcacccctgcacaagtcaatcaaagagttcagaaaggcagttgcaaaagtggattctgaattgaaggctctacagacatggaaaatttggtccccatggagaaacaaccccttaaaggtcagagacatcaatgatcggttgatgatgaccgaacgggcattcacagaccgggaaggactgtctggacggccatggtacaaacacctgatttacgcaccttcgctgcacaacgattacggggctgaagtgtatccaggcattggtgacgccattgagagggtgaagaaaacaaatacttctgaatccttgcaatctatacaacatgagatttacagggtctctcgagtcataaaccaggcagcgcttgttttaagtggagggctcacgtgaatgcagtagctggactgatacagtattgcatagtatggtgatattaaggggaaaaataaatttcactggcagtcattacatttgtgccgagttcttattttgattctggtacctataaattgcatattactctttccaaacttatccggttcctattttaaatcgtattctcaaaatttgtcatgggttcttatttcaaatttcaataaacactcggctccataaacttattgttatagtatcccggtcaatatcccatctccctgcactacggtctac

SEQ ID NO: 78504 - DNA, 2624 bp, Zea Mays
gctgttcctgtttgcgacactccctgctaccactcagccgagccgagtagccgaccgaatcggcgtctcctccctccgcagctccgtttctccgacgcgctcagccgccggctaaccatctcaattctcacgacgtcaccgcctagtcgccctcactgacgacgcggcgccatgcctcctccccaggatggggtcgatgactccgcggcgcgggtcccgctcctcccgccccctgctccgcgccgcgcggccgtgaggctgcacccgctcccgctcctcatcgccgcgacactggcggcctcctaccgcctcctcttcctcgcgcccgcgccatcctactaccagtccctcctcctctccctcggttccaacgacaccgccgccgcccacctgcacgcgctcaccatccgcccccacctagcgggcacgggcgccaacgccctcgccgccgcgcacgtcgccgccacgctctcctcccactccttccggacccgcctcacgagctactccgtgctcctctcctaccctgcgtaccgctctctctcactctccgcgccggatcgcgacactgtgctcttcgctttgaagcaggaaacctacgcaggcgacccttacgaggcggtctccgccgaggccgtccccaccttcctcgcctacgcggcctccggttcggtctccgccgaggccgtctacgccaactacggccgcgcagaagatttcgcttacctcgccgcccgcggcatcgacgtcaccgggaaggtcgccgtcgcgcgctacggcgaagtgttccgcggcgacatcgtcaggaacgcgcgggatgccggcgccgccgcggcggtgatttactccgacgcgaaggactacgcggccgggaagaccttcccggacggaccgtggatgccgccgacaggcgtgcaggtgggtagcacgttcaagggggtgggggaccccacaacgccgatgtgggcgtcgtcggagggctgcgagcgcctgaccatcgcggaggcgatgagctccgatgacatgccggggataccggcgctgccggtgtcctggaaggatggggagaccatactacagctcatcggcggcgatgtggcgcccgagaattggcaaggaggcgatggcgcggcggcctataggtttgggcctggcccggcagtgctcaatctgacctacacagggaatgagacgatggttactattcagaatgtcatttcggtgattgaagggggagaagaacctgaacggtatgtaatccttggaaatcaccgtgatgcatggacatttggggcagttgatccgaacagcgggacagcatccttgcttgagctcaacggttgtctgagctgcaaaagaagggctggagacctcgacggaccatcatcttgtgcaactgggatgccgaagagtatggattgacaggatccactgaatgggtcgaggagaacagggcaatgctaacttcaagaactgttgcttacctaaatgttgattctgcagtggctggtcatggattttatgcatctgcaactcctcaacttgatgaattgcttaaagaagctagtaagcaggtccaaaatccggacaatgggacacagagtctctatgatttgtggatgtcttctaacagttctcctttgattggaagattaggagggggaagttcggattattctgcatttgttcaacacattggtattccatcagtggacatggcgattgggtcagactatccggtctatcatagcttgtatgatgacttcatatggatggaaaagtttggagatcccttgttccagaggcatgttgcagctgcaagcatgtgggggcttgttgctcttaggctctcagatgaggagatcctacccttcaactacagcaattatgccacagagcttgagaatggagcattgggcataagtgaaagagtacagggaatgcctgtcagcttatcacccctgcacaagtcaatcaaagagttcagaaaggcagttgcaaaagtggattctgaattgaaggctctacagacatggaaaatttggtccccatggagaaacaaccccttaaaggtcagagacatcaatgatcggttgatgatgaccgaacgggcattcacagaccgggaaggactgtctggacggccatggtacaaacacctgatttacgcaccttcgctgcacaacgattacggggctgaagtgtatccaggcattggtgacgccattgagagggtgaagaaaacaaatacttctgaatccttgcaatctatacaacatgagatttacagggtctctcgagtcataaaccaggcagcgcttgttttaagtggagggctcacgtgaatgcagtagctggactgatacagtattgcatagtatggtgatattaaggggaaaaataaatttcactggcagtcattacatttgtgccgagttcttattttgattctggtacctataaattgcatattactctttccaaacttatccggttcctattttaaatcgtattctcaaaatttgtcatgggttcttatttcaaatttcaataaacactcggctccataaacttattgttatagtatcccggtcaatatcccatctccctgcactacggtctac

SEQ ID NO: 78505 - DNA, 3026 bp, Zea Mays
gctgttcctgtttgcgacactccctgctaccactcagccgagccgagtagccgaccgaatcggcgtctcctccctccgcagctccgtttctccgacgcgctcagccgccggctaaccatctcaattctcacgacgtcaccgcctagtcgccctcactgacgacgcggcgccatgcctcctcttcctcgcgcccgcgccatcctactaccagtccctcctcctctccctcggttccaacgacaccgccgccgcccacctgcacgcgctcaccatccgcccccacctagcgggcacgggcgccaacgccctcgccgccgcgcacgtcgccgccacgctctcctcccactccttccggacccgcctcacgagctactccgtgctcctctcctaccctgcgtaccgctctctctcactctccgcgccggatcgcgacactgtgctcttcgctttgaagcaggaaacctacgcaggcgacccttacgaggcggtctccgccgaggccgtccccaccttcctcgcctacgcggcctccggttcggtctccgccgaggccgtctacgccaactacggccgcgcagaagatttcgcttacctcgccgcccgcggcatcgacgtcaccgggaaggtcgccgtcgcgcgctacggcgaagtgttccgcggcgacatcgtcaggaacgcgcgggatgccggcgccgccgcggcggtgatttactccgacgcgaaggactacgcggccgggaagaccttcccggacggaccgtggatgccgccgacaggcgtgcaggtgggtagcacgttcaagggggtgggggaccccacaacgccgatgtgggcgtcgtcggagggctgcgagcgcctgaccatcgcggaggcgatgagctccgatgacatgccggggataccggcgctgccggtgtcctggaaggatggggagaccatactacagctcatcggcggcgatgtggcgcccgagaattggcaaggaggcgatggcgcggcggcctataggtttgggcctggcccggcagtgctcaatctgacctacacagagttgacttgggacaggggaacttggaaaggacagagaacatcttattttcctatttgttgttttctttgcataggggaatgagacgatggttactattcagaatgtcatttcggtgattgaagggggagaagaacctgaacggtatgatcaaaatccccaatcaccttacccccaatacctccttccaaactccaatttaggtaaggggcactgtatcatctacagtacaaatccgtctgtgggctcaagcattcagcctgaatgcgatggatggaaatttaaccttcgttaggtgaatgtgactagcaaaattgaagtgtatgagacactttttttctttgaacagtgtgtatggcacactttttcattgaaacggtgtgctcacacacactaaaagtatttgtaatcatactacagaggcagagttatggaactttgggtggctagtgatgaaacagtcaccatgaaccacttagtgttaaagatatatcacagatcttgtatggtatttcgaactacttagtcgcttacaaattgcaatctcattctttgaaagtttaaaaaaatctgtacaaattctgtgcaattatcattctaaaacatgcaggtatgtaatccttggaaatcaccgtgatgcatggacatttggggcagttgatccgaacagcgggacagcatccttgcttgagctagctcaacggttgtctgagctgcaaaagaagggctggagacctcgacggaccatcatcttgtgcaactgggatgccgaagaacaggatccactgaatgggtcgaggagaacagggcaatgctaacttcaagaactgttgcttacctaaatgttgattctgcagtggctggtcatggattttatgcatctgcaactcctcaacttgatgaattgcttaaagaagctagtaagcaggtccaaaatccggacaatgggacacagagtctctatgatttgtggatgtcttctaacagttctcctttgattggaagattaggagggggaagttcggattattctgcatttgttcaacacattggtattccatcagtggacatggcgattgggtcagactatccggtctatcatagcttgtatgatgacttcatatggatggaaaagtttggagatcccttgttccagaggcatgttgcagctgcaagcatgtgggggcttgttgctcttaggctctcagatgaggagatcctacccttcaactacagcaattatgccacagagcttgagaatggagcattgggcataagtgaaagagtacagggaatgcctgtcagcttatcacccctgcacaagtcaatcaaagagttcagaaaggcagttgcaaaagtggattctgaattgaaggctctacagacatggaaaatttggtccccatggagaaacaaccccttaaaggtcagagacatcaatgatcggttgatgatgaccgaacgggcattcacagaccgggaaggactgtctggacggccatggtacaaacacctgatttacgcaccttcgctgcacaacgattacggggctgaagtgtatccaggcattggtgacgccattgagagggtgaagaaaacaaatacttctgaatccttgcaatctatacaacatgagatttacagggtctctcgagtcataaaccaggcagcgcttgttttaagtggagggctcacgtgaatgcagtagctggactgatacagtattgcatagtatggtgatattaaggggaaaaataaatttcactggcagtcattacatttgtgccgagttcttattttgattctggtacctataaattgcatattactctttccaaacttatccggttcctattttaaatcgtattctcaaaatttgtcatgggttcttatttcaaatttcaataaacactcggctccataaacttattgttatagtatcccggtcaatatcccatctccctgcactacggtctac

SEQ ID NO: 78506 - DNA, 2677 bp, Zea Mays
gctgttcctgtttgcgacactccctgctaccactcagccgagccgagtagccgaccgaatcggcgtctcctccctccgcagctccgtttctccgacgcgctcagccgccggctaaccatctcaattctcacgacgtcaccgcctagtcgccctcactgacgacgcggcgccatgcctcctccccaggatggggtcgatgactccgcggcgcgggtcccgctcctcccgccccctgctccgcgccgcgcggccgtgaggctgcacccgctcccgctcctcatcgccgcgacactggcggcctcctaccgcctcctcttcctcgcgcccgcgccatcctactaccagtccctcctcctctccctcggttccaacgacaccgccgccgcccacctgcacgcgctcaccatccgcccccacctagcgggcacgggcgccaacgccctcgccgccgcgcacgtcgccgccacgctctcctcccactccttccggacccgcctcacgagctactccgtgctcctctcctaccctgcgtaccgctctctctcactctccgcgccggatcgcgacactgtgctcttcgctttgaagcaggaaacctacgcaggcgacccttacgaggcggtctccgccgaggccgtccccaccttcctcgcctacgcggcctccggttcggtctccgccgaggccgtctacgccaactacggccgcgcagaagatttcgcttacctcgccgcccgcggcatcgacgtcaccgggaaggtcgccgtcgcgcgctacggcgaagtgttccgcggcgacatcgtcaggaacgcgcgggatgccggcgccgccgcggcggtgatttactccgacgcgaaggactacgcggccgggaagaccttcccggacggaccgtggatgccgccgacaggcgtgcaggtgggtagcacgttcaagggggtgggggaccccacaacgccgatgtgggcgtcgtcggagggctgcgagcgcctgaccatcgcggaggcgatgagctccgatgacatgccggggataccggcgctgccggtgtcctggaaggatggggagaccatactacagctcatcggcggcgatgtggcgcccgagaattggcaaggaggcgatggcgcggcggcctataggtttgggcctggcccggcagtgctcaatctgacctacacagggaatgagacgatggttactattcagaatgtcatttcggtgattgaagggggagaagaacctgaacggtatgatcaaaatccccaatcaccttacccccaatacctccttccaaactccaatttaggtatgtaatccttggaaatcaccgtgatgcatggacatttggggcagttgatccgaacagcgggacagcatccttgcttgagctagctcaacggttgtctgagctgcaaaagaagggctggagacctcgacggaccatcatcttgtgcaactgggatgccgaagaacaggatccactgaatgggtcgaggagaacagggcaatgctaacttcaagaactgttgcttacctaaatgttgattctgcagtggctggtcatggattttatgcatctgcaactcctcaacttgatgaattgcttaaagaagctagtaagcaggtccaaaatccggacaatgggacacagagtctctatgatttgtggatgtcttctaacagttctcctttgattggaagattaggagggggaagttcggattattctgcatttgttcaacacattggtattccatcagtggacatggcgattgggtcagactatccggtctatcatagcttgtatgatgacttcatatggatggaaaagtttggagatcccttgttccagaggcatgttgcagctgcaagcatgtgggggcttgttgctcttaggctctcagatgaggagatcctacccttcaactacagcaattatgccacagagcttgagaatggagcattgggcataagtgaaagagtacagggaatgcctgtcagcttatcacccctgcacaagtcaatcaaagagttcagaaaggcagttgcaaaagtggattctgaattgaaggctctacagacatggaaaatttggtccccatggagaaacaaccccttaaaggtcagagacatcaatgatcggttgatgatgaccgaacgggcattcacagaccgggaaggactgtctggacggccatggtacaaacacctgatttacgcaccttcgctgcacaacgattacggggctgaagtgtatccaggcattggtgacgccattgagagggtgaagaaaacaaatacttctgaatccttgcaatctatacaacatgagatttacagggtctctcgagtcataaaccaggcagcgcttgttttaagtggagggctcacgtgaatgcagtagctggactgatacagtattgcatagtatggtgatattaaggggaaaaataaatttcactggcagtcattacatttgtgccgagttcttattttgattctggtacctataaattgcatattactctttccaaacttatccggttcctattttaaatcgtattctcaaaatttgtcatgggttcttatttcaaatttcaataaacactcggctccataaacttattgttatagtatcccggtcaatatcccatctccctgcactacggtctac

SEQ ID NO: 78507 - DNA, 2910 bp, Zea Mays
gctgttcctgtttgcgacactccctgctaccactcagccgagccgagtagccgaccgaatcggcgtctcctccctccgcagctccgtttctccgacgcgctcagccgccggctaaccatctcaattctcacgacgtcaccgcctagtcgccctcactgacgacgcggcgccatgcctcctcttcctcgcgcccgcgccatcctactaccagtccctcctcctctccctcggttccaacgacaccgccgccgcccacctgcacgcgctcaccatccgcccccacctagcgggcacgggcgccaacgccctcgccgccgcgcacgtcgccgccacgctctcctcccactccttccggacccgcctcacgagctactccgtgctcctctcctaccctgcgtaccgctctctctcactctccgcgccggatcgcgacactgtgctcttcgctttgaagcaggaaacctacgcaggcgacccttacgaggcggtctccgccgaggccgtccccaccttcctcgcctacgcggcctccggttcggtctccgccgaggccgtctacgccaactacggccgcgcagaagatttcgcttacctcgccgcccgcggcatcgacgtcaccgggaaggtcgccgtcgcgcgctacggcgaagtgttccgcggcgacatcgtcaggaacgcgcgggatgccggcgccgccgcggcggtgatttactccgacgcgaaggactacgcggccgggaagaccttcccggacggaccgtggatgccgccgacaggcgtgcaggtgggtagcacgttcaagggggtgggggaccccacaacgccgatgtgggcgtcgtcggagggctgcgagcgcctgaccatcgcggaggcgatgagctccgatgacatgccggggataccggcgctgccggtgtcctggaaggatggggagaccatactacagctcatcggcggcgatgtggcgcccgagaattggcaaggaggcgatggcgcggcggcctataggggaatgagacgatggttactattcagaatgtcatttcggtgattgaagggggagaagaacctgaacggtatgatcaaaatccccaatcaccttacccccaatacctccttccaaactccaatttaggtaaggggcactgtatcatctacagtacaaatccgtctgtgggctcaagcattcagcctgaatgcgatggatggaaatttaaccttcgttaggtgaatgtgactagcaaaattgaagtgtatgagacactttttttctttgaacagtgtgtatggcacactttttcattgaaacggtgtgctcacacacactaaaagtatttgtaatcatactacagaggcagagttatggaactttgggtggctagtgatgaaacagtcaccatgaaccacttagtgttaaagatatatcacagatcttgtatggtatttcgaactacttagtcgcttacaaattgcaatctcattctttgaaagtttaaaaaaatctgtacaaattctgtgcaattatcattctaaaacatgcaggtatgtaatccttggaaatcaccgtgatgcatggacatttggggcagttgatccgaacagcgggacagcatccttgcttgagctagctcaacggttgtctgagctgcaaaagaagggctggagacctcgacggaccatcatcttgtgcaactgggatgccgaagaacaggatccactgaatgggtcgaggagaacagggcaatgctaacttcaagaactgttgcttacctaaatgttgattctgcagtggctggtcatggattttatgcatctgcaactcctcaacttgatgaattgcttaaagaagctagtaagcaggtccaaaatccggacaatgggacacagagtctctatgatttgtggatgtcttctaacagttctcctttgattggaagattaggagggggaagttcggattattctgcatttgttcaacacattggtattccatcagtggacatggcgattgggtcagactatccggtctatcatagcttgtatgatgacttcatatggatggaaaagtttggagatcccttgttccagaggcatgttgcagctgcaagcatgtgggggcttgttgctcttaggctctcagatgaggagatcctacccttcaactacagcaattatgccacagagcttgagaatggagcattgggcataagtgaaagagtacagggaatgcctgtcagcttatcacccctgcacaagtcaatcaaagagttcagaaaggcagttgcaaaagtggattctgaattgaaggctctacagacatggaaaatttggtccccatggagaaacaaccccttaaaggtcagagacatcaatgatcggttgatgatgaccgaacgggcattcacagaccgggaaggactgtctggacggccatggtacaaacacctgatttacgcaccttcgctgcacaacgattacggggctgaagtgtatccaggcattggtgacgccattgagagggtgaagaaaacaaatacttctgaatccttgcaatctatacaacatgagatttacagggtctctcgagtcataaaccaggcagcgcttgttttaagtggagggctcacgtgaatgcagtagctggactgatacagtattgcatagtatggtgatattaaggggaaaaataaatttcactggcagtcattacatttgtgccgagttcttattttgattctggtacctataaattgcatattactctttccaaacttatccggttcctattttaaatcgtattctcaaaatttgtcatgggttcttatttcaaatttcaataaacactcggctccataaacttattgttatagtatcccggtcaatatcccatctccctgcactacggtctac

SEQ ID NO: 78508 - DNA, 3212 bp, Zea Mays
cgaaaacgttcaccgcccccaagctgttcctgtttgcgacactccctgctaccactcagccgagccgagtagccgaccgaatcggcgtctcctccctccgcagctccgtttctccgacgcgctcagccgccggctaaccatctcaattctcacgacgtcaccgcctagtcgccctcactgacgacgcggcgccatgcctcctcttcctcgcgcccgcgccatcctactaccagtccctcctcctctccctcggttccaacgacaccgccgccgcccacctgcacgcgctcaccatccgcccccacctagcgggcacgggcgccaacgccctcgccgccgcgcacgtcgccgccacgctctcctcccactccttccggacccgcctcacgagctactccgtgctcctctcctaccctgcgtaccgctctctctcactctccgcgccggatcgcgacactgtgctcttcgctttgaagcaggaaacctacgcaggcgacccttacgaggcggtctccgccgaggccgtccccaccttcctcgcctacgcggcctccggttcggtctccgccgaggccgtctacgccaactacggccgcgcagaagatttcgcttacctcgccgcccgcggcatcgacgtcaccgggaaggtcgccgtcgcgcgctacggcgaagtgttccgcggcgacatcgtcaggaacgcgcgggatgccggcgccgccgcggcggtgatttactccgacgcgaaggactacgcggccgggaagaccttcccggacggaccgtggatgccgccgacaggcgtgcaggtgggtagcacgttcaagggggtgggggaccccacaacgccgatgtgggcgtcgtcggagggctgcgagcgcctgaccatcgcggaggcgatgagctccgatgacatgccggggataccggcgctgccggtgtcctggaaggatggggagaccatactacagctcatcggcggcgatgtggcgcccgagaattggcaaggaggcgatggcgcggcggcctataggtttgggcctggcccggcagtgctcaatctgacctacacagagttgacttgggacaggggaacttggaaaggacagagaacatcttattttcctatttgttgttttctttgcataggggaatgagacgatggttactattcagaatgtcatttcggtgattgaagggggagaagaacctgaacggtatgatcaaaatccccaatcaccttacccccaatacctccttccaaactccaatttaggtaaggggcactgtatcatctacagtacaaatccgtctgtgggctcaagcattcagcctgaatgcgatggatggaaatttaaccttcgttaggtgaatgtgactagcaaaattgaagtgtatgagacactttttttctttgaacagtgtgtatggcacactttttcattgaaacggtgtgctcacacacactaaaagtatttgtaatcatactacagaggcagagttatggaactttgggtggctagtgatgaaacagtcaccatgaaccacttagtgttaaagatatatcacagatcttgtatgtaatccttggaaatcaccgtgatgcatggacatttggggcagttgatccgaacagcgggacagcatccttgcttgagctcaacggttgtctgagctgcaaaagaagggctggagacctcgacggaccatcatcttgtgcaactgggatgccgaagagtatggattgacaggatccactgaatgggtcgaggagaacagggcaatgctaacttcaagaactgttgcttacctaaatgttgattctgcagtggctggtcatggattttatgcatctgcaactcctcaacttgatgaattgcttaaagaagctagtaagcaggtccaaaatccggacaatgggacacagagtctctatgatttgtggatgtcttctaacagttctcctttggtaagtagttaatgttagctaaaacccattcctttttcttaacacaagcttgtcttccacttccagtatttcaagtggttagcatgtaaagggaatcgtagacctagttttattttgtctttgttccaagttcaggctgtgttgcttttgctgcattagatgcaagtttaagatttgttatgtattaatgagggttctattgacaaacgtatgcattaagattggaagattaggagggggaagttcggattattctgcatttgttcaacacattggtattccatcagtggacatggcgattgggtcagactatccggtctatcatagcttgtatgatgacttcatatggatggaaaagtttggagatcccttgttccagaggcatgttgcagctgcaagcatgtgggggcttgttgctcttaggctctcagatgaggagatcctacccttcaactacagcaattatgccacagagcttgagtaagtccaaaatttgagaatcgtgacagttggtccttgttatcagaatggagcattgggcataagtgaaagagtacagggaatgcctgtcagcttatcacccctgcacaagtcaatcaaagagttcagaaaggcagttgcaaaagtggattctgaattgaaggctctacagacatggaaaatttggtccccatggagaaacaaccccttaaaggtcagagacatcaatgatcggttgatgatgaccgaacgggcattcacagaccgggaaggactgtctggacggccatggtacaaacacctgatttacgcaccttcgctgcacaacgattacggggctgaagtgtatccaggcattggtgacgccattgagagggtgaagaaaacaaatacttctgaatccttgcaatctatacaacatgagatttacagggtctctcgagtcataaaccaggcagcgcttgttttaagtggagggctcacgtgaatgcagtagctggactgatacagtattgcatagtatggtgatattaaggggaaaaataaatttcactggcagtcattacatttgtgccgagttcttattttgattctggtacctataaattgcatattactctttccaaacttatccggttcctattttaaatcgtattctcaaaatttgtcatgggttcttatttcaaatttcaataaacactcggctccataaacttattgttatagtatcccggtcaatatcccatctccctgcactacggtctac

SEQ ID NO: 78509 - DNA, 2529 bp, Zea Mays
ctgatcccgcgaacgaaaacgttcaccgcccccaagctgttcctgtttgcgacactccctgctaccactcagccgagccgagtagccgaccgaatcggcgtctcctccctccgcagctccgtttctccgacgcgctcagccgccggctaaccatctcaattctcacgacgtcaccgcctagtcgccctcactgacgacgcggcgccatgcctcctcttcctcgcgcccgcgccatcctactaccagtccctcctcctctccctcggttccaacgacaccgccgccgcccacctgcacgcgctcaccatccgcccccacctagcgggcacgggcgccaacgccctcgccgccgcgcacgtcgccgccacgctctcctcccactccttccggacccgcctcacgagctactccgtgctcctctcctaccctgcgtaccgctctctctcactctccgcgccggatcgcgacactgtgctcttcgctttgaagcaggaaacctacgcaggcgacccttacgaggcggtctccgccgaggccgtccccaccttcctcgcctacgcggcctccggttcggtctccgccgaggccgtctacgccaactacggccgcgcagaagatttcgcttacctcgccgcccgcggcatcgacgtcaccgggaaggtcgccgtcgcgcgctacggcgaagtgttccgcggcgacatcgtcaggaacgcgcgggatgccggcgccgccgcggcggtgatttactccgacgcgaaggactacgcggccgggaagaccttcccggacggaccgtggatgccgccgacaggcgtgcaggtgggtagcacgttcaagggggtgggggaccccacaacgccgatgtgggcgtcgtcggagggctgcgagcgcctgaccatcgcggaggcgatgagctccgatgacatgccggggataccggcgctgccggtgtcctggaaggatggggagaccatactacagctcatcggcggcgatgtggcgcccgagaattggcaaggaggcgatggcgcggcggcctataggtttgggcctggcccggcagtgctcaatctgacctacacagggaatgagacgatggttactattcagaatgtcatttcggtgattgaagggggagaagaacctgaacggtatgtaatccttggaaatcaccgtgatgcatggacatttggggcagttgatccgaacagcgggacagcatccttgcttgagctagctcaacggttgtctgagctgcaaaagaagggctggagacctcgacggaccatcatcttgtgcaactgggatgccgaagagtatggattgacaggatccactgaatgggtcgaggagaacagggcaatgctaacttcaagaactgttgcttacctaaatgttgattctgcagtggctggtcatggattttatgcatctgcaactcctcaacttgatgaattgcttaaagaagctagtaagcaggtccaaaatccggacaatgggacacagagtctctatgatttgtggatgtcttctaacagttctcctttgattggaagattaggagggggaagttcggattattctgcatttgttcaacacattggtattccatcagtggacatggcgattgggtcagactatccggtctatcatagcttgtatgatgacttcatatggatggaaaagtttggagatcccttgttccagaggcatgttgcagctgcaagcatgtgggggcttgttgctcttaggctctcagatgaggagatcctacccttcaactacagcaattatgccacagagcttgagaatggagcattgggcataagtgaaagagtacagggaatgcctgtcagcttatcacccctgcacaagtcaatcaaagagttcagaaaggcagttgcaaaagtggattctgaattgaaggctctacagacatggaaaatttggtccccatggagaaacaaccccttaaaggtcagagacatcaatgatcggttgatgatgaccgaacgggcattcacagaccgggaaggactgtctggacggccatggtacaaacacctgatttacgcaccttcgctgcacaacgattacggggctgaagtgtatccaggcattggtgacgccattgagagggtgaagaaaacaaatacttctgaatccttgcaatctatacaacatgagatttacagggtctctcgagtcataaaccaggcagcgcttgttttaagtggagggctcacgtgaatgcagtagctggactgatacagtattgcatagtatggtgatattaaggggaaaaataaatttcactggcagtcattacatttgtgccgagttcttattttgattctggtacctataaattgcatattactctttccaaacttatccggttcctattttaaatcgtattctcaaaatttgtcatgggttcttatttcaaatttcaataaacactcggctccataaacttattgttatagtatcccggtcaatatcccatctccctgcactacggtctac

SEQ ID NO: 78510 - DNA, 2991 bp, Zea Mays
caccggctgatcccgcgaacgaaaacgttcaccgcccccaagctgttcctgtttgcgacactccctgctaccactcagccgagccgagtagccgaccgaatcggcgtctcctccctccgcagctccgtttctccgacgcgctcagccgccggctaaccatctcaattctcacgacgtcaccgcctagtcgccctcactgacgacgcggcgccatgcctcctcttcctcgcgcccgcgccatcctactaccagtccctcctcctctccctcggttccaacgacaccgccgccgcccacctgcacgcgctcaccatccgcccccacctagcgggcacgggcgccaacgccctcgccgccgcgcacgtcgccgccacgctctcctcccactccttccggacccgcctcacgagctactccgtgctcctctcctaccctgcgtaccgctctctctcactctccgcgccggatcgcgacactgtgctcttcgctttgaagcaggaaacctacgcaggcgacccttacgaggcggtctccgccgaggccgtccccaccttcctcgcctacgcggcctccggttcggtctccgccgaggccgtctacgccaactacggccgcgcagaagatttcgcttacctcgccgcccgcggcatcgacgtcaccgggaaggtcgccgtcgcgcgctacggcgaagtgttccgcggcgacatcgtcaggaacgcgcgggatgccggcgccgccgcggcggtgatttactccgacgcgaaggactacgcggccgggaagaccttcccggacggaccgtggatgccgccgacaggcgtgcaggtgggtagcacgttcaagggggtgggggaccccacaacgccgatgtgggcgtcgtcggagggctgcgagcgcctgaccatcgcggaggcgatgagctccgatgacatgccggggataccggcgctgccggtgtcctggaaggatggggagaccatactacagctcatcggcggcgatgtggcgcccgagaattggcaaggaggcgatggcgcggcggcctataggtttgggcctggcccggcagtgctcaatctgacctacacagggaatgagacgatggttactattcagaatgtcatttcggtgattgaagggggagaagaacctgaacggtatgatcaaaatccccaatcaccttacccccaatacctccttccaaactccaatttaggtaaggggcactgtatcatctacagtacaaatccgtctgtgggctcaagcattcagcctgaatgcgatggatggaaatttaaccttcgttaggtgaatgtgactagcaaaattgaagtgtatgagacactttttttctttgaacagtgtgtatggcacactttttcattgaaacggtgtgctcacacacactaaaagtatttgtaatcatactacagaggcagagttatggaactttgggtggctagtgatgaaacagtcaccatgaaccacttagtgttaaagatatatcacagatcttgtatggtatttcgaactacttagtcgcttacaaattgcaatctcattctttgaaagtttaaaaaaatctgtacaaattctgtgcaattatcattctaaaacatgcaggtatgtaatccttggaaatcaccgtgatgcatggacatttggggcagttgatccgaacagcgggacagcatccttgcttgagctagctcaacggttgtctgagctgcaaaagaagggctggagacctcgacggaccatcatcttgtgcaactgggatgccgaagaacaggatccactgaatgggtcgaggagaacagggcaatgctaacttcaagaactgttgcttacctaaatgttgattctgcagtggctggtcatggattttatgcatctgcaactcctcaacttgatgaattgcttaaagaagctagtaagcaggtccaaaatccggacaatgggacacagagtctctatgatttgtggatgtcttctaacagttctcctttgattggaagattaggagggggaagttcggattattctgcatttgttcaacacattggtattccatcagtggacatggcgattgggtcagactatccggtctatcatagcttgtatgatgacttcatatggatggaaaagtttggagatcccttgttccagaggcatgttgcagctgcaagcatgtgggggcttgttgctcttaggctctcagatgaggagatcctacccttcaactacagcaattatgccacagagcttgagaatggagcattgggcataagtgaaagagtacagggaatgcctgtcagcttatcacccctgcacaagtcaatcaaagagttcagaaaggcagttgcaaaagtggattctgaattgaaggctctacagacatggaaaatttggtccccatggagaaacaaccccttaaaggtcagagacatcaatgatcggttgatgatgaccgaacgggcattcacagaccgggaaggactgtctggacggccatggtacaaacacctgatttacgcaccttcgctgcacaacgattacggggctgaagtgtatccaggcattggtgacgccattgagagggtgaagaaaacaaatacttctgaatccttgcaatctatacaacatgagatttacagggtctctcgagtcataaaccaggcagcgcttgttttaagtggagggctcacgtgaatgcagtagctggactgatacagtattgcatagtatggtgatattaaggggaaaaataaatttcactggcagtcattacatttgtgccgagttcttattttgattctggtacctataaattgcatattactctttccaaacttatccggttcctattttaaatcgtattctcaaaatttgtcatgggttcttatttcaaatttcaataaacactcggctccataaacttattgttatagtatcccggtcaatatcccatctccctgcactacggtctac

SEQ ID NO: 78511 - DNA, 3013 bp, Zea Mays
cacccccacccccaccggctgatcccgcgaacgaaaacgttcaccgcccccaagctgttcctgtttgcgacactccctgctaccactcagccgagccgagtagccgaccgaatcggcgtctcctccctccgcagctccgtttctccgacgcgctcagccgccggctaaccatctcaattctcacgacgtcaccgcctagtcgccctcactgacgacgcggcgccatgcctcctcttcctcgcgcccgcgccatcctactaccagtccctcctcctctccctcggttccaacgacaccgccgccgcccacctgcacgcgctcaccatccgcccccacctagcgggcacgggcgccaacgccctcgccgccgcgcacgtcgccgccacgctctcctcccactccttccggacccgcctcacgagctactccgtgctcctctcctaccctgcgtaccgctctctctcactctccgcgccggatcgcgacactgtgctcttcgctttgaagcaggaaacctacgcaggcgacccttacgaggcggtctccgccgaggccgtccccaccttcctcgcctacgcggcctccggttcggtctccgccgaggccgtctacgccaactacggccgcgcagaagatttcgcttacctcgccgcccgcggcatcgacgtcaccgggaaggtcgccgtcgcgcgctacggcgaagtgttccgcggcgacatcgtcaggaacgcgcgggatgccggcgccgccgcggcggtgatttactccgacgcgaaggactacgcggccgggaagaccttcccggacggaccgtggatgccgccgacaggcgtgcaggtgggtagcacgttcaagggggtgggggaccccacaacgccgatgtgggcgtcgtcggagggctgcgagcgcctgaccatcgcggaggcgatgagctccgatgacatgccggggataccggcgctgccggtgtcctggaaggatggggagaccatactacagctcatcggcggcgatgtggcgcccgagaattggcaaggaggcgatggcgcggcggcctataggtttgggcctggcccggcagtgctcaatctgacctacacagggaatgagacgatggttactattcagaatgtcatttcggtgattgaagggggagaagaacctgaacggtatgatcaaaatccccaatcaccttacccccaatacctccttccaaactccaatttaggtaaggggcactgtatcatctacagtacaaatccgtctgtgggctcaagcattcagcctgaatgcgatggatggaaatttaaccttcgttaggtgaatgtgactagcaaaattgaagtgtatgagacactttttttctttgaacagtgtgtatggcacactttttcattgaaacggtgtgctcacacacactaaaagtatttgtaatcatactacagaggcagagttatggaactttgggtggctagtgatgaaacagtcaccatgaaccacttagtgttaaagatatatcacagatcttgtatggtatttcgaactacttagtcgcttacaaattgcaatctcattctttgaaagtttaaaaaaatctgtacaaattctgtgcaattatcattctaaaacatgcaggtatgtaatccttggaaatcaccgtgatgcatggacatttggggcagttgatccgaacagcgggacagcatccttgcttgagctagctcaacggttgtctgagctgcaaaagaagggctggagacctcgacggaccatcatcttgtgcaactgggatgccgaagagtatggattgacaggatccactgaatgggtcgaggagaacagggcaatgctaacttcaagaactgttgcttacctaaatgttgattctgcagtggctggtcatggattttatgcatctgcaactcctcaacttgatgaattgcttaaagaagctagtaagcaggtccaaaatccggacaatgggacacagagtctctatgatttgtggatgtcttctaacagttctcctttgattggaagattaggagggggaagttcggattattctgcatttgttcaacacattggtattccatcagtggacatggcgattgggtcagactatccggtctatcatagcttgtatgatgacttcatatggatggaaaagtttggagatcccttgttccagaggcatgttgcagctgcaagcatgtgggggcttgttgctcttaggctctcagatgaggagatcctacccttcaactacagcaattatgccacagagcttgagaatggagcattgggcataagtgaaagagtacagggaatgcctgtcagcttatcacccctgcacaagtcaatcaaagagttcagaaaggcagttgcaaaagtggattctgaattgaaggctctacagacatggaaaatttggtccccatggagaaacaaccccttaaaggtcagagacatcaatgatcggttgatgatgaccgaacgggcattcacagaccgggaaggactgtctggacggccatggtacaaacacctgatttacgcaccttcgctgcacaacgattacggggctgaagtgtatccaggcattggtgacgccattgagagggtgaagaaaacaaatacttctgaatccttgcaatctatacaacatgagatttacagggtctctcgagtcataaaccaggcagcgcttgttttaagtggagggctcacgtgaatgcagtagctggactgatacagtattgcatagtatggtgatattaaggggaaaaataaatttcactggcagtcattacatttgtgccgagttcttattttgattctggtacctataaattgcatattactctttccaaacttatccggttcctattttaaatcgtattctcaaaatttgtcatgggttcttatttcaaatttcaataaacactcggctccataaacttattgttatagtatcccggtcaatatcccatctccctgcactacggtctac

SEQ ID NO: 78512 - DNA, 3029 bp, Zea Mays
atttctagttggcttcaaggcgttttggttccatctcacggtgtcttgtgttgattggattgaatcagaggttttcaattgcttgtggttcgaatctgatgtttgtgtgggtactcgaggcatacatatacatatttgtagtggtaccatcataacaagtaaagatggtgaagttcacggctgaagagctccgtgccatcatggacaaaaagaacaacattcgtaatatgtctgttattgctcatgtggaccatggcaagtctacacttacagattcccttgtggcagctgctgggattattgcccaggaagttgctggtgatgttcgcatgactgatactcgtgcagatgaagccgagcgtggcatcacaatcaaatctactggtatctctctttattatgagatgactgatgagtcactgaagaactacaagggtgagagggatggtaaccaatacttgatcaaccttattgactcacccgggcacgtcgatttttcttcggaagtcacagctgctcttcgcatcaccgatggtgctctggttgtggttgattgtattgaaggtgtctgtgtgcaaactgaaactgtgcttcgccaagcccttggtgagaggattaggccagttcttaccgtgaacaagatggacaggtgcttccttgagcttcaggttgagggtgaggaagcttatcagactttctcccgtgttattgagaatgccaatgtcatcatggcaacatatgaagataagctccttggtgatgtccaagtatacccagagaaggggacagttgccttttctgctggtctgcatggatgggcctttacactcactaactttgcgaagatgtatgcatctaagtttggagttgatgaatctaagatgatggagaggctatggggtgagaatttctttgaccctgccacaaagaaatggaccaccaagaacacaggttctcctacctgcaagagaggatttgttcagttctgctacgagccaatcaagcaaatcatcaaaacctgcatgaatgaccaaaaggagaaattgtggcccatgttgcaaaagcttaatgttaccatgaaggctgatgagaaggagttgattggcaaagctttgatgaagcgtgttatgcaaacgtggcttccagccagcactgcacttcttgagatgatgatattccaccttccttccccggcaaaggctcaaaagtatcgtgtggagaacttgtatgagggaccccttgatgatgtttatgcaactgctatcagaaactgtgatccggagggtcctcttatgctgtatgtttcaaagatgattccagcatctgacaagggcaggttctttgcctttggtcgtgtcttctcagggaaggttgctactggtatgaaagttcggatcatgggtcccaactatgtccctggccagaagaaggacctgtatgtcaagagtgttcagcgtactgttatctggatgggaaagaaacaagagtcagttgaggatgttccttgtggtaacactgttgctatggttggtctggatcagttcatcacgaagaacgctacactcactaatgagaaggaggttgatgcatgcccaatcagagcaatgaagttctctgtctcccctgttgtgcgtgttgctgttcagtgcaaggttgcttccgaccttcccaagctagtagaaggtttgaagcgtctggcgaagtccgatcctatggttctgtgtacaatggaagaatctggtgagcatatcattgctggagctggtgagcttcatcttgagatttgcctgaaggatctgcaagaggacttcatgggaggtgctgaaattattgtttctcctcctgttgtgtccttccgtgaaaccgttcttgagaagtcctgccgcactgtcatgagcaagtcacctaacaagcacaaccgtctgtacatggaagcgcgccccctggaggagggtcttgctgaggcaattgatgatggccgcattggcccacgtgatgatcctaaggtgcgctcccagatcctctctcaagagtttgggtgggacaaggatcttgccaagaagatttggtgcttcggacctgagaccaccggcccaaacatggttgttgatatgtgcaagggagtgcagtatctcaatgaaatcaaggattctgttgtggctggtttccagtgggcatcgaaggagggtgcactggctgaagagaacatgcgcgggatttgcttcgaggtctgtgatgtcgttcttcatgccgatgctatccacaggggtggtggccaggtcattccaactgccaggagggtcatttatgcttctcagctcacagccaagccgaggctgctggaaccagtttacctggtggagatccaggccccagaaaatgcacttggtggcatatacggtgttctgaaccagaagagaggacatgtattcgaggagatgcaaaggcctggtaccccgctctacaacatcaaggctttcctccctgtcatcgagtcctttgggttctcaagccagctgagggctgcaacctctggtcaggcgttcccccagtgtgtgtttgaccactgggacatgatgggctcggatcctttggaggctggctcccaggctgcccagctggtgctggatatccgcaagaggaagggtctgaaagaacagatgactcctctttctgagtttgaggacaagctctaatcttttcgtttttgctactgttactggttttaattgtcactcggagtctgggaactatttatatcttgtttccttttagttgtcaagtgcatgtttctgaacatcattggtcatactgtactatccaagtgctgttgagacacttttttctatcaatcgtgatgtaacagttggtatatgctggcttggtggaagtgtttgtagtaaatgcttgtgctatcttgatttaattcttgttcccttacattgcttattagtctttcggttgttacgtaggctaaaccatgctctatcaaaactccgtatttggtagatgttaataaaatattctat

SEQ ID NO: 78513 - DNA, 3157 bp, Zea Mays
ctcgcgtcgtgactcgtgaggcggtgagccttctgccctgctggcttctttctagtcaccgccttggaaaggagccagtgggcttactcaacgggccgaatggttgcccgagagtgacgagcagcccagcagctgcccgccgctaatctgcgtcgacaaaaccaggcgggctgccactagggttttagtgcttctctcccggcggcgcctccacatctcgtctctcagatcgggaggcgaaaccaaggcatacatatacatatttgtagtggtaccatcataacaagtaaagatggtgaagttcacggctgaagagctccgtgccatcatggacaaaaagaacaacattcgtaatatgtctgttattgctcatgtggaccatggcaagtctacacttacagattcccttgtggcagctgctgggattattgcccaggaagttgctggtgatgttcgcatgactgatactcgtgcagatgaagccgagcgtggcatcacaatcaaatctactggtatctctctttattatgagatgactgatgagtcactgaagaactacaagggtgagagggatggtaaccaatacttgatcaaccttattgactcacccgggcacgtcgatttttcttcggaagtcacagctgctcttcgcatcaccgatggtgctctggttgtggttgattgtattgaaggtgtctgtgtgcaaactgaaactgtgcttcgccaagcccttggtgagaggattaggccagttcttaccgtgaacaagatggacaggtgcttccttgagcttcaggttgagggtgaggaagcttatcagactttctcccgtgttattgagaatgccaatgtcatcatggcaacatatgaagataagctccttggtgatgtccaagtatacccagagaaggggacagttgccttttctgctggtctgcatggatgggcctttacactcactaactttgcgaagatgtatgcatctaagtttggagttgatgaatctaagatgatggagaggctatggggtgagaatttctttgaccctgccacaaagaaatggaccaccaagaacacaggttctcctacctgcaagagaggatttgttcagttctgctacgagccaatcaagcaaatcatcaaaacctgcatgaatgaccaaaaggagaaattgtggcccatgttgcaaaagcttaatgttaccatgaaggctgatgagaaggagttgattggcaaagctttgatgaagcgtgttatgcaaacgtggcttccagccagcactgcacttcttgagatgatgatattccaccttccttccccggcaaaggctcaaaagtatcgtgtggagaacttgtatgagggaccccttgatgatgtttatgcaactgctatcagaaactgtgatccggagggtcctcttatgctgtatgtttcaaagatgattccagcatctgacaagggcaggttctttgcctttggtcgtgtcttctcagggaaggttgctactggtatgaaagttcggatcatgggtcccaactatgtccctggccagaagaaggacctgtatgtcaagagtgttcagcgtactgttatctggatgggaaagaaacaagagtcagttgaggatgttccttgtggtaacactgttgctatggttggtctggatcagttcatcacgaagaacgctacactcactaatgagaaggaggttgatgcatgcccaatcagagcaatgaagttctctgtctcccctgttgtgcgtgttgctgttcagtgcaaggttgcttccgaccttcccaagctagtagaaggtttgaagcgtctggcgaagtccgatcctatggttctgtgtacaatggaagaatctggtgagcatatcattgctggagctggtgagcttcatcttgagatttgcctgaaggatctgcaagaggacttcatgggaggtgctgaaattattgtttctcctcctgttgtgtccttccgtgaaaccgttcttgagaagtcctgccgcactgtcatgagcaagtcacctaacaagcacaaccgtctgtacatggaagcgcgccccctggaggagggtcttgctgaggcaattgatgatggccgcattggcccacgtgatgatcctaaggtgcgctcccagatcctctctcaagagtttgggtgggacaaggatcttgccaagaagatttggtgcttcggacctgagaccaccggcccaaacatggttgttgatatgtgcaagggagtgcagtatctcaatgaaatcaaggattctgttgtggctggtttccagtgggcatcgaaggagggtgcactggctgaagagaacatgcgcgggatttgcttcgaggtctgtgatgtcgttcttcatgccgatgctatccacaggggtggtggccaggtcattccaactgccaggagggtcatttatgcttctcagctcacagccaagccgaggctgctggaaccagtttacctggtggagatccaggccccagaaaatgcacttggtggcatatacggtgttctgaaccagaagagaggacatgtattcgaggagatgcaaaggcctggtaccccgctctacaacatcaaggctttcctccctgtcatcgagtcctttgggttctcaagccagctgagggctgcaacctctggtcaggcgttcccccagtgtgtgtttgaccactgggacatgatgggctcggatcctttggaggctggctcccaggctgcccagctggtgctggatatccgcaagaggaagggtctgaaagaacagatgactcctctttctgagtttgaggacaagctctaatcttttcgtttttgctactgttactggttttaattgtcactcggagtctgggaactatttatatcttgtttccttttagttgtcaagtgcatgtttctgaacatcattggtcatactgtactatccaagtgctgttgagacacttttttctatcaatcgtgatgtaacagttggtatatgctggcttggtggaagtgtttgtagtaaatgcttgtgctatcttgatttaattcttgttcccttacattgcttattagtctttcggttgttacgtaggctaaaccatgctctatcaaaactccgtatttggtagatgttaataaaatattctat

SEQ ID NO: 78514 - DNA, 1736 bp, Zea Mays
ctttaccggagccatcgccgccgtcgtctccgccgccggcattgttgcctcctccgccggacgctccccctccgtcgcttcccccgtcaccgctgccacatccaaccccgtcaccgcctcaagccccgccgcccccgctgccgacggaccagccgcgcgttcagccccgcgtatacccatcaccgccaccgccgtcgcttcctcctcctcctccgccgcctcccaccgtctcgccgccatcgccgggtccatccaactctccatcgccgtcgccgtcgcctgctccagctacacaagctccagctccggctcctgcgcgtgttgctgcctattcgcctcccccgccaaaaatcgcccctcccccgccaccgcactatcgcggcaagtcgcattacacgccgcactcgcccgtgaagtcgcattcgaactcgacccatgcagctagcggcagcggcaacaacatcgagatatcgagggaagcggccaccaccatcgtagcactggccggtctcgctatgctcagctttattggcgccaccatttggttcgtcaagaaaaagcgccggcgcattgagcccccggcgacactgcctacacagcaaccagctcctccgccaccgcccaactacattccatcttcggctggatcctcactagcttcagatgggttctacttgagatcgccagggtatcctttcatgagtaagtgaagcatcactggattggcagacaagggttaagattgcagctggagcagctcgagggattggttacctccatgaagattgtcatccacgtattattcatagagatattaaatcatccaatattttgttggataacaacttcgaagctcaggtttctgattttggacttgcaaggttagctgccgattccaatacacatgttaccacacgtgtcatggggacatttgggtatttggctccagagtatgcattgtcaggcaagttaacagcaaagtctgatgtatattcttttggggttgttcttttggagcttattacaggaagaaaacctgttgatgcttctcagcctttgggagatgaaagtctggttgaatgggctcgtcctcttctgatgaaggcaatcgagcttcgggagtttggggaccttcctgaccccaggatgggaaacaggttcgatgaaaacgagatgttccatatgataggagctgcggctgcatgcattcggcattctgcagcaatgaggccacggatggggcaggtggttagagcactagatagtttagccgactctaatctgaacaacggcctccaacccggacgcagcgaggtgttcttagagccacagacggaggagattcgactgttccagctgagggagttcggcagccgggactgtagcgacgagctgagccaagcgagctggagaagccgaagagatttgtgaacagattcggtacaagatcattaacattctttttttttgctcattctttacatgtaattatctcttttacatgattctttttttggttttactcctccctgaggccattcttgttccccggtggaataaattttgcgtgagataagtaaattgaaccctctttttgcagtgaagagagttcggttcctggcattcactgacaaatattactgctagtgctagtgtctgtgtgtaaggattagggcagttcacttgtatgcttaactgaccaggcgctgcgttgggcgggcacaagtacaatgatt

SEQ ID NO: 78515 - DNA, 1897 bp, Zea Mays
ccgccgctaagcagcccacctccggcgtcccctttaccggagccatcgccgccgtcgtctccgccgccggcattgttgcctcctccgccggacgctccccctccgtcgcttcccccgtcaccgctgccacatccaaccccgtcaccgcctcaagccccgccgcccccgctgccgacggaccagccgcgcgttcagccccgcgtatacccatcaccgccaccgccgtcgcttcctcctcctcctccgccgcctcccaccgtctcgccgccatcgccgggtccatccaactctccatcgccgtcgccgtcgcctgctccagctacacaagctccagctccggctcctgcgcgtgttgctgcctattcgcctcccccgccaaaaatcgcccctcccccgccaccgcactatcgcggcaagtcgcattacacgccgcactcgcccgtgaagtcgcattcgaactcgacccatgcagctagcggcagcggcaacaacatcgagatatcgagggaagcggccaccaccatcgtagcactggccggtctcgctatgctcagctttattggcgccaccatttggttcgtcaagaaaaagcgccggcgcattgagcccccggcgacactgcctacacagcaaccagctcctccgccaccgcccaactacattccatcttcggctggatcctcactagcttcagatgggttctacttgagatcgccagggtatcctttcatgagctatcacagatgactttgcagaagagaaccttttgggggaaggtggatttgggtgcgtgttcaagggcattttgcaagatggtcgcccagttgccgtcaagaagctcaagattgggaatgggcaaggcgagcgtgagttcaaggctgaggtcgatactatcagcagagtacatcatagacatttggtttctctagtaggctattgcactgcggagggccagcgaatgcttgtttacgattttgttcccaacaacacactttattaccacctccatgtaagtgaagcatcactggattggcagacaagggttaagattgcagctggagcagctcgagggattggttacctccatgaagattgtcatccacgtattattcatagagatattaaatcatccaatattttgttggataacaacttcgaagctcaggtttctgattttggacttgcaaggaagaaaacctgttgatgcttctcagcctttgggagatgaaagtctggttgaatgggctcgtcctcttctgatgaaggcaatcgagcttcgggagtttggggaccttcctgaccccaggatgggaaacaggttcgatgaaaacgagatgttccatatgataggagctgcggctgcatgcattcggcattctgcagcaatgaggccacggatggggcaggtggttagagcactagatagtttagccgactctaatctgaacaacggcctccaacccggacgcagcgaggtgttcttagagccacagacggaggagattcgactgttccagctgagggagttcggcagccgggactgtagcgacgagctgagccaagcgagctggagaagccgaagagatttgtgaacagattcggtacaagatcattaacattctttttttttgctcattctttacatgtaattatctcttttacatgattctttttttggttttactcctccctgaggccattcttgttccccggtggaataaattttgcgtgagataagtaaattgaaccctctttttgcagtgaagagagttcggttcctggcattcactgacaaatattactgctagtgctagtgtctgtgtgtaaggattagggcagttcacttgtatgcttaactgaccaggcgctgcgttgggcgggcacaagtacaatgatt

SEQ ID NO: 78516 - DNA, 2584 bp, Zea Mays
cctctctgctgtccaaggcaggggccaggggcgggcggacagcggaggcaagaggcgcgagctcggcccaaggcgctgagggagacagccagccgctgcattgcgctactacattggccaggagggctcgccgccggggggaggctcggatctcgccgtctctggccacccgtacctgctgccgcgtgcttcacttggtgccgctttccgcgcctactggcgggcggcctcgactccagcgcggcgtgatctggcgcgcgccaccgacgccgctcgcgtggggaggcctggatcttggcgcgccgcgagaccccggggaggacggcgacggcgcgctcatcagtcgcccgcagtccgctgagctgctgccgactgcgcccggcggccgggagatctggccgacggcgcggcgctgcagatcccgtcctgcctgcgcgcgtgggcacggctcactgctgctgtggaggctgttacgcgcggtggtggtaccgatgggctacgggtacgtggaacccttcctgcccccacagcagcagcagcagcaggggggctacgggcaactgcaggcgcagctggctccgcggccgccggcttgcccgtactcgtcgtccgcctccgctccgccggtctccgcgtcctaccattcttcgcccccgccaacgtcgcctccgccgctaagcagcccacctccggcgtcccctttaccggagccatcgccgccgtcgtctccgccgccggcattgttgcctcctccgccggacgctccccctccgtcgcttcccccgtcaccgctgccacatccaaccccgtcaccgcctcaagccccgccgcccccgctgccgacggaccagccgcgcgttcagccccgcgtatacccatcaccgccaccgccgtcgcttcctcctcctcctccgccgcctcccaccgtctcgccgccatcgccgggtccatccaactctccatcgccgtcgccgtcgcctgctccagctacacaagctccagctccggctcctgcgcgtgttgctgcctattcgcctcccccgccaaaaatcgcccctcccccgccaccgcactatcgcggcaagtcgcattacacgccgcactcgcccgtgaagtcgcattcgaactcgacccatgcagctagcggcagcggcaacaacatcgagatatcgagggaagcggccaccaccatcgtagcactggccggtctcgctatgctcagctttattggcgccaccatttggttcgtcaagaaaaagcgccggcgcattgagcccccggcgacactgcctacacagcaaccagctcctccgccaccgcccaactacattccatcttcggctggatcctcactagcttcagatgggttctacttgagatcgccagggtatcctttcatgagctatcacagatgactttgcagaagagaaccttttgggggaaggtggatttgggtgcgtgttcaagggcattttgcaagatggtcgcccagttgccgtcaagaagctcaagattgggaatgggcaaggcgagcgtgagttcaaggctgagtaagtgaagcatcactggattggcagacaagggttaagattgcagctggagcagctcgagggattggttacctccatgaagattgtcatccacgtattattcatagagatattaaatcatccaatattttgttggataacaacttcgaagctcaggtttctgattttggacttgcaaggttagctgccgattccaatacacatgttaccacacgtgtcatggggacatttgggtatttggctccagagtatgcattgtcaggcaagttaacagcaaagtctgatgtatattcttttggggttgttcttttggagcttattacaggaagaaaacctgttgatgcttctcagcctttgggagatgaaagtctggttgaatgggctcgtcctcttctgatgaaggcaatcgagcttcgggagtttggggaccttcctgaccccaggatgggaaacaggttcgatgaaaacgagatgttccatatgataggagctgcggctgcatgcattcggcattctgcagcaatgaggccacggatggggcaggtggttagagcactagatagtttagccgactctaatctgaacaacggcctccaacccggacgcagcgaggtgttcttagagccacagacggaggagattcgactgttccagctgagggagttcggcagccgggactgtagcgacgagctgagccaagcgagctggagaagccgaagagatttgtgaacagattcggtacaagatcattaacattctttttttttgctcattctttacatgtaattatctcttttacatgattctttttttggttttactcctccctgaggccattcttgttccccggtggaataaattttgcgtgagataagtaaattgaaccctctttttgcagtgaagagagttcggttcctggcattcactgacaaatattactgctagtgctagtgtctgtgtgtaaggattagggcagttcacttgtatgcttaactgaccaggcgctgcgttgggcgggcacaagtacaatgatt

SEQ ID NO: 78517 - DNA, 2567 bp, Zea Mays
cctctctgctgtccaaggcaggggccaggggcgggcggacagcggaggcaagaggcgcgagctcggcccaaggcgctgagggagacagccagccgctgcattgcgctactacattggccaggagggctcgccgccggggggaggctcggatctcgccgtctctggccacccgtacctgctgccgcgtgcttcacttggtgccgctttccgcgcctactggcgggcggcctcgactccagcgcggcgtgatctggcgcgcgccaccgacgccgctcgcgtggggaggcctggatcttggcgcgccgcgagaccccggggaggacggcgacggcgcgctcatcagtcgcccgcagtccgctgagctgctgccgactgcgcccggcggccgggagatctggccgacggcgcggcgctgcagatcccgtcctgcctgcgcgcgtgggcacggctcactgctgctgtggaggctgttacgcgcggtggtggtaccgatgggctacgggtacgtggaacccttcctgcccccacagcagcagcagcagcaggggggctacgggcaactgcaggcgcagctggctccgcggccgccggcttgcccgtactcgtcgtccgcctccgctccgccggtctccgcgtcctaccattcttcgcccccgccaacgtcgcctccgccgctaagcagcccacctccggcgtcccctttaccggagccatcgccgccgtcgtctccgccgccggcattgttgcctcctccgccggacgctccccctccgtcgcttcccccgtcaccgctgccacatccaaccccgtcaccgcctcaagccccgccgcccccgctgccgacggaccagccgcgcgttcagccccgcgtatacccatcaccgccaccgccgtcgcttcctcctcctcctccgccgcctcccaccgtctcgccgccatcgccgggtccatccaactctccatcgccgtcgccgtcgcctgctccagctacacaagctccagctccggctcctgcgcgtgttgctgcctattcgcctcccccgccaaaaatcgcccctcccccgccaccgcactatcgcggcaagtcgcattacacgccgcactcgcccgtgaagtcgcattcgaactcgacccatgcagctagcggcagcggcaacaacatcgagatatcgagggaagcggccaccaccatcgtagcactggccggtctcgctatgctcagctttattggcgccaccatttggttcgtcaagaaaaagcgccggcgcattgagcccccggcgacactgcctacacagcaaccagctcctccgccaccgcccaactacattccatcttcggctggatcctcactagcttcagatgggttctacttgagatcgccagggtatcctttcatgagctatcacagatgactttgcagaagagaaccttttgggggaaggtggatttgggtgcgtgttcaagggcattttgcaagatggtcgcccagttgccgtcaagaagctcaagattgggaatgggcaaggcgagctaagtgaagcatcactggattggcagacaagggttaagattgcagctggagcagctcgagggattggttacctccatgaagattgtcatccacgtattattcatagagatattaaatcatccaatattttgttggataacaacttcgaagctcaggtttctgattttggacttgcaaggttagctgccgattccaatacacatgttaccacacgtgtcatggggacatttgggtatttggctccagagtatgcattgtcaggcaagttaacagcaaagtctgatgtatattcttttggggttgttcttttggagcttattacaggaagaaaacctgttgatgcttctcagcctttgggagatgaaagtctggttgaatgggctcgtcctcttctgatgaaggcaatcgagcttcgggagtttggggaccttcctgaccccaggatgggaaacaggttcgatgaaaacgagatgttccatatgataggagctgcggctgcatgcattcggcattctgcagcaatgaggccacggatggggcaggtggttagagcactagatagtttagccgactctaatctgaacaacggcctccaacccggacgcagcgaggtgttcttagagccacagacggaggagattcgactgttccagctgagggagttcggcagccgggactgtagcgacgagctgagccaagcgagctggagaagccgaagagatttgtgaacagattcggtacaagatcattaacattctttttttttgctcattctttacatgtaattatctcttttacatgattctttttttggttttactcctccctgaggccattcttgttccccggtggaataaattttgcgtgagataagtaaattgaaccctctttttgcagtgaagagagttcggttcctggcattcactgacaaatattactgctagtgctagtgtctgtgtgtaaggattagggcagttcacttgtatgcttaactgaccaggcgctgcgttgggcgggcacaagtacaatgatt

SEQ ID NO: 78518 - DNA, 2556 bp, Zea Mays
ccactcctctctgctgtccaaggcaggggccaggggcgggcggacagcggaggcaagaggcgcgagctcggcccaaggcgctgagggagacagccagccgctgcattgcgctactacattggccaggagggctcgccgccggggggaggctcggatctcgccgtctctggccacccgtacctgctgccgcgtgcttcacttggtgccgctttccgcgcctactggcgggcggcctcgactccagcgcggcgtgatctggcgcgcgccaccgacgccgctcgcgtggggaggcctggatcttggcgcgccgcgagaccccggggaggacggcgacggcgcgctcatcagtcgcccgcagtccgctgagctgctgccgactgcgcccggcggccgggagatctggccgacggcgcggcgctgcagatcccgtcctgcctgcgcgcgtgggcacggctcactgctgctgtggaggctgttacgcgcggtggtggtaccgatgggctacgggtacgtggaacccttcctgcccccacagcagcagcagcagcaggggggctacgggcaactgcaggcgcagctggctccgcggccgccggcttgcccgtactcgtcgtccgcctccgctccgccggtctccgcgtcctaccattcttcgcccccgccaacgtcgcctccgccgctaagcagcccacctccggcgtcccctttaccggagccatcgccgccgtcgtctccgccgccggcattgttgcctcctccgccggacgctccccctccgtcgcttcccccgtcaccgctgccacatccaaccccgtcaccgcctcaagccccgccgcccccgctgccgacggaccagccgcgcgttcagccccgcgtatacccatcaccgccaccgccgtcgcttcctcctcctcctccgccgcctcccaccgtctcgccgccatcgccgggtccatccaactctccatcgccgtcgccgtcgcctgctccagctacacaagctccagctccggctcctgcgcgtgttgctgcctattcgcctcccccgccaaaaatcgcccctcccccgccaccgcactatcgcggcaagtcgcattacacgccgcactcgcccgtgaagtcgcattcgaactcgacccatgcagctagcggcagcggcaacaacatcgagatatcgagggaagcggccaccaccatcgtagcactggccggtctcgctatgctcagctttattggcgccaccatttggttcgtcaagaaaaagcgccggcgcattgagcccccggcgacactgcctacacagcaaccagctcctccgccaccgcccaactacattccatcttcggctggatcctcactagcttcagatgggttctacttgagatcgccagggtatcctttcatgagctatcacagatgactttgcagaagagaaccttttgggggaaggtggatttgggtgcgtgttcaagggcattttgcaagatggtcgcccagttgccgtcaagaagctcaagattgggaatgggcaaggcgagcgtgagttcaaggctgaggtcgatactatcagcagagtacatcatagacatttggtttctctagtaggctattgcactgcggagggccagcgaatgcttgtttacgattttgttcccaacaacacactttattaccacctccatgtaagtgaagcatcactggattggcagacaagggttaagattgcagctggagcagctcgagggattggttacctccatgaagattgtcatccacgtattattcatagagatattaaatcatccaatattttgttggataacaacttcgaagctcaggtttctgattttggacttgcaaggttagctgccgattccaatacacatgttaccacacgtgtcatggggacatttgggtatttggctccagagtatgcattgtcaggcaagttaacagcaaagtctgatgtatattcttttggggttgttcttttggagcttattacaggaagaaaacctgttgatgcttctcagcctttgggagatgaaagtctggttgaatgggctcgtcctcttctgatgaaggcaatcgagcttcgggagtttggggaccttcctgaccccaggatgggaaacaggttcgatgaaaacgagatgttccatatgataggagctgcggctgcatgcattcggcattctgcagcaatgaggccacggatggggcaggtggttagagcactagatagtttagccgactctaatctgaacaacggcctccaacccggacgcagcgaggtgttcttagagccacagacggaggagattcgactgttccagctgagggagttcggcagccgggactgtagcgacgagctgagccaagcgagctggagaagccgaagagatttgtgaacagattcgtgaagagagttcggttcctggcattcactgacaaatattactgctagtgctagtgtctgtgtgtaaggattagggcagttcacttgtatgcttaactgaccaggcgctgcgttgggcgggcacaagtacaatgatt

SEQ ID NO: 78519 - DNA, 986 bp, Zea Mays
atcgcatcgcatccaacggcaactgccaaggtcgccgaagtcgacggtcaggaggagcatggccgaccataaggaggagcagtctgtgatggacaagatctccgagaagttccacggcggggactcctcgtcgtcgtctgactcggacgacgagaagaagaaggggtcttcttcggcgtcggcgacggaggccatgaaagccaagatctaccgtctcttcggccgcgagaggcccgtccactctgtcctcggcggcggcaagcccgccgatcttgtcctatggaggaacaagaagatctcaggcggggtactcgctggtgccacggccatctggctcctgttcgaggttatggagtaccatctcctcaccttggtgtgccactgtctcatcgtctcgctggccatcctgttcctgtggtccaacgcctccagtttcatcaacaagtccccaccaaacattcctgaggtgaaaatccctgaggatgtgtctgttaatgttgcactgacactgagatacgagatcaacaggggctttgctaccttgagggagattggacatggacacgatctaaagaaattcctaattgttatcgcaggtctctggctcttttcagttcttgggagctgttgcaacttcctgacactgttctatattgtctttgtggcactgtacactatacctgttctgtatgagaaatatgaggacaaggttgatgcttttggtgagaaggctatgatcgaactgaagaagtattatgccatcttcgatgagaagtgcctatcgaagattccaaagggcctcaaggataagaagcactagattggtagtaaggatttgctacacctctataacaagacacaagagcctgatttttcgcctttgtactagaggattccaataacatttttacatgccttgcgggagtacgcccttggacttttgctgatggaatctgcgaccgaaaacttatggtcttatttccatg

SEQ ID NO: 78520 - DNA, 173 bp, Zea Mays
ccaaaatccaagagcagcttgaaggctgcaggggaagggcataaaggtccgagctatctcgacatgtgtcggtctattttgaagaaggatttgaagaattgaagaagatgaaggagcttggttacttcggcgacaaggttaaagtgcggcttgctggtgacgaggcaaccccg

SEQ ID NO: 78521 - DNA, 225 bp, Zea Mays
ttttgcaaacgcacgtagatacttgaacaaaaaagaaaaggcaggcgctctcagctcagcattgacctcatcagctacttcagtgcggatcactgctgtctgaacttcgaatttcgacgctctatagcaagcaccaagtcggccgccctccacccaacactaaaagctaaagctagtttgataactctatttttataaaaaaatatatattttactaaaaataat

SEQ ID NO: 78522 - DNA, 1695 bp, Zea Mays
agaaaggcgagactatggagacttagggggtgtttggttcctttagactctgttagaatgaatggagttaatagttaggaactaaaattagttaaagacatgtaaatagtttagctaatagttcagctattagctacttttagcaaattagcttataggaagctagctatttgttagatagctaattctactagcaattttttagtcaactcactattactctagtgcattcaaacaattccttagtcatcctcctaaactttatgattgcttctcatggtaaatcactgattgttgaattgaatgttcaacttagtcatgaatttgatatcaaagatcttggacgagcaacgaaaattcttaggatggaaatttagcgtgatcgtcgtgttggtactcgttttctatctcagaaaagttatattgagaaagttcttgaaaagtataatctcaataattgcaaatccgttgctacaccattttcttcacattttaaattgtcatcaaggcaatgttctgttactgaagatgagaaagaacacatgtctcacatactgtattctaatgatgttgggaatctcatgtatgctatgatttgtacaagacccgatttggctcatgttgtcagtgttgttagcagatttatgcacaatcctggtaaagaatattagaatgcagtaaagttgattcttcgctacttgaaagatacttctcattttggattattgtttgataagaattcagtgaaggaaattggtgttatgggatttcttgattctgattttgctagagatcttgataagagacgcttcatatctggctatattttttcattatacggttctatagtgagttagagggcttcacttcaatctgttactgctctttccactactgaagtagaatatgtcttagctactgaaggggttaaagaatctatttggatgcgaggttttatttctgaacttggtgttcctcaggatgccattaaggtttattgtgatagtcatagttctatttatctgactaagaatgacatatatcaattcaaggccatgcacattgatatcaagtaccacttcatccgtgatattgttgctgaatgcaagattaaagtggacaagatacatacagatgaaaatcctatagacatgcttacaaagtcattatctaataccaagttcaagcattgtcttgacttggtaggtgtttgtgtagattagcaccctagtggtatttggggaaacaattttatagatttagcttcatacaaacatttataaattttaatgctcctaggatgtccgattttttactaaataaattctacttttaaagataactagattatatgaaaaaatcaattcctgagataaagacaaaaatttagtgtaagttatcatttgataaaagacccactaaataaaaaacaacttagattagaaaaggaacaaatacgtttacttataaattgaaaagccacttatataaatgaaagaaacatgtgaatttattataaaataagttccctattctaaactataaaaatttataaattataagatatattaatttctttatatatatattgttatcaacgtctaggatgtgtattctcctggatattggcagtatgccttctaaggtccatttagtagaaggaaaccataatggacccgattgtgtagatccatg

SEQ ID NO: 78523 - DNA, 56 bp, Zea Mays
ctcttacttcactcgctccgccatgttgttgaattccctgtcgtcctgacctactg

SEQ ID NO: 78524 - DNA, 61 bp, Zea Mays
ggagacgacgacctagacctctcacaaactcgccacaacatcctccatgcgcctcgtcctg

SEQ ID NO: 78525 - DNA, 326 bp, Zea Mays
ttaagagttaaggggtgataaaatgtcaaattttgaagtttaaagtgaaaaagtagaccacgacaaaagtttcaagaggtaaaaggacttttaagtccttgggggcttcccttaactattgttgtggacatatactttagctcctacaactacgaaaattagttatttttgctccttgtgtagcttgaaaggtggtttagtccattacagtgtcatgttggatgtcatacatgaaagtccaaagtttagttttggtaattgagtgactagtcgataacctttttcgaaggctataattcggttttggtaattgagtaacaacttag

SEQ ID NO: 78526 - DNA, 879 bp, Zea Mays
tgtcatcagaatcttcagacaaaccctccattatcttcttagtaattttctctgtattcatctttgccatagactcataaaacccagcaataaaagggtctgcaactttcttttcttcatacagcttcttctccttagtcagcttcttctccttagtcgtcttcttctcctcagacatggagcaagcacgtctttaaaaccgaagatcaaaaatcaggcgagagctgatgagcaagagctaaaaatttgaggaaacaacgcaaacaacagaaatggcgtatcaaatgctgccgctgtgggttcctatttatacgcctagcactttgaaacttggcgggccctgtttgtcattgactttcgctattctagcgaagggaaggtgttttttcgaaccttcggcttaaggccttcgttcacgtcgcagtctgaattcattgtcacaacaaattaatactgtgaggggctactgttgggggccttcatctttcgaaggtcctcaaaaatatggctaacatgttttccaagtataatatatatacagggaccttcggccttgggatgaagctgtacacgatatgaaaagcgcggttcgggagaaggatgaaccagtttcgaagctacctgtggagaagcttcggcttagcggtgaaaaatgaaaccgacttaaaggagaaaaggttgtctagtcctcgatagattatcgctaagtcaatagtaaatgtcaagggcatgtatgtaattttacgcaggctgcgtcctgtgcctataaatagatgaacagtagcaccgtactgctcacgctgacttgtattcactcgcacgtcacacttggattttcaccttctgtcaagccgaaggtataaatttaattcgatattg

SEQ ID NO: 78527 - DNA, 285 bp, Zea Mays
cttaactccaccctttaggtcatctcatcatatgcatacactttgattgttagagcacctcacatagattatttttaacacctaagattttttagctaattgttgattcaaaagaaaaggaaataaaaagaaataaaaatagaaaatggaaatgagaaatagaaaacagaaaaagaaaaagaaaaagaaaaacatttcccccctcagttgggtcgtttccggcccaagccgcgcccgcgcccgcttccccctctcctcccacggcccaagcagcccagcaacgcc

SEQ ID NO: 78528 - DNA, 312 bp, Zea Mays
cccatctcctcctctctccattcttgcagccaccaaaaccctagccgcccccccccctcaatcccctcctcccaaggtgctaatccgtgccgctcggatcatcgtctcttggtgcgaatctccaatcgttttggtggagggaagaagggaggaaggaaaaggggagaacctaaggtgatttttgtgttcatcccttgttcatttgcgctgcgattcaattgatttgatgttgcgtttgcgattagatagagggaggctgtccagaattttacgtggtggatgaacagcggtagttctagcagtttttagttt

SEQ ID NO: 78529 - DNA, 178 bp, Zea Mays
aaatcaccttgggttctccccctttccttcctcccttcttccctccaccaaaacgattggagattcgcaccaagagacgatgatccgagcggcacggattagcaccttgggaggaggggattgaggggggggcggctagggttttggtggctgcaagaatggagagaggaggagatgg

SEQ ID NO: 78530 - DNA, 590 bp, Zea Mays
ggcatctcgacctcgatacgggaggtaaatccgtagatcaaaaggtatactagtcgatgataggatctttactctatttatgtgcatctcgaccggacattatgctttctgtatgcatgtgtgcaagattccaagccgatcctaaggaagttcaccttagggtcgtgaaacgaatcttgagatatttagttcatacacctaagtttggtctttggtaccccaagggatccacttttgacttaataggttattcagatgctgattgggcagggtgtaagcttgatagaaagagcacatcagggacttgtcagttcttgggaagatccctggtgtcttgggcatcaaagaaacaaaatttagtagctctttctaccgccaaagccgagtacattgccgcaggccattgttgcgcacaattgctttggatgaggcaaacccttagggactatggttacaaattaaccaaagttcctctcctatgtgataatgagagtgcaatctgcatggcggataatcccgttgagcacagccgcactaagcacatagccattcggtatcacttgagggatcaccaacaaagggggatatcg

SEQ ID NO: 78531 - DNA, 262 bp, Zea Mays
aaaccttttcctaaatgattttggtggttgaattgaccaacacaaattattggactaactagtttgttctagaatatatgttccacaggtgccaatggttcacaacaaaccaatacaaagttataagaaagggttcaaatgaaaggagcaataaaaaccgaaggctgccctggtctggcgcactggactgtctggtgtgccaccggacagtgttcggtgcactagggtggatcaagtccaactcgctagcttcgggtttttg

SEQ ID NO: 78532 - DNA, 697 bp, Zea Mays
cttgcacctcgggcggccatttgccggtgagggctccgccgctgttgggcactcgcgccgctgtggatgcgtctggtgagggacagaggtaggggacgacctctggccgttggttggctgatgaatgaaccagatcgagtgaaggataccccttcgacccattagaccgtagccgttgatccaggatctgagggtgatggttgcataccgatacataaacgatatatgactaatctgggcccttggttgctgatctaacagttgcggatgaatgataccccttcaccgtgcacattttatgtaagagcccctggggaattagctaataatccctccatccatctgtgaagtaggaagcttgcgcaggggtccatggaatttgcaatttaacccctagactctattttatagtatagaattcatataaaagtgaatagaaacttgcataactcacaacattctcatttttaaatcctttttagtcaattcaaattgtgttgtcttcataaaaatatttactagacagtgacaacaatatttgtggtatatcatataattttgtaattggaaatcgtttgaacctgggtttagcagattacacttactaataaaagtaacctatcaatgattagaacataactaaaatatgatatctaatcaagttataaactatactaaggttgaattgtttatttat

SEQ ID NO: 78533 - DNA, 1158 bp, Zea Mays
cctgagatctcaagtctaaggcaagttgtgcccttgatcactcttctttacctgataatgttctctgcttaatcaccgtgacatgctcaggttaatttgatgggacctaataggtttccctagtattgtttaccccacatcttgcaaacaaatgaactattgggtaaatttgctattgctctacctggttttgggaaaataatgttatatatgatcatgttccattaatattgttgatttaattattgttcatgataagattattgtattaattagaacatggagaaccacccgggaaaacagtgctaccataagggtggaatgggacgcccttggccaagtaattaggaaagctagggagagattactttactcgaaagggcaagcggggaggcgtcgctgcagagtatagggaggtcctcgggtcgaactgttgtgatggcatttcggatgagggattcctattcttccttcttcctgaattcgtagtgggttttctcgaactagtggaactttggaaatacctcatagtgctaccctgcctcgtctcctcggtagagatgtatgggattcatgaccccatggcaaatgggtaactcgacttgtgggtaaagatgggtaacctccgcagagtgtaaaactggtatatcagtcgtgctcacggtcatgagcggctcagacactcacgtgattaacttatggaattaaacttaatttgtcatttgcattgcattgtaggtgatattattaattgtgatctcttatttatttgggttggtatctacttacacttagcaattgctaataaatttttgaccaactctaaaagcaatgctcaactttaaccatctcctttgtaagccttacacttcacatgagccccattgtaagtgagctcatgcatattattccccacaacttgttgagcgatgaacatatgtgagctcacccttgctgtactcacatcccccaggtcaaggacaggtaccacaagataaggagcatgaaggatgccacgatgagttcatgagaggtctaagccgtcgtctcccagtcaactatggttgttggatcgttgccttcatatgatgtaattatttcgttattttgtacataactgaaagggaattaggcttacacctagttcctaaataattt

SEQ ID NO: 78534 - DNA, 586 bp, Zea Mays
atttcagtttcgccctattcaccccccctctaggcgactatcaataactcaattatatattaaagatgtgacattcgtttctgtaccatgagtcatcatatgtatgagacttgatcctagcacacatttgattcgcgtccgggtttgccccctaaatagaactggacaacccttacctacttacctttgctactctgattctttccaaaccttccttaatctttctcgtctattgttgctttactctgattactcttaccttttatcttctaaagacaaaagtggatttcacactttgaaatcatgtacctaaagtgacctttaggaataggagacctaatcttaggaacaaaaacaaaactatttttgtaggtatctatgcacttgaatgcttgttcttaagatgtgacattcatttctgtaccatgagtcatcatatgtgtgagacttgatcctagcacacttttgattcgcgtccgagtttgccccctaaatccaagtgtgacagatatgacgagctacatcgtccagcaccgtggcacgcaagccacgacgtgcaggaaaaagaccagcgcctccgtgtccg

SEQ ID NO: 78535 - DNA, 909 bp, Zea Mays
cgaagttccagttgtcgcgccaggctcatggcaactgctagtgattgggggtttgtggatgcaaatgtcgtagctgagtggtagagcgagtcctccagcacccgttgtcgttcgtccagtggcccggcgcacagtaggatggcctggaaacggtcctggtacttcacgtccgtgcccgttcgttggcactcggcgagctcgaacagtgggtcggatcatagtggtggtccaaagagcaggtggaggaggtcaacgaaccgataccagtgccaggatggagtaccctcgtcctgctggacttggatataccacatctgggtgccgtcctctagattgtacgacgccatccaaaccttttcctcttccaagattcgttgttgatggaaatacaagggaaatctagcttctgaaatcttggaggacaatcattgtggtattgtccggtgggcgctgtcggtgtttcggacccgcgaggaccgtcaatcgaccagtaaatttgttgctgcgtgtccctgcctagataggttgatgcaagatggaacacaagagggaaatgaggcttatgttatctcgcaccggggtgctcgtagtaggggttacaagcgtcccgagggagcgagggcgagaacgagagagagagagagagagatcccctgcgtgcgcccgtctcgtctgccccgcgtccctacgttccccctatgtccacgtcctgcgtcaacgtgaatgtatctcagtgtgaacctgaacgtggacccctcaacgtgccttaggaaggccctggacatccccttttacagatataaggagatgcccagctgtacaatggggtgtagctatgtgctaatgtggctggcggagaagcgccttgagccctgtacacgagctaacgtggccgtcggagaagtgcct

SEQ ID NO: 78536 - DNA, 503 bp, Zea Mays
gtctgctggagttggtctaagaagtgagtgtggacattggccaaaaaaaagtccataaaatttagtaaccttttctgaggtacaatattttgatgacatactcatatccatttgagtttactgataacggatggctccttccactgaaaagaaatgcggccaattctcttgcatgccattcttattattaaatttttttacccgtttgttttttttgattctgaggaattggaatcttactaatgtaataagctaattttttagaatatgacattttcatcactttccaaagttatcatataagcctatctcaaattcatagagtgagagatgaaaattgattctatagatttacatgatatgttttctatgtacaacttataacacactattctacttgctttgttataacataaatgtagtatataactatctctcatatgatttagaataatatataaatatcttacatgtttaaatatatgaacttaattagttttgtc

SEQ ID NO: 78537 - DNA, 299 bp, Zea Mays
cttagcgtcagatgaggcagagtttgcgcccgagggcctgtccgtccttttgttgtattacatttccatcaggggatggcaggtggcgtgcgtgcacagtagcgcatgtctaatcatgctattggtattggacaagaccgtggtcttgttgtcattgtacgcctgtaaccctgcgcggggtaggtacgcggattgaatgcagatgtcccccgttggccttcgggcacactttgtccttgtctcccgagatgggttcgggtgaggcggacatggttgcccaaggtcgagggagcctcggg

SEQ ID NO: 78538 - DNA, 923 bp, Zea Mays
ctcttgtgtgctttctctttgattctctgtgttcacaagaactagtttcaagctacttagccgttctaacttttataatcaagttttcgtggctattagtgttgaattttacaggatcacatatgcacccctttctaggtgctctcaattggtatcagagccgttatcttcatctaagggactaatcgcccgaagagttggatcctaagggaaagaggatgatggtcaacgacaaggagaaggaatccctcttcaacgagccaagggacgacaagcccgttgactctggctcgagtcataagaagaaggacgggaagaagaagtgacgcatcaagaagatcgtctactacgacagcgatgaatcctcttcttcaccaagagacgacgacgatgacgattcttcgttaaagaaaaagacggttaatcaaaactattcctttgattattcctgcattccgtacaattcaaatgaccatttactttctattcctcttgaaaaacccccacactttgatggagaggattactcattttggagtcataaaatgcgtagtcatctattttctctccatcctagcatttgggaaatcgtggagaatgaaatgcattttgatagtacggataatcctgtgatgattaatgaacaaattcataagaatgcacaagctaccactgttttgctagcatctttgtgcagggatgaatataacaaggttagcggcttggacaacgccaagcaaatctgggataccctcaagatctcacatgagggaaatgatgccactatgatcaccaagatggaactggtggaaggcgagctggggaggtttgccatgatcaggggagaggagccaactcaaacatacaacaggctcaagaccctggtcaacaagattaggagctatggaagcacaagatggacg

SEQ ID NO: 78539 - DNA, 554 bp, Zea Mays
ttcttaggaagtttgtgagcgggcgcatgatggtgaaggaagctcgatatgtggacgatgcactgaacggtccactacccgtctacgagcctcaacatgtggctcttaaggctactagcagcagggaggcgcttccaagcagcgtagcacaagtggaggctgctggcctcaacgaggatgagatggcacttatcatcaagcgcttcaagaccgcacttaaaggatgcaaggagcaccccaacaagaacaaaacaaagggaaagcgctcatgcttcaaatgcggtaagactggtcactttattgctcaatgtcccgataatgagaatgaccaggcacaagaaagacacgacaagaatgaaaagaaaaagaactacaagaaggcgaagggcgaggcgcaccttggaaaggagtgggactctgactgctcttcatccgactccgacgatgagggactggtcgcctcagccttcgataaatcttcactcttccccaacgaacaccttacgtgtctcatggccaaggagaaaaaggtaagtgttcgaaatacctctaag

SEQ ID NO: 78540 - DNA, 324 bp, Zea Mays
aaactgtagaaggatttttactaggatatgattcaaacataagggcatatagagtctttaacaagtcctctggacaagttgaagtttcttgtgacgttgtgtttgatgaaactaacggctctcaagtagagcaagttgatcttgatgagataggtgatgaagaggctctgtgcatcgcgctaagaaacatgtccattggggatgtgtgtcctaaggaatccaaagagtctccaagtgcacaagatcaaccatcctcctccacgcaagcatccccaccaactcaaaatgtggatgaggctcaagttgatgaaggagaagatcaag

SEQ ID NO: 78541 - DNA, 282 bp, Zea Mays
gaaaaacccgacccgaaataccgggtaaacccgaacgcccagctctactatcaaccacctcaacggggaataggtttgcaagaaccgaacctcggtaaaacaaatccgcgtgtcacactctttattcgcttgcgatttgttttgcaccctctctctcggactcgattatatttctaacgctaacccggtttgtagttgtgattaactttataaatttcagtttcgccctattcaccccccctctaggcgacattcagcctccaatggctcctagctgtcttt

SEQ ID NO: 78542 - DNA, 419 bp, Zea Mays
atttgatattttttgagttatttttggtaattcttacttttattgtttgcttgctcttttgtttaacatggtctaatcctcagtaaagctctgaaagctcaaaaggatgcagaaaacgagagatgtcagatagcacttggaaaccttcgatcggaggttataaccttgagaaacgaagctctcgcaatggacaagattttgctatctttggtcgagagactgaaatctagcgaagctaagctatttgctcaagcagaagcccacaaagctgtagtgcaagagctagaaaagaaagttatcgaagcaactgaaaattttgatgtggagctaacgaaacatgaaatatgtgaaatcgaacgatcaagggcacaaagaaatgttgacgagcttcgtgcagctaaagaaaaatgctacgatat

SEQ ID NO: 78543 - DNA, 254 bp, Zea Mays
gagcaattggtctaatcctagctatataatttatttctattatagaagtccatagacgttgtagtcttgctcatcttgatcgcaacctcgtccaaccaactgtgtaagtatagttttcgagtagactttatcgttgtttattgtgcaactatgtaattagacattatttctgcagatctgagcacaattctagccatgcacgcagtttgatttttgcagcatcgtgtgtctataatgtttgaaatcaaatggtg

SEQ ID NO: 78544 - DNA, 195 bp, Zea Mays
gtgaatgagaatagagttagacgaaatgcttgtagctcattgactcgctcgtttcgtagtcagtttgtctcgttttaattttttcacgagttaagctgatatcttagtttggttcgttaatcagctagctcaatttgttaatgagccatctcacgagctaaacaatatatcacatttcagtaaaatgaaacttta

SEQ ID NO: 78545 - DNA, 298 bp, Zea Mays
aaaaaagttgctgtctactgtgagctgtggaaaaaattgttgtaggctgtaagctgttaaaaagctaaaaatcgtttggtggaaatcactaaaagtcgttaaaaattcttcgatatatgttttcgcagttccatccgaaaaaccactaaaacaggtccagaaatgctttcagatttggattacgagaaagtcggcttttagaaaaagctgcttcctaaatctagccctttaattagcttttggcttttaaagagacaaaagtcaaagctaaaactcaaactaaacacacccttaatct

SEQ ID NO: 78546 - DNA, 446 bp, Zea Mays
gggagatgctaatccaaaagcatgttttggtatttcttgtgacagaacgcttgtttgtttgactggaagccaccaggtcacgcctgccgatcacagatgtattttattatgtgtccacttgttctttttttttttgattttttttttattttttttcctgcaagcagtccgtgactgattcagcctatatgttgcaagtgctacccgtctccaggactttttgtttcgagacaagtacgtgcccgtccgcagggtgggttggagcatacactgatgcagtagttgccttaggtaagttaaacgctcgatgtcgtttcatcctacacacgtgtgttgaacatcatatttagcatgtggacacggccgggtggtcctaaacaactgatactagctaaagttctcaacgatgtttctccagacagcgacacaatactagctaatttatc

SEQ ID NO: 78547 - DNA, 1784 bp, Zea Mays
tctgggcagcattattatgagaatgaaggtggatgtgctgctacttcccactccccttgatgagcaacaagcacctgcattgagtaatgcaagagtgagatgaaacatctcagcaaaagctaattgttctgacgagatatttaaaccacaaattgaattcatcaacattttaaaagagtcacaattaaaaatcagaaatgcttgtagatatagaactcagtagtcccactataaccaataccatctcatttcctcgaacaaccacaataggttctataacacttccctgcgtcaacaatacctgcaaatatcacttcaatgcatgcataggaatgcaatgtgtaggtactctatcttcatacctctgggggtataaaaccacatcatctgcaaatatcacttcaatgaatgcatatgaatgcaatgcatatgtcctctgccttcatacctctaagggtatgaagccgcatcgtaccccttctcgggcaacgtacatgctaagttgtaccggtacggtcggaccataggtcacgacaaaacttcatatgcaaatgagtcatgcaatgtatatggaatgctacatttatcaataaacttcacttccttcagatacaacacaaacctcaaataatacttcatttaccttcagatacaataccaacctcaaataatacttcatttaccttcaggggtgtgaattaatctcatgagtcatactcaaatcataatcatcatcaatatatgattgagcatcagtataatgcaagcaagtaaagcatcaccatagagtccaattatgaaagaatctgatacttctgaatattagagtgtaggcgatagaaataacaggtcagaacggaagcaaccaccgctacattcacttgccttcatcgaagaagaagaaatgtactagacatgatctggagtgtagccacctgctagtgggtataaaacttagtacaaatatttcacaaacatttgccatcaatcaacaaaacactcctacacttgaaaccaagacccagtggaaagactcccaccctgaaccacatgccatacagcagcaacgctgtttgttaattttgtatctttaaaattaaaacagcggtgatatcaaacaaatactctaggagtatctacacaaaatactctacaacttcagtattcaatagataattaaattctgccatctacaagttctaaaacatctgacaagataattgactgaatctgttttagacagcagtatggttaactttaaaattcgatatctccaaaactgctgaaccaaaaattatgaaattctgctggaagtaagaacttttatccctctacaaaagtcttcatagttggaagagccaattcggccatttactagatgaaacccaccagtgaacagacccactcatttttgtcaggtaaacaggaacagccacagtaaaacaaacataactggagtttcacaaatcatatgaatgcactctttaacaatctggaaagcttataaaattatctacaacttcttttaccaacccacagtttatatctgttgataaaattgcctaaatcttaagagaacagattctgcacagaattatgagactgaaaaactgctatagtaaaactgcaataactttctggtcggatgtccgattgaggtgttcttcgcggccacggaaagatctacaaattatctacgactcatacatagactttttatttttttgaggccactaagaccacggaaaactggcatgaacagaaactgtcgaatctgccattct

SEQ ID NO: 78548 - DNA, 405 bp, Zea Mays
caaacacttataacaactataagatgataagtgcaaatacaaaataaagtagtggacaagacacgattttcccatggttcagccaagactcgaatgcttgcctacatccacattggagttaggcaagtgacttggagtctattttaactccttcatccctttgctaaattttatcacggttgtgataaaccgggacttctactatcactttgttgtgctacaacaatcctaaggctaaccacaacttggtagctctctggaagatgatgaacgtaacccaaacgcttgcttaggatctagacactagctctcttttctctaagatcatgcactctagcacccacacctctctctttcactagattacacgctaatcacttgatctcactcagagatgcactagag

SEQ ID NO: 78549 - DNA, 353 bp, Zea Mays
agtcaacttatcgagatcaaaatatttttctgtttaagaacaatggagtgatgaagaagacaaaatcacgtttggattttagttgtgccgaacaggtgtcacacatggcttccttcatgggcctgaagtggatttcctctctcatttttttctcatttcttttttttttcttttttgagatgctggagctggattgcgcatcttggaattgcctaatcagattatgacccggaaatttgttgccgcgagcttaagagttaagaccgtgccgaacagttgtgttcatccgagtttgaccttttccaacttcaacagctctaaagttgaatcgttcaaaagttgaagacttgaag

SEQ ID NO: 78550 - DNA, 896 bp, Zea Mays
tctttattaccggtttgagtcaccaaccgttactaaaagcactttttagtaccggaccacgcagttcggactaaagattaatacctataattgtccagtttaaggatctggtatcgtagtcggtttttaaccggtactagctagcttagtagaccttttgtatagtatagtgtcagctgaagatcagaggagcaacgtactttgtgggcttgtagtacactggacggctacactatatacatgcctaagttagttggccgtacatacctacgtacgtactgggaagactaacctttcatgcatgcaggtcagcaaggctcggagagacgtggcctcacgtttcaaccggggagcgcgctacgtctacgcgtaccactgaaaaaatcaaccaaagcttgcgccctccgatgatcctgctccaagagtagtagtggcctttctaagcttcacatggccttgctagcacacagccccaacactgtgtcgaaaaactatggtgagcgcatgtgtcacactcgcttggaaaacgcttaaactatgccgccgtcgtcgtccagcctccagcagggtcagcttcagcctcagcagccggccgtgaggaaccctgcaatctctgagagagagaagaagaagagacaaacggacgtgcggcgcagtcgtgcagcacgtagacagacacccacagcgcccaccaacctactcgatcgatcgactccgtgcgtcctgcaatacattactgtaaaatcggatatgtgaaggccgtctctcaagacccggcggccggccggccggcgggagctcacgtaattattagcaaataaaatagacataaaaatttacgcgaaaaaatcctctgtaatataaaagagcaaacaaccacaagaaaacagatccat

SEQ ID NO: 78551 - DNA, 407 bp, Zea Mays
aaggaaaacatgaacaatcatttattattattgagtataaacaaaaatattattgaacaacaggtgtaccttcaatcggaaggaaatgattgtacaagcgtgacgcaaaaagcgaatgccaagtcagcgtgaacagtacggggatactgttcacctatttatagacacgggacacagcccttacaaaattacattcatgccctttacatctgacaataactctatagtaatctattgaggtctgaatagccttttcatctttaagtcggtttcactctctgccgttacgccgaagctttcctgctcaacaccttcggctctgtatcaagcttcgtattattccggtctgctgcaatgccgattttagtctgagggtacctgttcacatattgtactacagaaatact

SEQ ID NO: 78552 - DNA, 238 bp, Zea Mays
ggcaatggcacttgttgctgttgttgaagttatcgttgcagctgctgttgttgcgcccttctctcatggagtatctcctctctctcctggcgcaactcctggcgtatatcttctctttcctgacgcatctcctggcgttcttgctgcatctgggcatgcatatcagccatagtgtccgccatttgctgcatcaccgccatctgagctgcaataagtggatcaactccgcctggtggag

SEQ ID NO: 78553 - DNA, 943 bp, Zea Mays
gttggattagatccgaacggcgcagatgaatctttcatcataccaaacccgcatgctacgctagccgttggatccgaattcagcgcgcaagattaaatctgtactaaagcgaaccagtattcaatcacgctggttggatctgggatcaacggttctgattttatgagacgagattcgctctgagccgcccgatcaaactaccaatggctcggatcaaaccgacccgagaggatgccaggttccgatcgaccgcccattccccatctcacggtgcgcgcgttgtccccatcctcgaccacggctgcgcggaaccgcggcggcgcaactcgccggagttcgggcaaccgggtaaaacaagactaactcccccctaatacaagtcgtacgcgaagaagagggagtagcgaacacgatggtcaagcgcttacaggcgattatggcgcgcagtttgctacccacgggagggtgcggatcacaccggcggtaaagactccgatgaccaattcgcagcgattgagagcgcctccccggttcgcccggttaagacacgatgtgaggatccccgctaggcttcgtgactacaccctggccagcaatttcaagggaatatggataggtggcgcggcggcggcaaggaacacgaaggtggcgctgttctgggagagttgagctcacgcaaggatagtagggggagagacgggtcacgggaagcgctgcgcgagggttcttatgggtgggtagttgcgcgtggggacgatcctggatcttggcccgccatgcacggagctcgttgacggggtgggcggacggagtccgcgcgcggagggaagagcatctgacatcacggccccgcaagtcagcggagacgacaggagcgggcgcgagggacacagatcgccaagtgggtccggccggtcagtggcgtgcgtgcggaagcatctgc

SEQ ID NO: 78554 - DNA, 194 bp, Zea Mays
acataaaattgaggaaatcactatatatattccttgtatacaattttgagtattacaacgaacgtggcgtccgatgatggcgaaaacgatggtgcgcgcataatgtgaaacgtccttgtggacgtgcaatagccactacgcgagtcagtgttggggatgctgtcgggcgaatacggggaggaggcgcatgctcc

SEQ ID NO: 78555 - DNA, 124 bp, Zea Mays
ggcacgagcgtcgtgcggtgcttgggtcgtagcctcggcccatagtgctagttcgacccgacacaattatttttttttattttacaaaaaaaatcatacatatatattcaatattataaacacc

SEQ ID NO: 78556 - DNA, 451 bp, Zea Mays
gttttactggttagatagcttcacctagtgtcttccacccttcttacattacggtgtggattcaaaccccacctcctgcaccgctttttataacataccccacctgttgtaccgctttttaatattttacgctgagttgatttgaaagaaatgtagggacttttttgtaaaaagatgacacatgaggctatggttgcaggatccaaatttgatccctagtcctcttgcccttcttttttgttatttcgacaaacaggaggcgcaatgcactcgggctgcccgcggctaggcctacaaggtggacacgtgcagacagcgtaatgagtggacacatgcatgatgatttagacgttttaatattaataaccgtgtgttacaacgacacacaagtatatttgatacttatatgagatattgaactgatctaaagattcattaatctagatttacg

SEQ ID NO: 78557 - DNA, 599 bp, Zea Mays
agtacgtgaagtattactagctggtagctagcctggcggtacgctcatcagttcctattcactgttgcttctattattaccgggccgggaatgggatcaccatttggcctactatctctagccgccagtgtgcggtcaacagcaccctagcaccggtaggacggcaaaaatgtctggaaaagtgaagtagaaagtgtaggacacaaggacaactccatgctgtaacctgaaccagtagcatcccctgttcagatgcacggaagggttcacagggaaaaggaggcttgcgtgagatgcaaaaaaaaaaaaaaaggtaagataatgtctctgccaaatcttcagaataaacaatacagaacgcgtgatgtcaaatgcgctgtcctatccacgcgtgcatccgtagcgccatggctgacctgaccatcagagctcgatctgcgcgcgctcacgtagaggcagctagcgatcggatgcgtctccgcgcacccctcaaagatcgcattcgtatggatggatgcttcagaacagccaaaaggtagtgcttccggatgcaagcaaagcaaagacaagccgcgcgcgccgttggggcgcctgaaagg

SEQ ID NO: 78558 - DNA, 262 bp, Zea Mays
ctcattcatcatatgcatacatcatggttcttagtagcacctcacatagaatattttgacacccaagaaacatagataaatatttgttcaaatgaaaaaaggaggttaaagaaaaatagaaaaagaaatagaaatagaaatagaaaaagaaaaaaaaggaaatctatccccccgactgggccggatccagcccacctctcctccccgcacgctcgcgctcctcccctccctcacggcccacgcggcccatttcccgcgcgcc

SEQ ID NO: 78559 - DNA, 984 bp, Zea Mays
ttaccaatactgatttgattcgatatccgcgagggcgatgacagttttccagtttagatatttggttgagtcccaagagagcgcttacaggcctcgcctctctcgaacatcagagacttatcatccaaagtaagtccgacttcaagcttgcgagaacgtcgacagtctccgaataaaatctttgatcgaacccttggcaatcattaaactaagcttcacttcgacgacaaccagatcgatatcgggactcgacggcagcgcaacactaccacgagatggaggcaaactgacggcttaggacatatgcggaggctgacagcatgggacttcgcgatgggtagcgagactcgacggcgaacggcgcgacacgacgcgcggcgaagggagcaggcgtggctgccatgggcgaagtggcgcgcggacggcgagcagcaaggtgacgacgggctgcagcagggcgcaggggccaggctcggccaccagggagcgggagaaacgccggcgagctcggcaagctgcagggagaagggaggagctcgctggcgagcacacggcggccatggaggacgacgcgctggagctgaaacctgccagggacgtgcacgtccagccccatggcgcgcgcctccgcacgcccacgcgttggctgtcgcggccgactgcgctcgcacggccagaaagttgaagcaaggaagttgagcgcgtgtgagataaatagggagagagagagcggcgagcaggaaaccaagagagagagcgcagcgtcggggaaggagatgaggacgacgccgagcgaaaaaatatcgcgctgctggagctgaagatcgagtagagcggtggcgtacgcaggatgggcggcccagagacttccacagtgcgcggcggagggaaggatcaaggaagaagtctcgcgtactggagggatgaggaccagccgaccagagcgctgcgtagataggaagcagggagcggtggttggaagaa

SEQ ID NO: 78560 - DNA, 450 bp, Zea Mays
atttcttggatggacataaaatgtactcaggtttaaaacaagaatcccaaattacatctccctcctagaccatgcccttgttcgattggcataagctgatgtccccatcccagtttgcctgtttttgaagatcgccatgttgttttatcaaactaacctaggaaaagcatgttcggccattttcttgaatttgatgcctttggattccccatctctattgaaggcctaccaacttaatcttatgattattttccctccatatctaatcagatgttgatccttgaccttgtgatctctatgatgggcatagaaatatgcttggggctgaagtaacagtctcccatcatactccttttatcaagtttaggttatggccatgtcttgttcatttccttgggccataatctatttggctctctacttgtaaccattcttacaggtggagtatct

SEQ ID NO: 78561 - DNA, 333 bp, Zea Mays
ctcaataacatacaacattcaccatacgtaaagctaaaagaaagcttaacgaaaagagcattagcttttcaaaaacgtcgcaagtaacagttataataagagggtattattttcaaaaatatgtgatctatactttaagacatgagcataaaaatatcttaattaaaatattcaaatattaagttcaccaaattaatcttttatgaaacaccatatgtgatacgtttaagattaagggtttataagacgataaaacacgttataacgatattaagcctttttaaccttttagaacacatataagttatatctaaggttaatgggctacgaaac

SEQ ID NO: 78562 - DNA, 308 bp, Zea Mays
aaatgcaaacccattgaaatgatgcaaaataatactattgctaatatcttataagaaaggccatttaatccacttaatgcataccaccccttcccttaaataaaaagatgccaaacttcagaatgattgctcttgcgcaaaataaaagctaagaaaaatcagaactctgttgtttgatatttttcaaatatagtggtagtataaagcacctctttggctaaaaacttgagaaaaccctagtaaaataactaataggtattaatagctaacattttgtgccaagtcttgttatagcacctaaaagccag

SEQ ID NO: 78563 - DNA, 303 bp, Zea Mays
ctaaaatttggtaattttgtccagagaaaactattcactttctgatccccaaattttgaggcaaagaattatacaccagtaccaagccactgtaattttttgcagaatttttggaattttattaaagcaacttgtagttcaaacccactccaaaacattaaagagaataaaagaaaaagaaagaagaaataaacctcaccccaataagtccaacttgagtacttatcaattctcactaaggcttaaaaagaattcagtggaactccaaaaataaacctaccacttaccttagctaagtttgac

SEQ ID NO: 78564 - DNA, 747 bp, Zea Mays
cggcgcggtcatcagtagggtaaaactaacctgtctcacgacggtctaaacccagctcacgttccctattggtgggtgaacaatccaacacttggtgaattctgcttcacaatgataggaagagccgacatcgaaggatcaaaaagcaacgtcgctatgaacgcttggctgccacaagccagttatccctgtggtaacttttctgacacctctagcttcaaactccgaaggtctaaaggatcgataggccacgctttcacggttcgtattcgtactggaaatcagaatcaaacgagcttttacccttttgttccacacgagatttctgttctcgttgagctcatcttaggacacctgcgttatcttttaacagatgtgccgccccagccaaactccccacctgacaatgtcttccgcccggatcggcccggcgaggccgggccttggagccaaaaggaggggcggtgccccgcttccgacccacggaataagtaaaataacgttaaaagtagtggtatttcacttgcgcccggaggctcccacttatcctacacctctcaagtcatttcacaaagtcggactagagtcaagctcaacagggtcttctttccccgctgattccgccaagcccgttcccttggctgtggtttcgctggatagtagacagggacagtgggaatctcgttaatccattcatgcgcgtcactaattagatgacgaggcatttggctaccttaagagagtcat

SEQ ID NO: 78565 - DNA, 254 bp, Zea Mays
gtgctaagtcatgataaacttgctcttactgaaaaatatgatttattgtcttgttatcataataatctcttggatagacatatcatgcttgatgttgctcatgaggttgtaattgcgaacctaaattcatgtgaagctcattcttgcacacgtgcacatctagataatatatcaccatgtgctaaccccggttgctcaaaagaaagccaactcttggatgagcatcaagctgcaggatcaaaggaaaaagtgct

SEQ ID NO: 78566 - DNA, 142 bp, Zea Mays
aagctttctgggaatggcagggtattaccgccgctttatcaaaggattctccagcatagcaagacctatgaccgaacttctcaaaaaggataataagtttgtgtggactccaaaatgtgaggaaagtttctagatcatcaag

SEQ ID NO: 78567 - DNA, 379 bp, Zea Mays
ccagaatgtgagctcatgcggagggagtgaatcaaagggacgacgccagtccggcccggcctcactcacggtgtgctactgtgaggcccatttaaacctcggcggcatgcaggttggtccagcgtgcccctgctgttttttttttttttttttgtcttggactgctgaccgacgaacgaccgcgtgcctgatgtgctgtaactttttccttttattttataaaatacataaaattacaattttatatctcgacttcagaaaatcaccgctgccggaacttgccgtctcagagaggagtgttagggagctgtacgtaattttgttatttttttacaaataagtcctcgcttctcatcagctagcataggcgccatggaac

SEQ ID NO: 78568 - DNA, 911 bp, Zea Mays
ctcgtgttgaaaaggtggacgacacactgcccacgcgccgtgtgaccttttaaaagaactgcgcgccaaaggcgcttcgctacggagcagagccgaagccgaggcgaggcgtgcatggaactgcacggattctgaggcgagatggtggcgtttcgtccctcgcggttcccgccagccctgtgcgaaattgctgccgcggttcccgcttcttccatagccatccacacaagtacagaacagcgcagcttgactgccaaaaacgatgtgctccctaatcaacaagcgaaccgggcgtgccgccatggcggcgcccaaagacaaggagcacggttggtggaagccgttaccgcgtactactagcagaagcgaagcagactgcgcacgtcgcgacgggcagtagccaaggttcagcacttcagctggagctgctgcgtcggcaactgccgccgactcggcatcgcccggcggccgtgcgccggcctcgcgctcgcgggtggagtcggcggcgcctccaaaaggtgcggcgctgaccgcctggcctggcacaaccaggcgcggcctggcctgtccccgtcgcgtcacgctcgacgattctgacccgcctgtcgcggccagcactcgcggcgggccgtgaccggcgctcgggtcatcgttcggcgcggaacacccgtccttttcgggcagcccgccgcaccggcggtgaagacatggagcaggtgcctctgcctgccacacgcggaggaggcgataatcgctctctttgtcatttcaaatcattttttcttcttctgtatgaaaagtatcagcgtatgaccgagttgtgttatgtcgattctagtattttacgataatacgattataccaaatcaaaacgatatcgattctattaccgtatcgaaacgatatcagtg

SEQ ID NO: 78569 - DNA, 580 bp, Zea Mays
atgcctctaaaaaccataatctaccttgattttgtaccaatagaataggcacgaccaaagataatagtaggataaaagaagataagaagggctactttggaaaccctattttttaagggatttatatttttttctcgggatattacaaaaatttcttgagaaataagtacccaaactagccgaatagtggtaataagccttttttttttttttttgctgacgatagctatatagagctcgcggatgaatgaaatgtggtgtacagagagaaaaccgaagcaatcaaacaaataaacataagaaaatgtccaacaacttatccctccctgtatatataattaaactccactctacaaataatacagtatacagtgaaaaaacagtctatagtagattcctggatacggtctaacaacttacaaaactttttcatgtagaacttttctatgtaaaagaactattctctgcgaggaataaggccaaagatatatactccctccgtttcgttttatttgtcgcttgatagtgtaaaattgtactatccagcgacaaataaaaagaaacggagggagtagctgtc

SEQ ID NO: 78570 - DNA, 271 bp, Zea Mays
tgaggcacagagaaatacaataaaaacataataccacaaatttaataagtatcattagtgattacattatcggagtttcagaaataataaccataaattttaatgcagcggaaataactaacggagaaaaccgagtaacatggcgaagcctggccacgctactcctcctggtcctctcctgcggaagcaataaccctctcgaccatctatcccggtggtagggatgaaggccaagtcacaccagcaaccaatcatcctaaagagtacctgc

SEQ ID NO: 78571 - DNA, 445 bp, Zea Mays
gcaacctttgcccattccacagggagcttggcaagatcttgcaatggattttatagaaggtcttccaaagtctgaagggtatgacacaattttggtggtggttgatcggttcactaagtatgcccatttttttcactaaagcatcctttttcagcttctatggttgccaaagtgtttttggataatgtggttcgtcttcatgggactccaagatctgtggtctcggatagagataagatatttactagccatttttggaagtctctgtttcaggctttaaacaccaagctggctcttactacagcatatcatccccagtctgatggacagtccgagagggttaatcaatgtttggagatgtatttgcgttgtgctatttccaacagtcctaaacagtggagaacttggttaccattggctgaattttggtacaactcttcatatc

SEQ ID NO: 78572 - DNA, 486 bp, Zea Mays
aaagaaaatacagtacagacgcaagatccaaggcctgcgactgcgagtcgactggacgcctttcacctcctcctcgggaatctgaaaccgctgggggctcgcagagtgatcggatcagatccgtctgtccatcggtcggtgacgtccaactgtagcgtattgtaccgtccttgtagcagtagtattacaggagtagtagagtgatcaactgatagctgatcagagaagaaggcttgaagcgaagggagggaaccagagtttttttttcaccctttctctctctctctgcagctggttgggggaagccgcaccgccgtgtagtgcagtgcaggccagcttttttattggtttgggctagttgtgcaacagtatttgtactagtactgccgcgggcagaataatgtgccgctagcgaccagaaggcggcgagtcactcttgcgtggcaaaagcgtacggcgatggactatagtcctcggcgatgagac

SEQ ID NO: 78573 - DNA, 322 bp, Zea Mays
gtgatatattaccattattgcgacgattcaaccgattatatgtttatgttgattttgaatggtttttacccaatcgaattttatagaagctgtctgaaaagctgagtgtttggcagtccgcagcagcttttggtggccagaagctgcgaaaagctgaaacaaacatgcctaaacatgtaccacgggcggcccacggcgtctgcgtttggccaaatcaccgccccggcgccacgagaggctgaggtggatcctaggctcctagctaccaggcaggcagtgcaccgcccccatatgctgctgctcgcggttgtctcggaaccaa

SEQ ID NO: 78574 - DNA, 802 bp, Zea Mays
agtctccgtataccatcaatctcttgatgcccaatgatatggcgatgttcaatccatggatcaaggcttcatactcggctgtcacacccgactttaaggaacaaagccaggtgcatctcatacatgcgccaagaagacaacatatataataacagagtgtatagagataaatgccataaaacatcagagtatttattacatagcggaagacttattacaaaataaaataatgaatataaaacgaactaaggatcgtcggcgccaatgtcaactaagaaacgccacctagatcagatcaaactcctcgccttgtggctcctcctgaaccacctgttcttctcctgtgggggggggtgtgagacagcaagggtgagctcacacatgatcatagctcaacaagttgtggggaaccagtggacataaactcacaaaggtgtgagttcatgtgatgtgtaaggctaagcaatgataggggttaaagctgagcattgcttttaagtagttggtcaaaattttattagcagttactaagtgtaagtaaataccaaaccataagtaaagtaatagaacacaatttataataaacccatgcaatgcaaatgacaaaattgaatttaagttccataatttaaacatcagagagtcctgagctgctcatgaccgtgagctcggctagtataccagttttacactctgcagaggttgtacccttttacccacaagtcatgttacccatctgccaaggggtcgcgaatcccatacacctctacctaggaagcgcggcagggcaacactacgaggc

SEQ ID NO: 78575 - DNA, 1448 bp, Zea Mays
agcagatcaaagtgtttctcatctatggacacatttgattcatctagataaatgagcaactcggatttggagctttctgtagcacttaactctaagaaagtttggaatccactagaaataacagaagctaaggagttgcttgtatcctttgaggaagaggctgattgggcattacttgggctatgttcactaatcttgcatcggtatatgacctcatacttcttgtacaacctttccaattctttatcaatggcatctatttctttttgagctcttaaggagtcataaatctgaccaaaacaccatctaatgtatctcattttgaacctagggtcaaggattttgtagcaataaccatgacattgtttctcacttcccaatatttatcaaacttgttcaacattgcatcagccatactcatcatatatgcatcacctgactgttgtgccagtttcaatgcaatcttgactttaattatgtagaggtaaaatacattggcagtgggataggttgatgctgaaaaggcagtatttgcttctgccattattcccaatattggtttgattttgtcatacaaaagccattgggagtctgaaggtttccattcgtagttgttgtctatttcagaatagtaaccaaaggcctccttatagtcaaggcaagaatctagcattttgtatgttgaaccccaccttgttttaacatcaaggcacaacccttgtcctactttaacagaatattggttgcaaacttctacaaacttgtacatacgggttggagacctcttaaagtacttcactgtgtttctaagatcagttatcaatgaatcaattggttgcaacccatcattcacaaccaaattgactatgtgggcagcacaacgaacattaaagtacatagggtcaaagctcgagttctttctagcaagaaacttggacttcagatttgtaatagcagaatcattactagaagcattatcaagagtgattgtcaagatcttatcctcaattttccattcaaccaaacattcaaaaacagcctgagctatgacaataccagtgtgtggaggatccaattcaataaagttcagaacacggcattgcaagatccaatcaacatcaacataatgtgccactaaacacatatactgaatgttttgatttgatgtccataaatcagtagttaaacttattgattcagcctctctaagactcttcttgattagttctttctcagattcatagatcttcatgcatacatttttaatagtcttcctaccaatagattcataattgttattcatccatttcatcaagatattgaaccatttatgctctaccattctaaatgcatattcatggacaattatcatcttggcaattaagactctagtgtgctcatgatcatattcagtgggattaacaacaacaggtccaccatctcaagta

SEQ ID NO: 78576 - DNA, 606 bp, Zea Mays
ttacattgtatcgctcaattagtaaataggaatgccttgcttaaggaccaagttgaaaagctaaaagatgaaaatctagcttttcaagaaaaatatgatatggttctatgttctcataaaaatcttatggatgatcatatcatgttaaatatcgctcatgaggttgtaatagaaaacttaaaatcccaacaacctcactcatgcacatgtattcaaattgaaactattttaccatgtgataatgcttgttgtcagtcgacaagcaaatcttcctttgagctagaatttgcaggaacaaaagaagatacatatcaaaagctcaaagaagaaaatgagaggctaaaaatgaacttgacacaactaaaagggaagtgcattactcaaccttctcaagataaccgtgatcacatggtgaagaagcttgagacgggaacaaccgtggcatgcgctaaatcccttgaagaaaatgtcaaggactcgaggattaccaagaggaaggaacaaaagaagaaatccttaaaacttgaagatcgcctttgctacatatgccgaaagaagggacatcaatgcaaggattgtcccattggtaacaaccccacttctagc

SEQ ID NO: 78577 - DNA, 798 bp, Zea Mays
ccaaatcaggtggcctcgccgcgggcggtggttgcgcgggctctgccggttcctcgggctctttgctccaccggaggctctgccggtgcctcgggctctttgctccaccggagactagggcctcgtacgggatgctggaggctgggacgtcaccgagcagctcgacgggaaagcttctacatctgcttctctcgtcccctccgccacgccgaggtggcggaacatcgtctatcctatattcgcatgtaggaatcaatcatccgagctcaaatcaaccaacagcacctatgctcctcgtgacatcatcccctggagatggtacgctgcagctcctctcccgctgcacaaaacttgttcatgtccatcgtccctcgtccctctcctccagaccacgcccaaatcaccacgattctacactgttccagaccacttcccgaagtcgaatttccccgagcacaactcgtttccaaattccaatcgctcgaaacccagtgtaaatttcattttttatggcgtgttcggttagctctcaatccatgtgtattgagtgagattggatgagttttaatcccaaaaagtctaacttcttctcatttttttttcaatctcatccaatccatatgtattgggaataaccgaacaagcccttacatggaaattgacaccgtcatttttttaccgtacgtcatataaagagccaaatttacatcgaatatcaaatagaaaagacttatattttggggaacatatctattgctcaaaggggtacggtgttcaagtgcactttttaaatttgat

SEQ ID NO: 78578 - DNA, 431 bp, Zea Mays
ggccacatgtccttgtctctttctatattccctttggagtcatgcttggtcttctagacccactaatttgcgattctcatagctgtttcatatgtagtgggatcaccttctgcatcgatgtcctcacacatataaatctcatcgctttctatgtctacacttgtgtaaactccataatcatcaggaatcgcagatcgtctagacctttgagaccttcataaacttgtttctagttctggttcgttcaggggctcctgcattggtgcatcacttggcgcgacactactactgtcacgtgaactctcctgtgcaactgacttagaagagccagattgtgcagaagttgaagtgacttgctctgtagtagttgcacttggtgatacaatatttgcagcaggggtttcacctcgagtcgttacaaccgttggtgg

SEQ ID NO: 78579 - DNA, 899 bp, Zea Mays
cagagattggatcaggaccttggtgtggtcgccgctgtattcgtgattgatgcaactcaatagggtgcgtcagtttcgactggttcctgcttgcatcctggtactgaactactgacgagaaactggcgttttggcaagcagtaaacagtctcatgtttcctcgaccagcagcctagcctgcagttttgctcggcgcggacgctgcgtccggattgcgacgcgtaactgacctgtgcccagcaaagatcttgagcagcaggatattttctggctcttcagcggctggcagtgcgccatgcatgccgccatctagtggagtttttttttttcccacgagaggtctgtgtagcgaaagcaacgtggaatatgttttcagcgatgcagctgtgattgttctcggtggacaggaaggagcaggcgactgggatgcccgagtggaattggagacgggtttggtttcatggggttgtgctttgcagccggtgacgtacgtttctgcagcgctgcccatgcatcggaagggatcatgacggcaggaccaggtgctttctgaacgtcgatgactcgatggtggtggctgaaccgagttggcgagtaccattcggggtttctgaatagcaatgtgagcagaaaaattctgcttgttctggaaaacaagaacatgtggactgaacggatagaaattctgctgtggcaacggaactggtgggcgtttatgcaagtttttcgttgcactgacgaaatgaaacgggcgtccgatttgaggttgtccatcgaagagcgtccaaaagaaagaaaaaaaaaagtactaaaagagagcgagatttaggtcctgaaaccgtaaactaaactgaaccgttactgtccccatttcaaattataaattattttaccctttt

SEQ ID NO: 78580 - DNA, 307 bp, Zea Mays
cctgcacagcttcacggaggcggacgacgccctcaagctccaccacatcgttcactactccctcgacgtcatcgacgagcgaggtagctacgcgtctctctctcgtcgacatgcacccttaccattttgcatacctgctttgtgaggggctctgggcatgcatagaagcttaatggttctagatgattatgatggacaaatgcaatggttgattcatatagtagttttaactcatcagtgatttgttggcgtatagaaatgtcaatctaccttttctcagtgctcttttcggctaactttttttttg

SEQ ID NO: 78581 - DNA, 335 bp, Zea Mays
ggaaaatgctatacaatacaaagaaattacatatataaataaataaacctttctcataatggtatttgaatttgtgtattttatctgagtatgaattggacaacagaatttgaatttaaatttgagatctaaaaataaaaagaaaagaaaacagaaaagaaaagagaaagaaaagaaaaaagaaaaatcacgcatgggccgaaatcctaagttctggccccacctttatctccctctgcacggcctagtcaccgttcctcgcgcccgtgcgaactcgtcattgctggtccgggcccacacgtcggtcgcttgtctccgcgcgcacgtactctgac

SEQ ID NO: 78582 - DNA, 102 bp, Zea Mays
gagtctattacataaccattgtctttaacataactatcaaagtgcggagaaacgaaacgtaaatgataagcctacacaggcagctgactgggggtttgccac

SEQ ID NO: 78583 - DNA, 280 bp, Zea Mays
ttttcttcttatttttttgcaggggcctaaacccttttttcactatgacaacccaaacaataaggatattgctaacagcccctttaaatcagatttaacaaatcttgttaatatagaaagtccagaaatctctacgatgattgcggagcgctcagaatgaattttgagacaaggtcagatccgttggaaagacgataagataagctttctagattgtatttaaacttccaaatcggatatgagatgtatccgtggtggcaaaaacgaaccagagatgttt

SEQ ID NO: 78584 - DNA, 151 bp, Zea Mays
cgacaatcgacaatcaaccatatccccgcaatttctagctcgattccccaaccgccgtgcttccgctctcgcaccgcgtcttccttgtcgtgtgctccttcctcagacccaggctctcccccgagtccgaatccgagtctgagatcagatc

SEQ ID NO: 78585 - DNA, 346 bp, Zea Mays
tgcttcgctcccttcatgtttaagcctaagcagcttgatgtgcttgtgccaaagactttttaagaactacacaacaaaccaacacttacaacacgcttttgtgtacaatgatcatctgcttgttgcaccgtacatgtatagtctatggagctgcaaactgttagagttatgtattgttgtactgatcaccgtttcgtaactgcatgtacactgtcttttagagacagttgtggaacctgcgttcgcgccatatgtattatattatcgtattgtatccttcaatatgtttgtgttcctacaatgtccaggtccctgtcatacttggagacacagatgactacatgtt

SEQ ID NO: 78586 - DNA, 234 bp, Zea Mays
gaaagcttgaaaatgagaaataatatagaaagagagaattaccataaaatacaaaataaaaaacctataaagttcatatcttgttcaaattgaacatttgatgagaagatagatttgccacaaaatctggaattttaaacttggggctgatttcaatttggaataaaaggaaaacaaaaaaaaaagaaaaacttcatctgggccaaatcccaactgccctcggcccattttgcc

SEQ ID NO: 78587 - DNA, 535 bp, Zea Mays
ctcaaagcacgaccagatgaatccgaggcgcgggccgacggtcgcctccaaaacgacactctaggcctcgcgtgtatcagacgagcacgggttgagaaaggagttcgcctgggattgtcgatggcgacacacgacccaaggtcccaacccaaatcaccaggagcgggaaagaagagatctgcggctccgctcagtgctcacatcaaagaactgttcagggagcccatctgccgtcttcgcagcgggacatgacgcggcggagcagacggagacccagaacctgcaacggttttctctacgccggcaacggaaccgaggtggcacgggcgggaagccgccatccggttctctcagcggcgacggcttcctggacctcgtccacgaaatctggggcacgtattcgaacgaagaggaaaaaataaaacactgagccatggcgaggaacgcagaagaatcgaaacgcaacggaaaagcgtggaaatcatggcgatggcgccaggagggacggccggaggtccggagcccgccgaggtag

SEQ ID NO: 78588 - DNA, 1185 bp, Zea Mays
ctcatattgtgtgttttagttgccacaaagcctagatgtggtttaaagtggttgcctgttagtcatactaattgtagaataaatctttgattctcttgatccatcgattatgtattgatacattgaggatctgatggttcccttttcgatgcatgcttgtggagccatttttttagaccacctatctattggtttgaaggaagtccttgcctagcctagagttggttgggtgtggctagtcacctattcctagatcatgtggtgtttacatcagcttaatatgtttgtcaaatgtgtgaaggattaggggttattattattgactttgtatgtctggtactttgagtgcatcgtatgatagaatgaaatgtaagtttctgaactacagtagatgaagacttatattatgtgtaggttatccttactagttggatatttttcttagttgagatgttgaacgaagtatagtgacatgggttaagcaagtattgtgttgttgttgggctatcagtgctctatgtagagtttttggcatttcttcgatgaactatgccgcacaagatgttattggcttcttttggctttattgctccattagttctatagattttctcccttttggtggggtgcatggaatgttagattacatgattatcttttcatgatggcaagaataaggtttaggaagattaggagttttgttccaatagaactacttgtttcatagtgctttaaggtgaggtgtttgatcttcttatacattcgtcgggtgtagatgtttcaccatttaattaaaattaatggttgaagttggtaagggttgtgcttggtgcatattaccccttcataaaagagtgttgtcttaagacattgatgttgatgtatagctgcatccaaatttgatggtgtgaaactggagtgttgattgcaactatgacatgctttgagcttcattacatattgtttcatgcttgatgttaggtcgtgtagtttccttagacaattagtccaaggtagaagttcttgtgttaattaagaccaataatggacccatgttttgaattgtggtgctatatggggtaccttgggtgttttgcttggagtggccgaattcgaggtcgaattctttttaaggggggtagagtgtaatatcccaaaaaaatgttgactaaaagttaatctctg

SEQ ID NO: 78589 - DNA, 329 bp, Zea Mays
gaaagggtacatcgggctaataatttgggttaatgctaaaacctggctttctattagtaaataataatctgactaactaaaagcaactgcttgacttattcccacataaagctagtccactacagccaaacaggatacttgctgagtatgttgatgtgtactcacccttgctctacacaccaaacccccccatccccaggttgtcagcattgcaaccactgctcaggcgaagatgaagctatggaaggagacttccaggagttccaagactacgacgagttctaggcgtgggttagcggcaacccccagtcgactgcctgtgaaggccg

SEQ ID NO: 78590 - DNA, 193 bp, Zea Mays
gttgaatttcataacaagactctaattaaaattagagattcaaatgaaaagaaaatgaatcaaaaaggaaaaaaaataaaaacaaaagagaaatagaaaaaaaaactgcgcctaggcctaatctccctgaactcggcccagttcatctcgtgcgcctgggttccgcctcactgacgggtcgggcctacccgcc

SEQ ID NO: 78591 - DNA, 1153 bp, Zea Mays
aatgtctcacgcacacacgcagaaaccagagccaaaaggccctctttctgcttgccaggtacattgctcatacatatgctttttttttaactctcctcgaccgatcgttccaggtaggtaaggatgaaaaacggtttcagaatttttcggtatcatcgaaatcgattttgatctttttcgatcggatttactggtaacatgtttttttgaaacagtattggttttcagaattttctatcggaatcagtatcaaagtcggcgtggtgttttaccaaccgtttccttcggttaccggtttctgtcagaaattactggatctgtgtctcgtatttttttcccgaaattatgtctcgggatttttcgaagttgttggaatttttttggaatttgtaaccaggtgatttctcacatcgccggtatgtattttcttttggacacattaagattttttttgggtcagatggtgctagaaggtagttggaattgacgatttggtatcttcaacgaatccacctttttctatgcatatgttatgtattagtaatatataatgatagagagccgacaatctgtctttttcacacacactatattctagggtttttctgtgagactgcgacagggaactctttatattagggaaaataaataagcataccatgtccgctgaagcaagtggatttgtgaactttgagtacgtgaacttgtgatatttatagacttgttatattgtgaacttgctatattataaacttgtaaacttgttatataatgaattatgaacttgcgatctctgccaactttgttgtattgtgaacatgttatagtgagatattttcatattgatatgcttaccgatcgtatgtattttagattttgatcattattggtgttttttttgcgtatcaaactttcgttttcgatgttttcgaaacaccgacatcgtttccattttcagaattatcgttttcgattccgtttccgataaacaaaattatgaaaacgtttccgataaaaaaattaaaaacagtaacggttttagtgtttacctatcgtttctctttctaattccacgtaggaatcctttacagctgcgtttcctaatacaaaagtgtattgtacaaacacgtgcatgcatggaaacttggttccg

SEQ ID NO: 78592 - DNA, 439 bp, Zea Mays
aaacaggcccgtatatggcccagtgcaactgggccgacggaaccaggccaccaatatcagtaggcctccaattatgaattctccatatacacgtggtccatgtatgctggtccaggatatacttggcctccaaatttgtgcattacgattggaattctaggctttgtttcttccttccgtagttccgccaatctcgctagctgaaatgacgccgatctgggagtgcgccgccaccacaaacgctccatcgccagtcatcacgccatcgatgccgagctactatggggccgtgatctcgccgttgccgacgctttgaccgtttgccgcacctggacgttgcaaggtcgacgcaacaagccaatcgagactgcaggtatgtgatcaggaaacactccattgtttttttcctttgcttgcaaattgcaatcgataggcgaat

SEQ ID NO: 78593 - DNA, 267 bp, Zea Mays
cagcttttacatttacatctttgggggatattgctcttatagagctgaaataaggaaaaagagaaattacatgctatggccccattaaaaacctttctccccctttgaaaaggaaaagggtgccataagaaaaaactaaaaactaaaaaataaaaaataaaaaagattacatcaggttacacataataccgctgaagctcatccgcattccaagatctaggaatgtcgttgtcgtccatatcctttaatctgtaggatccgggtctt

SEQ ID NO: 78594 - DNA, 454 bp, Zea Mays
caacatatagaagtgcaacatcaatgcaaatgagaacaagaatttgttttgattcaaatttggcatatttggatcattcttcgccaccacttggtttgtttttgcaaatcaaactcaatttcctatctctaagtcaaattctcttgttgaggcatagagaaaggtattccaagagaaattgatcaaagattcaaaatctccccctttttcccataatcaaacattctccccacaagagaccaacttttgacaagaagagacattaagagaattttgccaaaacaaaaattctaactctattattttcaaaattctcaagtggtagctgatccatttcttgctttggccttattttctccccctttggcatcaagcaccaaaacaggatcaatcttggcccctaaaccccattgcctcaccaaaatcttcaaataagagcaaaaggcaataagag

SEQ ID NO: 78595 - DNA, 725 bp, Zea Mays
ttgaaaaagcttatgacaaagtaaattggcacttcctttacaaaatgatggagaaaaaaggctttggggataaatggggagattgggtcatgaaaactatgaggggtggtaaagtggctatcagaacaaatgacaaaattggccctttcttcccaactcacataggggttagacaagtgtcacacccgggtttcgggacaccaagacccgggcgcgaacataatcaccaggtgtgctaggaccaagtctcacacatatgatgaatcatggtacagaaacgaatgtcacatctttactttataataggagttctgtacaaaataaataaataattgcatcgtaaggagacaacgatccagcaacccaaagttgactaggagacgacggcctagacccctcacgaactcgtcacaacatcctccatgcacctcatcctgtgatacctgttctttacctgtgaggggtgagacagcaagagtgagctcacatacgttcatcgctcaacaagttgtggggaataatgtgtatgaacttgctaaaggtgggagctcatgtgaagtgtaaggcttaccaaagaggatggttaaagctgagcattgcttctaaagttggtcacaattttattagcagttgctaagtgtaagtatatacctactcaaataagtaatagatcaaaatttgataacaacacctgcgatgcaatgcatatgacaaattgaatttag

SEQ ID NO: 78596 - DNA, 664 bp, Zea Mays
cctcccgcgacggccgaccacggaggagcagaggcctgcggcggcgtgccattgccgaccaacgccccaagcggcacccgatgcaagaacttcaaacgaactggtgctacccaagcagataggtaaggcgaactacatggatgagttctcacctgctgccgatttgtgaaggagctcggccacgccgtgatgtggccctatggtcaaacccaaagattgcgagcaattccgggctcccccgcacggataacgcacacccacgcgcggcgatcgatggtgacaagtccgaccacaccaatatcgcactggctcatgggtagccctcgcctccctcgttttctctctctaaatactttcttttctgtgttatccggtcgatgctctcagcccaagcttctttgactacacgatagatgggatcaaggtgggggggctcggcttatataggtgggtttgttaagattctcaaccaatgcctagatccatggaggggttcttgcgtgaccggcacgcgagattccccaattcggactcaaggttagtggcaatactgactattgggtcccaccaagaaggctcattgcagtggaggagggaggctagttgagcggtccgcatgtcagtgaccgcgccaggaggaaagatgggccagcttgagaggtcc

SEQ ID NO: 78597 - DNA, 158 bp, Zea Mays
ccggtggcccagttaggtttcttttctttttcttttatgtttttattttctgttttctttcctttttaacttctatacttcaaatttgaattccattctaattgtgagcttatactcattttaaatgtacaaattaaacccaaaaatatggatagttt

SEQ ID NO: 78598 - DNA, 537 bp, Zea Mays
caccccgagggtccacaaacaccccagaatgctacaaaacaacatttctgccatctatatataaaatttcggcagcatcccctttgcaaaattgcataaacgagggggcaacggtgtataaacatatatcatgacaagaacatactaagtgctattaatcggctagcaaagagaagttaaacatacgacatgaactgaattaactagtgcgcacgactagttaaaaaaacagacttcctttgacaataaatttctaattaaatcatggctgcacctcggcagtgctattgtgagagtgaaagtggacgtgctgctactcccctcattcccaacatgtatcaagtacctgcattgagtaatgcaagagtgagatgacacatctcagcaagtaaaataatatcaaactgtttaaccacataagaacattgttttaccaccacttgattccacaaccttcttattacgaaggtgcagcacgtatacaacgtacaacacacatagtcaccacacctcgcaggtagaaaccacaatagtaac

SEQ ID NO: 78599 - DNA, 475 bp, Zea Mays
cttgattattaccttggatgttacctttcatggaggcatggttgaggcttttggaagaggtattgattttcttcttttgttccctcctcttggtaatcctcaagtccttaacattttctttaagggttttagtgcatgccacggttgttcccgtctcaagcttcttcaccatgtggtcacggttatcttgagaaggttgagcaatgcacttccctttaagttgtgtcaagctcatctttagcctcttattttcttcttttagcttttgatatgtatcatcttttgttcctgtaaattctagctcaaaggaagatttgcttgtcgacggacaacaagtattagcacatggtaatatagtttcaatttgaatacatgtgcatgagtgaggttgttgagattttaagttttctattacaacctcatgagcaatgtttaatatgatatgatcatccataagattttcatgagaatatag

SEQ ID NO: 78600 - DNA, 245 bp, Zea Mays
taattaaataatttcatcacatgagagtatgaacaaagtgcatatttaatatgacttcaaaaaatttgcacttaagttgaattcaaaaatttagattcaaaaggattaagcataaaagaaaacaaaaaaaaataaaaattcaaaagaaaaagaaaagaaacccaactgggctcactctcccaaatccggcccaccttacctttataccgctcgcccagacaacccactctaccgccagcgctgcc

SEQ ID NO: 78601 - DNA, 1758 bp, Zea Mays
gcatatccagtggtccatgtacgaatcaaacttgtgatacatgtgtattgaaattattaattttacttatgcaaaatcacacttacttaaagttgtatggggccactatggattccctgtcttcaaattgaagcattgcgtgtcctatgtaggtggcgtatcttgcttcaaaatccttcttcagatcctggatacgcacctcaatttcttcgtctgttagcctctgtaatgcttcgttgccttttccgattctaaaagtgtggttatcctcacatatctttattgggttgagatacccaacccttttactggcactagcattgggattggtaccataaaggatctcctgctaatcatgttgtattctgcaatgcacacgtgcatgtcagatattgtaacaccccgggattcacaaacaccccagaatgctactaaactacacatctaacattcgtatataaaatttcgacagcatctcctttgaaaatggcataaacggggaagcaacaaagtataaatagatatcatgataagaaaacataatagacattaatagtctgctagcaatgggaagacaaccataacggcatgagctaaattatccagtgcgcacaactagttagaaacaaacgtcatttgacaagaagcttctaattaaatcatgactgcgcctaagcagtgttattataagagtgaaggtggatgtgctgctacttcccacttcccttgatgagcaacaagcacctgcattgagtaatgcaagagtgagatgaaacatctcagcaagcgaataattttgacgagatctttaaaccacaaattgaattcatcaacattttaaaagagtcacaattaaaatcagaaatacttgtagatatggaactcagtagtcccactataaccaataccatctcatttcctcgaacaaccacaataggttctataacacttccgtgcgtcaataatacctgcaaatatcacttcaatgtatgcataggaatgcaatgtgtaggtactctatcttcatacctctgagagtataaaaccacatcatctgcaaatatcacttcaatgaatgcatatgaatgcaatgcatatgtcctctgccttcatacctctaagggtatgaagccgcatcgtacccctcctcgggcaacgtacgatgctaaattgtaccggtacggtcggaccataggtcacgacaaaacttcagatgcaaatgagtcatgcaatgtatatggcatgctgcatttatcaataaccttcacttccttcagatacaatacaaacctcaaataatactttatttaccttcagatacaataccaacctcaaataatacttcatttaccttcagatacaataccaacctcaaataatacttcatttaccttcaggggtgtgaattaatctcatgaatcatactcgaatcataatcatcatcaatatatgattgagcatcagtataatgcaagcaagtaaagcatcaccatagagtccaattatgaaagaatccaatacttctgaatattagagtgtaggcaatagaaataacaggttagaacggaagcaaccaccgctacattcacttgccttcatcgaagaagaagaaatgtactagacatgatctggagtatagccacctgctagcgggcataaaacttagtacaaatatttcacaaacatttgccatcaatcaacaaaacactcctacacttgaaaccaagacccagtggaaagactcccaccctgaaccac

SEQ ID NO: 78602 - DNA, 510 bp, Zea Mays
cctcgcctgcaaatcccccctctcctcttttatttccccgtccctttctgctccatggacatgcatccaccgccttccgtgttggtcgcctgcgcagggcaggggcaggtccgcagcagcaccaaggacgtcgccgtgccatgccgcagcttttacagtacgatggaccaactctggggcatgccagcgacatctagcacactcttgggcacgggcacctagcgtactggctggaaggaggaagactcaacgtaggagcagagggtgcaggtataggtgtacatttgggtcgggcttgatgggccggcccgaagcacaaaaaaagcacggcccgaaataatttagtgctgggccggcacggcccgttatatcgggccgggtttgggccgaggtcacggcccatgggcgggcacgggcacggcccatttaaggcagacacgaaatgacccatatagaggcacgaaaaggcccatatatttattaaaaccacacttaatttcacactttcat

SEQ ID NO: 78603 - DNA, 50 bp, Zea Mays
ctcgatctttgcaacttatatacatacatccacagaaaatgtttgccgcc

SEQ ID NO: 78604 - DNA, 209 bp, Zea Mays
cgccgtggtaccaccacaccgatgacagaattccgacgcaccgattgtcgctgtgcccgatgcttccatccatgacttcctcacgtgctccccatcctccctgaccagtcaccggggctggaccttgggcgatggcggcatcatcatgcagaccccaaggtagtgctccttgagcgagcgagcaggatggagttcacggtagaggaggc

SEQ ID NO: 78605 - DNA, 282 bp, Zea Mays
agtagagcaagttgatcttgatgagataggtgatgaacaggctccatgcatagcgctaaggaacatgtccattggggatgtgtgtcctaaggaatccgaagagcccccatatgcacaagatcaatcatcctcctccacgcaagcatctccaccaactcaaaatgaggataaggctcaagttgatgaagggcaaaatcaagacgatgagccacctcaagataatggcaatgatcaagggggagatgcaaatgatcaagaaaaggaggatgaggaagaaccaag

SEQ ID NO: 78606 - DNA, 704 bp, Zea Mays
gcaagtttcgctgactggatcaagagatatggaggggtgaagatgggtttgtctcactgccgagcacagagagaagatcttgggtttgacgtctctagagcacgcatcctgatgccatcttctggtatgaggtagaggggttagttagacacatttttgtcaatgggagcatttggattagagtcaaggatcaaggtgaacgtgctcgatttttgttcaagggctgaaaattcagaaatctgaatttcagatttccccattgaacttccacttaaatggcttgtttggagtttttaacaaactattttggccaagctttcgtaatctttattgtagtttatttagtgtacttcaatgtttataattggcctaagccatgattttatgttcttcatggtctttcatcccttttcttcatttccacttaaatagcttaattagggttggtattagggtttcaacttttttctctttttgaaaatctcatttgttctgaacatgattctttagatataaacttagtggatcttgtattcttaagttgatttggggcttatgctcaatttggctcacatgaaatgatggttctcgagttagcactgagaaaagccctaggtgacactagggtgtcacagccttcccccttaaataaatctcgtcccgagatttgggtcggagtcctcccggggtgaagcgaagggtga

SEQ ID NO: 78607 - DNA, 490 bp, Zea Mays
aggaaatgagatgatattggttatattgggactactaagttctatatctacaagtatttctgatcttgattgtgattcttttaaaatgttgattaattcaatttgtggtttaaatatctcgtcagaacaattagcttgctgagatgtttcatctcactcttgcattactcaatgcaggtgcttgttgctcatcaaggggagtgggaagtagcagcacatccaccttcactctcataataatgctgctcagacacagtcatgaattaattagaaacttctggtcaaaggatgtttgtttttaactagtcgtgcgcactgattaattccgttcatgttcttatggttgtcttcccattgctagcagattattaatgtcttttatgttttcttatcatgatatctatttatactttgttgcatccccgtttatgcaattttcaaaggagatgaagtcgaaattttatatatgaatgttagatgtgtagtttag

SEQ ID NO: 78608 - DNA, 854 bp, Zea Mays
ttaaccttactagctcggatatttttcttagttgagttgttggatgaagtatagtgacattggttaccaagtattgtgttgttgtgctgtcaatgctctttgtggagcttttggcatttcttcgatgaaatgtgccgcgcagaatattattggcttcttgttggctttattgctccattagttctgtggattttctcccttttgtggggtgcaaagaatgttagattacatgattatcttttcatgatggcaagaataaggtttaggaagattaggatttttgtttcaatagaactacttgtttcatggtgctttaaggtgaggtgtttgatcttcttatacattcgtcgggtgtagatgtttcaccatttaattaaaattaattgttgaagttggtaagggttgtgcttggtgcatattaccccttcataaaagagtgttgtcttaagacattgatgttgatgtatagctgcatccaaatttgatggtgtgaaattgtagtgttgattgcaactatgaattgctttgagcttcattgcatgttgtttcatgcttgatgtcaggtcgtgtagtttccttagacaattagtccaaggtagaagttcttctggtaattaagaccaataatggacacatgttttgaatggtggtgctatatggggtaccttgggtgttttgcttggagtggccgaattcgaggtcgaattctttttaaggggggtagagtgtaatatcccaaaaaaaatgttgaccaaaagttaatctttggtgcgtggatgaggtaaagggttgtgggccattggatgcaaagatagaagtcatctgaggcgtcgtttctttctcccacaaaaaac

SEQ ID NO: 78609 - DNA, 1897 bp, Zea Mays
aatttgtagatctttccgtggccacgtagaacacctcaatcggacatcagaacagaaagttatgacagtttgattatagcagtttttcagtctcataattctgtgcagaatctgttctcttaagagttaggcaattttatcaacagaattaaactgtgggttggtaaaaaagttgtagataatttcataagctttccagattgttaaagagtgcattcatatgatttgtgaaactccagttatgtttgttttactgtggctgttcctgtttgcctgacaaaaatgagtgggtctgttcactggtgagtttcatctagtaaatggccgaattgactcttccaactatggagacttttgtagagggataaaagttcttacttccagcagaatttcataatttttggttcagtagtttgggagatatcgaattttaaagtgaaccatactgctgtctaaaacagattcagtcagttatcttgtgagatgttttagaacttgtagatggcagaatttaatcatccattgaatactgaagttgtagagtattttgtgtagatactcctagagtatttgtttgatatcaccgctgttttaattttaaagatgcaaaattaacaaacagcgctgctgctgtatggcatgtggttcagggtgggagtctttccactgggtcttggtttcaagtgtaggagtgttttgttgattgatggcaaatgtttgtgaaatatttgtactaagttttatgcccgctagcaggtggttacactccagattatgtctagtacatttcttcttcttcgatgaaggcaagtgaatgtagcggtggttgcttccgttctgacctgttatttctattgcctacactctaatattcagaagtattggattctttcataattggactctatggtgatactttacttgcttgcattatactgatgctcaatcatatattgatgatgattatgattcgagtatgattcatgagattaattcacacccctgaaggtaaatgaagtattatttgaggttggtattgtatctgaaggtaaataaagtattatttgaggtttgtattgtatctgaaggaagtgaaggttattgataaatgcagcatgtcatatacattgcatgactcatttgcatctgaagttttgtcgtgacctatggtccgaccgtaccggtataatttagcatcgtacgttgcccgaggaggggtacgatgcggcttcatacccttagaggtatgaaggcagaggacatatgcattgcattcatatgcattcattgaagtgatatttgcagatgatgtggttttatactctcagaggtatgaagatagagtacctacacattgcattcctatgcatacattgaagtgatatttgcaggtattgttgacgcggggaagtgttatagaacctattgtggttgttcgaggaaatgagatgatattggttatattgggactactaagttctatatctacaagtatttctgatcttgattgtgattcttttaaaatgttgattaattcaatttgtggtttaaatatctcgtcagaacaattagctcgctgagatgtttcatctcactcttgcattactcaatgcaggtgcttgttgctcatcaaggggagtgggaagtagcagcacatccaccttcactctcataataatgctgctcagacacagtcatgatttaattagaaacttctggtcaaaggatgtttgtttttaactagtcgtgcgcactgattaattccattcatgttgttatggttgtcttcccattgctagcagattattaatgtcttttatgttttcttatcatgatatctatttatactttgttgcatccccgtttatgcaattttcaaaggagatgaagtcgaaat

SEQ ID NO: 78610 - DNA, 206 bp, Zea Mays
caataatctgcattgttgaatttgtgtgttgtcgcgtcatttattgttggttacattatgttttagtttgggatccttctttcttccacttgtcaaaccctagcgcgccgtcacaatcttctgtttgatcacgccacgcatcaagtcaacatcgcatcctttttttctccttcgattacaaaaaaacagaaaaaaagaaagagaaa

SEQ ID NO: 78611 - DNA, 152 bp, Zea Mays
tgagaatatgtctcttatcctcagttcatgcctattgaaatggtttatagagaagaaaatgttttcttttaaccttggacaatgcttctgcaaatgaagttgttgtgaaagagattattctagagctcaataagcacaatcctttaatctgc

SEQ ID NO: 78612 - DNA, 287 bp, Zea Mays
tcttaatatacattattattgcttatcctattatttttttaggatgacgcttcttcttgggcctccatcctcagggaagagcacactcatgcgagcactcgctggcaagcttgacaaaaatctcaaggttgttccaccattatattctgtcagtttggcttgtgtgtacgatcgacatgcatgctaaatccttccttctgccgcaaaaaaaaaaaaaaaaaaacccaggtctctggcaacatcacatattgtggccatccaatttcagagttctatccagagaggac

SEQ ID NO: 78613 - DNA, 278 bp, Zea Mays
ccccttttccccacccttggccgcccctcccccttccccttgcagccaccctccactacttcctcctccctctagatctccccccacgcagcaaggatcgagaagaggaggggcaagatggattgaagaggaagagaggatcaaggagatgttctacccccatctcttgcagattttcttggggaaaccctaggtaaggataggatccttgttcctccctataattatatgcttttggaggttgtggatcatgtggattgaaggattagaggttggat

SEQ ID NO: 78614 - DNA, 1914 bp, Zea Mays
cttgaactttgatgagctttaccttgattcccaaaagccatcatacccttgagagtcttttctttagtcgggtaagtcttgttgagtaattgcatactcagggttttatcccttgttgtttttgtaggtgaagttttattcccttatctttgggttagttacttcatgtggatgacttgaagcttagaatgtttctatatatctcttatggaaaggcttcacccttccaattattgtaataagttatgcacttcgagtactatcaggacttgaaataaatacatctctttctaccatgtaaagcttgagttctggaatgtaaagtgtactttgtaaaagtcttccgctcgatctccaatgtgtgtgtatcaaatgtgattactgtaatatacctgttatgtgggagatccttgggatgatgagttctagttggcgaactcgatagccttgttaagttacccggtacacgtgcacagccatcggaggccattaaggcaaggattggttcatgtgggcctgataacttgggagggctgtcacagcatggtatcggagcgatcccccattagcatggatagtatagtaatcctttgataaacttcaaaatgattttgagtctaaatgatttttataaacttaagaacctataatcaaggcctgatagtagaagtgcaaataatatgtggttaaaactaaggactatcaggtggcttagtttaagatgctaaccactagcccacaacctgggaagggtaatacatacatgtgtaatgttatttttagtgtcattcagttttcaatggatcgacgctcaggtaaaggtgagatgtgagagcatgaccgaacaaccgtcggtctaggggagagtataaaaagcgctggattatatacatgttctacacatgtatatatgaaggctgcgatgtggagtaattacttttttgggaattcagtaccccatggatgtgtatgggtatacaaacatgggagtgctgagaagtgtaatgaatagttaccacaatgggctgtctgtggttaaagtgtggcagcggcgcctatgcgtggctcggcgcttaatgaggagctggcctccatatagaaatatatggagtataaactgtgacaaaatgtgtgaattgcatcatggaatttgggctgtaatggaattttctacaggtacactaactaaactctaggaaattacgactagttaactccggagtgattaggtatgccaccgccatagagcgtgcaagccactatatgctggcaagattgtgaggacgaataggacgagcatgcatcatgacatataactttaagttaaaccccctatgtagtagcttagtccatgtttcatccatcctattcatgctacttatctttgcttttctatactaccttttcctattcgtgaagccttgaaactcagttcatttggtgcacctgtagtttataaggttttggtgaacctgtggcttataaggaacaattgtcagaagatcttccaatagtgcacaacatgttccacgtgtcttcgttaaagaaatgtcttcgagtccccgagcatgttattgagatttcagatgttaaccgtggaccagatttaacctacttggaatatttcataaaggttttggatcagaaggatcggtcacttgaagaaaagttataaaattttacaagctacagtggaaccaacccaatgaagatgaaaccacataggaattggaggagtatctagaagagcgtgttcctgagtttctagtgccctgtaacctaaggtttgtgtagtttatttctgatgtaaaccaatagggacacacccctgtcttgtaggagtaatggggaaagaaactggtgacgcatttccttttccgttactaagcttagagttttaaatctcgggacgag

SEQ ID NO: 78615 - DNA, 1325 bp, Zea Mays
attaagtgtaccagcccaaaaactatatgcaactggctgaaaaaagtggtccaatttagggctgtcagatttcagacttggtgtaaatgcaaatcctgaatttcagtgttttggtgtaactttggagctctctattgctctatccatagggttataggttatgatgattataacacaattatagatctaaattaggagtataagtttgattaagatagttagccctaaggctacttggaacctagagaaaagctggcctaaagtagagctatctgaaagtgtggatttcagacttagtgaaattcagagtctgaatttcagtaatttgggcaaactttggacctctatagtttggaatctatgagggtttatctatgagtcactatgtaaaacctgtagaggaactataggattataaactttattaagcaactttccctagaaacatttggaacccaggaaaaagaatggttccatgtggtgctgctgtgtttctgaattttcagtttctgaattttcagattctgaatagtagctggatctagaattcagtattgatggctgttttggagctcatttgtggctgttctataaggctttagactatggtgcttgtagaggaatcaaagaccatatattggtgaacaacttcctcaaagggtggtggacatgatcctatacaaaagttggagtaacagctactcaaagtggactgccaggaaggacaaaacatatcaaaggcgaatcagcaagaagagctatgtccgagtcagtccagtgctacagaaccgtccagaagaaacagtcatatcttttgattcccaaaagctatgaaggtccataagtacttttcggaaagctcttgaagtctagtttccaatgcttctaaagccgacttaaccacatctaccagaaaggcagccgacctactttagtgctgactggtcagaaggtcaacagtctgcttgatgaccaagttttcgtattaaacttcatcattctacgaagtttcattaaacatgctatatatggtgagaaagcttatcaagttagctttccaatgcaaccagtcccacgtcatttgaagattcctagaagaagttattgccaaaatactgaaggctgcgcagaagtcaaacagccacacggaaatcagctctgcagatcttccgaagaggctccttcacattagctcgtgaaaatacttttgttttgtgtttgtacctcgctaaggctggttgttactagtataaatacccccctatgtctatgatgtaaggcagcttatgataatctaaaacagaacccctttattcaggtgtgtg

SEQ ID NO: 78616 - DNA, 235 bp, Zea Mays
aagagaatgacattcgaagagcagttttaccttaataataacaataatcacccatttcctataagtctcacccttcgcttcaccctgggaggactctggcccaaatctcgggacaaaattcctttaaggggggaaggctgtgacacctcagtgtcacctagggtttctctcaaaatgccaaaccaaggaccatcattttatgtgaaccaaattaagcatgagcatcaattgactt

SEQ ID NO: 78617 - DNA, 2099 bp, Zea Mays
agggactgatccgcgaagaaaacttaaaacacccgccgaggaccccaatgcaaagtagttttccatttaatcagttctattaatctttttaaataaccagagaacttagaaaatccataagttgatggattcttaatcaaaagttgtcaaactaattttgctggatcccaaatattatgaactatcatttaaaaatgataaaccctatgctttctgttctaaattttagagtttaaaaataaaaacagaaactgaccaaaccttgtttaattaaggaaaattagttttacttctgtgctaaacctaagaaaatttgtagatgttcaaaccttacttaagcactatttaaaaatagtaggaaccccagtattgaagaatatagtgtagatattcatttaaagctattttacccaaaacttaggaaaaattagaaagacattagaaattaatgaacattgagtggaattatttttcctagcttgcttaagtaacaaagaacctaggaaaaataaagagacctttagtctagatcagttttaaaataaaatgttttatttagcattatttgaactaaaaatcaattattagaattacaaaactatacccaaaatggataataaaaatccagtggacttacaactaccagagccccactgcaaaaataatgaacacctcagcccaacattttaagtaaggaaaataaatataaaatgataatgaggcatttttccaaataaatcatgaataacccctaatgatgcaataatgggcaaccaaaaattggctaagtccataatgagataaaccaccagagaaaaatgcaaacccatgaaaaaggagcaaaatcatgcgtattgctaataatttatgagaaaggccacttaatccaattaatgcataccaccccttcacttaagcaaaaagatgccaaacttcagaatgatttctcttgcgcaaaacaaaagctaagaaaaataagaactctattgtttgatatttttcaaatatagtggtagtagtaagcacctctttggttagaaacttgagaaaaccatagtaaaataactaaaaggtattaatggctagaaatttgtatcaagtcatgttatagcacctaaaagccagcaaaaataagttttagagaattacccactgttaaataatagttgtagttcaaagcaccccttctgccataaaatttgataattttgtccagagaaaactattcaccttctgacccccaaattttgaggcaaagagatatacaccagtaccaagccactgtaatttttacagaatttgtgaaattttatttaagcaacctgtagttcaaatccactccaaaacattaaagagaataaaagaaaagggaaggagaaataaacctcactccaataagtctagcttgagtacttatcaattctcactaaggcttaaaagaaatttagtggaccccaaaaataaacctaccacttaccttagctaaagtttgacccaatttaccaagtataccacccaagggtcttacataagtgaagttaaccttgtctaactcaagtaggtcatacatcgtcaaaagttgtaaattctaaagcacctatcatatcatgcatgtatcttacgcattgcattcattagattgtaatcttgtcgacggagagtacgtgctcatccccgagcaaggatctatccaggaggaggaccaggagcaagcttccgaggctgctattgaggatctccccgcagccccagcaattgaaggcaagcctcggtttatatgcataaccgtattattatatgctactttactatacttaatgcttgtaggcttgtaatgtgcacttaagtgtaggtgttgcttgaaacccctagttgcatgaacttaggattcctttttgagatgaatactagtatgctaggtcgagtagctgcttgctaatcaggatcttggtagaagtcgagtgatttttctagcactcgcgcgaggtcaggaattgattgtattcaccttgataataggatctatgttggtctatggacttggatccagggaggattccttgaccatgagacgggaaaaggaattaaggattaatgtg

SEQ ID NO: 78618 - DNA, 693 bp, Zea Mays
catcatgtatgcttagaaggagcaaatctagctaagttaatgatgatataatttgaaaagctaaaaattgattttagaaacagctagtgcttttggcaaaccaaacccctcagccaaatagctgcatagtctagaggtagaggagtagactcctcacaccggttaagtctagctgagtattagtatactcagccttgcttgtggcataatttttgcaggtaccattcaggaaatggttgatggtgtgacttggcctaccaccctgccaccgggttggacggtcgagtgggatgttgctccggcaggagaggagcacgaggagtagtgggctaggccttgcccatttcctcgataccgacgacctcgattatccgctgcactttattttgtgaactcttatttgctactcaaaaactccgatctatgtaataattcagcacttaatttgaggtttcctgttttattgtaattcttctgtgactcaccttcgagtgagattgtggaatttgatcctggttaagtggctccatcagactagatctgagggactgacgggttattctgatttaagtgtgttacggcccttgaggcgtgactcaggcacttaagctggaataatttgggtggttccgccacaaatctacttcattatcggaagattcctcatcactagaagaagtgtatttaggtgtc

SEQ ID NO: 78619 - DNA, 468 bp, Zea Mays
cgcgcgggctgctcggcggcctggtgcgatgtgcagcagaggagggagagggaagggcgtgggagagagagaagaggaggagagagaggaggaatggaggctggcggctgggagacagggagcaagggcggcggccggctagggttaggtgtattgggcccctagtgggccgattagggttagttagtttttttctttctttttttctttttttttcaataaaggacatataaaagtttatatatatatatattctcaaaatttagaaaacaaatacaatattattactaaaacaataaaaacttatttgaaaaaaattttatttttggaaattcctattatttaaataacggttcttgacacgagggaaataaaatcaaaatggaattcttgcaaacacttataaacaaaattagtaacataagaaatgcatattctaaaaatattattttaacaactcattaatat

SEQ ID NO: 78620 - DNA, 324 bp, Zea Mays
gttcaatccgggttgttgtttctcgcccggattcaaatcttcaaatataaataaagggtaagaattcatttgacacaggaaatattcatcgaatcaaatggaacacagtctgaaatactgttgttaacatcattctgatttgttctgattacgtctcgcctcgatctaaaaatcttggctcaaaaatatctgtgaaattctttaaagaaataaaaaaaaagaaaacagaaaaatctaaaaataaaaatcccagtcggctctatcctcccgccgcccctcccgtgagatttttcaagttgccgcccctattcttttttatatgcg

SEQ ID NO: 78621 - DNA, 748 bp, Zea Mays
ggcgcggtcatcagtagggtaaaactaacctgtctcacgacggtctaaacccagctcacgttccctattggtgggtgaacaatccaacacttggtgaattctgcttcacaatgataggaagagccgacatcgaaggatcaaaaagcaacgtcgctatgaacgcttggctgccacaagccagttatccctgtggtaacttttctgacacctctagcttcaaactccgaaggtctaaaggatcgataggccacgctttcacggttcgtattcgtactggaaatcagaatcaaacgagcttttacccttttgttccacacgagatttctgttctcgttgagctcatcttaggacacctgcgttatcttttaacagatgtgccgccccagccaaactccccacctgacaatgtcttccgcccggatcggcccggcgaggccgggccttggagccaaaaggaggggcggtgccccgcttccgacccacggaataagtaaaataacgttaaaagtagtggtatttcacttgcgcccggaggctcccacttatcctacacctctcaagtcatttcacaaagtcggactagagtcaagctcaacagggtcttctttccccgctgattccgccaagcccgttcccttggctgtggtttcgctggatagtagacagggacagtgggaatctcgttaatccattcatgcgcgtcactaattagatgacgaggcatttggctaccttaagagagtcatag

SEQ ID NO: 78622 - DNA, 371 bp, Zea Mays
aaaaaaatgaaaatgaataagttaaaactagagtggaatttgaggtccaaaatgatttctggaatttagaaaagagaagaaatgaatattatgaggagaaaaataagtaaataaaaatatatggttccaaaactagagtttgaatttgtgtaattaactcaatggaggaactcataaccaaatccaaattcaagtttgaattcaaaaaaaaaggggaaaaaaggaaagtaaaggaaaaataaaaagaaacagaaaaagaaaaagaaaagaaaaagagcctagctgggctcaatcttctcaattcggcccatctgctgttactctcgcgcggcccaacgcccgcgtgcgccgacagatggggcccgcgtgcc

SEQ ID NO: 78623 - DNA, 442 bp, Zea Mays
aatcgcctcagctgcgacctcgccgtcattctttggctcgctgtgtgccctgctccattgtgtcgatccgcccatctccttgagtccgtgcgcgcgcagcttcctcaagtcgtcgtgtgcccagctcgctccagctcgccggtcgagcttctcccttacgctcagatccggccgttaacgcccagtcatgtgttctttttcccagctcggatctcatcatctgccattctctaacccatgtgtcggtcggcatcatggagttttggtttgatcggctcgtctttgacctcgccggtgtcgtcgaaccgttgaaccccgaatcccggatgttatgcagaaataagcgaggtccctgtacatctcttatcaagtgctcggtcgaagacttcaattgaaggtcgtcatcgttcgtgcatcccaaagaaatcccaagaattaggtg

SEQ ID NO: 78624 - DNA, 380 bp, Zea Mays
ccaacaccccggaatgctactaaacaacacttctgacatctatatataaaatttcggcagcatcccccttgcaaaattgcataaatgagggggcaacagtgtataaacatatatcatgacaaaacatactaagtattattaatcggctagcaaagagaagttaaacatacgacatgaagtgaattaactagtgcgcacgactagttaaaaaaacaaacttcctttgacaataagtttctaattaaatcatggctgcgcctgggcggcgttattgtgagagtgaaagtggacgtgctgctactcccctcattcccaacatgtatcaagtacctgcattgagtaatgcaagagtgagatgacacatctcagcaagtaaaata

SEQ ID NO: 78625 - DNA, 231 bp, Zea Mays
atcaccttggattcctcctttcctccttcttttcttccttattcctccctccaaactcccatggaagactcgcacccacacgacggacaccaagcggggaggctccaccttagagagaaagaggtggggggggggctagggttgaggggtggcgctgcaatcacttggggaagaaggagagggattggggcggctgcaagagtggaagagagaggggaggggcggccaaag

SEQ ID NO: 78626 - DNA, 304 bp, Zea Mays
aatgttcctcatgtcggcgcaactgtcttgaagcataggctataactcggccctcttgcattaaaacacaacctagaccacgcccagatgcgtcacaatacacatcaaaaggcttttcaatgtcggctgagctaataccggagcagtggttaataacaccttcagttgctcaaaggctttgttgcatattaaggaccaattgaattttgtatcattcttcaataagcttgtgattggcttcacaagcttgaaaaaatccgggataaatcggcggtaataaccagccagtcctaggaaacttcgg

SEQ ID NO: 78627 - DNA, 252 bp, Zea Mays
ctgatgatagcccgacctgaggtcaatcttggaaaatacccgagctccggtaagctgatcgaataagatatcaatcctaggaagagtgtacttattcttgattgtgacctcattaaggggtctgtaatccatgcacatccgaagcgtctgatccttcttcttgacaaagattgtgggacaaccccaaggtgacgaactaggccggatgaatcccttctctagtagatcttgtaattgagtctttgagctctg

SEQ ID NO: 78628 - DNA, 729 bp, Zea Mays
ctcgcggacagtcttgcgtataacagcctaaaggtatgggaattagacgttttgaaaaaattttacaatacgtaattcattcttttattcttataccaagtcttcacatatagggcttaatcctaagcaacgcattaagagcacaaaagagtgccgaagatgagagctatgaaattgcgttcaacaaccttcggtcagaagttattaaactgagaaacgaagctctggagaaggataaaattttgctcacattggtagacaaggtaaaaaaggacgaagttgcctcaaagatccaggccgaagcccaaaaacgtgagattaaagatcttcagaaacagctagctagagctaaagaggaacgtgtgtttgaagaaacaaaacgagagcttagtgatcagttggttaatcatttagagttaagtgttcaggagcttcgggcatcccagaggaaatgctatgttaaatctatagaatgcgtcaaaaagataaaatccagcttcgccagcgttggcgcattttctagtgaagaaaagtttctccagaggcaatcccgaaggtccattggaatggattagtcatgaagcagaagccttcgaggaaatcctgagcagccgcggtgatatctgcgcattttcgggcgccagaggagttgctaccgttctagagaagaaaggttgtgatcatattaagctgcttgcacaatccgaagccactttatccgctgaagat

SEQ ID NO: 78629 - DNA, 151 bp, Zea Mays
ctcccatctcctcctccctcaaacccttgcagccacaccacctaacctagcccccccccatctcctcctcccaaggtgccattccctgccgctcggatctacgtcgcgtggtgcaaatctccaattgtttacggtggagggaagaagggag

SEQ ID NO: 78630 - DNA, 1169 bp, Zea Mays
attttatcaacggaatcaaactgtgggttggtaaaagaagttatagataatttcataagctttccatattgttaaagattgcattcatatgatttgtgaaactccaattatgtttgttttactgtggctgttcctgtttgcctgacaaaaatgagtgggtctgttcactggtgggtttcatctagtaaatggccaaattggctcttccaactatggagacttttgtagagggataaaagttcttacttccaacagaatttcataatttttggttcagtagtttgggagatatcgaattttaaagttaaccatactgctgtctaaaacagattcagtcagttatcttgtcagatgttttagaacttgtagatggcagaatttaattatccattgaatactgaagttgtagagtattttgtgtagatactcctagagtatttgtttgatatcaccgctgttttaattttaaagatacaaaattaacaaacagcgctgctgctgtatggcatgtggttcagggtgggagtctttccactgggtcttggtttcaagtgtaggagtgttttgttgattgatggcaaatgtttgtgaaatatttgtactaagttttatgcccgctagtaggtggctatactccagatcatgtctagtacatttcttcttcttcgatgaaggcaagtgaatgtagcggtggttgcttccgttctgacctgttatttctattgcctacactctaatattcagaagtattggattctttcataattggtctctatggtgatgctttacttgcttgcattatactgatgctcaatcatatattgatgatgattatgattcgagtatgattcatgagattaattcacacccctgaaggtaaataaagtattatttgaggttgctattgtatctgaaggtaaatgaagtattatttgaggttggtattgtatctgaaggtaaataaagtattatttgaggtttgtattgtatctgaaggaagtgaaggttattgataaatgcagcatgccatatacattgcatgactcatttgcatctgaagttttatcgtgacctatggtccgaccgtaccggtacaatttagcatcgtacgttgcccgaggaggggtacgatgcggcttcatacccttagaggtatgaaggcagaggac

SEQ ID NO: 78631 - DNA, 376 bp, Zea Mays
cttgctgagatgtttcatctcactcttgcattactcaatgcaggtgcttgttgctcatcaagggaagtgggaagtagcagcacatccaccttcactcttataataacactgcttaggcgcagtcatgatttaattagaagcttcttgtcaaaggacgtttgtttctaactagttatgcgcactggataatttagctcatgccgttatggttgtcttcctattgctagcagactattaatgtctattatgttttcttatcatgatatctatttatactttgttgcttccccgtttatgccattttcaaaggagatgctgtcgaaattttatatacgaatgttagatgtgtagtttagtagcattctggggtgtttgt

SEQ ID NO: 78632 - DNA, 522 bp, Zea Mays
gttttatccactgatattacgtgcttaaatccatactcattgtcgagcagaatataaactccaggggtgttatattaattatttccctaaagaaaatatttttgtgtgtatgtttaaaagcattcgcctaaaggattaaaaatgataataagtaattgttaaataaataaaaagatctgaatttcatgctggagcttcttgtttgtgcattgaacttgaaattaaattaaaaacggatttgaattcaaatttgaattgaagaaaaaaatataaaaaacaaaaaaaaccacaaacctgcactttgggtcgaatcccacgatgtcggcccaaaactgttaaaattgcgcgcggcccaacactcgtaagacgcacaccgaccgcactcactcgacaactgacatgtgcggcccacgtgtagtccccgcgccaccacgcgcgcgcactccctagcgctgacatgtggccctgcctggccagtcacccgctccgcagcctttgtcttcacacgcaggcaccgttgcg

SEQ ID NO: 78633 - DNA, 207 bp, Zea Mays
gagtggagcggaagtctttacaataagataatatatattaacaagctattaagtttacaaaccacgaagtatttattattacatgcccgaggtagagttaaagtgctaacttattacatcaactgggaagaagccatcttcccgcagtacacacataatgcacacaagtaaaagtcaccattatgagtttaacaaaactcatatgtg

SEQ ID NO: 78634 - DNA, 310 bp, Zea Mays
gaagatggtcagtcaggctattctaggaaattataagatttgtctacatcaggagtttaagtgaaagaagtgaaggatatacctgatgtgagggagttctcggatatgttcctcgaagatttgactagttgcctccaaaaagggatgtggaattgcgattgggttgcagtccaggactccattcaccctgaaggtagcaataggtaccaaggtttgaaatagagattttggtggacctatagcttataaggtacaattgccaaaaggaccttcaacactgcacgacatgttccacgtgtcccaatggaag

SEQ ID NO: 78635 - DNA, 120 bp, Zea Mays
cggctggtgaagacactccagtggcagctgtgccggctgacgaagaccctgcagcgtcggttgctccttcgcaggtggcgggattgtgttaggggcattgggtttaggactttatttttg

SEQ ID NO: 78636 - DNA, 227 bp, Zea Mays
agtgtctgatcccctggctggggcgatgaccgagaaggaccggcggtgaaaggtggcgtcgaagcataatgttggcgagatgtcgcgaagtggtaggcgtcgaaggatggggatggaacgaacctgatgaggacatcactcccatggatacaaacaacactcctcaagttaactcctcaattactcacgcacacgctcgacaattgaatttacaggtgatctcgttc

SEQ ID NO: 78637 - DNA, 542 bp, Zea Mays
gtttaaacaagttgacgtccagaatctgttccggcgctgcgacgccatcttttgatcttttgggccgtgtatctttgttgagcccattaggggcacgtccagggggtcttgcataaccctagagtctttattagtagccgccacattcttgttagggagggttttgcttaagttaatttgttaagaatagttcgccgttagatcggtttgttagaccccaactcgagagcttaatcatccatccgcaattcttcagattgtgttctttctcgttcttgcttgtgtcttcgattcgcaggcaaggattagccttcgtggcgaggtcaatcgagcagcgcacagttgataaccagaggagaagtggtgctgcgattgcggggttctagtcttgttgattggaagtcggatcgtctgtatgacatctccaccaaatcgatagttaccttcacctgacggaagatcgggcacccccgttcctatcaagtggtattcaaagactcaggtattaccgtcaggcttaccctagtctagtttatgttttt

SEQ ID NO: 78638 - DNA, 353 bp, Zea Mays
gacgcctgcccgaagaccgttgatggcgtagtggattgcgatgtggtcatcaactgatggcagttgcgatttgagcgtcagaatttcctgtagtactcgcgaagggtttccttctcttgctgcttgcagagggataactcagccagggtgtctgtatcgggtcggtacccttggaagttgagcaggaacttgtcgcgaagccctttctaggagtcaatggacagtggcggtaacctggtgtaccaagtcaaggccgggcctttgagtgcaacgatgaaggatttggccattgtggcgtcgtaccctccggacgatgcgacggctacaggtagctcatgatgtactgagccggg

SEQ ID NO: 78639 - DNA, 165 bp, Zea Mays
gggcgccaaatgttggaacctgcctgcctggggaagttgatccaacgtggaagtggaaagtgtgtttgcaaagtttagcacggaatggcaaaagcttcgttaatctccgtgtgtatgggcactgtacaggggtatttataggtactcgaggggccgcatgtccct

SEQ ID NO: 78640 - DNA, 1486 bp, Zea Mays
ttgtagaatataaactttgaagcaaagaattagtgtcatctacttaggaatattaaataagctatgttccttgtttaattaaacattttaagccatgtaggtttgctcaaggatatgaattgaaaacgagcaatcctaccatatgattgacctagtatatgcatgcaactccacatgaaaacttaggcatataaagtaaaaactagatacaagaaaaatagatacgcatatctaaagacaagaaaatgcaacaaatctagttaccttagtcatataggtggagaatttgggtccaaagtattcactaacctacttgacaataaccttgatccgatgtgatgcattccatgatatacatcccaattttggcacgtctccaaattccctgaagtccttcggacttctcacttacctcttgggatccaaactttcttggtctttccatggttaaaataatatcttttggcacccagatacgtttggcccccttttctttgttggcgttaattgctatcatttccttcacttggtcttcggacttctcacttacctctgccatttgcgtttcggcttctggcttctacggaattcctcttcgttctgttttttttgtcgctgcaaatgattaaatataaactaccttcgcatagcaagatgcatgaatcagtgccgcactattgaaaaggcagttgactttttggttaaagcaggtcaggttgagcgttgcgttgatcatgtttatgttgggggtgttcaaaagaaagttcagaccaagtgaagcacgtttcgcttctaatgcctctctctagaaagggacaaggatatagagaatatattagtactagatatatgtagctgatcaaagacaaacaatgcctctctctagaaagagacaaggatatagagaatatattagtactagatatatgtagctgatcaaagacaaactgtataacgcatgtcaattattttcattcatacatgatacatgaggttgaatgtgatttttttgttgtggttgtttctgatttttaaatcttctctttacagctgtgtagtttagccttaactgaaaggattcgtctgctattatgtttgcatcgagctagacatggtttggcactgcgcatcatataacatgcctacaatgcgagcagaggtacctgctcccacaatggggagaatctgtcatgagctcatggcgcatggatttgtcatgaggcgagcacgcggcacggctgctgccccggctccaactcactactcacaagcgcgaggagaaaaacgagtgtatctgtccttttctattcttttcatattatttgaaattggcttcccacagcggttgatgttctatgctaccaaacaccaacaattgtccttccgtaccagttgaactcgctgttgatgtccgaaggcagtaatttgttgcatcgacatatatacaccttacttctctcttaggtccgggtcaaagacataaaag

SEQ ID NO: 78641 - DNA, 325 bp, Zea Mays
accttatcgaggatgatgcgagtgggcgggcagtccacgcagaagagcggaactgcggcggattaggctcgacagtgagaaattacacaggctccggtgaacttcgctcgaatcaatggggcgcacgccttccacgaggtgcgaggatcacccaaagtcgagtcccaatcccagactcgtcgtggttccgatttccaccgtcggtggtccgccatgctagcgacccactgcccctcccacgatttcggtggctaacccgggcgttggtgcgatggtggcgcacgaaagggtgaggaggtcatcgtagccccaatttatgggcggg

SEQ ID NO: 78642 - DNA, 565 bp, Zea Mays
gaaaataaaattatcaagactcaaaaattattgttttatttacacatattcttgaaagggtcttatttacaaaattgtattcttcttcctctctctccttcaagtgcagacacaggaactgccatgggcactagggccgaccaggggaggaggccgcactaggagagaaggggcgagggttggccgtgtctggtgaggagcacaggatgagggctgccattttaatagtgaaaacgaggacgaaaaatgaagaataatggagtttgttcaccggataagaagaccctcaccggagcagaggataaatctgtcgtttgacggcgaaccggaggtccgatcgatgaatcaaaaccaccgagacgagactaatgcagcggtactctcggatctcgctaacaatgcacgaattgaaagtaatttcttgccagagttgttaccagaattagaactgccccgaatttcggcgaggaactaacggtgctacggatctcggcttgcgaactaacggtgctacggatctcggctaacggtgatatttggaacgggctcagcgagaggattctag

SEQ ID NO: 78643 - DNA, 288 bp, Zea Mays
ggacaacttgccttatacttgcgataacctgttgtccaagtgttgacccaaaagtgggcttctgattcctcgtcacctcgcctctactcgtagcaatatatacaatcaaacaaataatgtatatggtaacattacatcaaagcatattaacaaacaacataagagtatcctacgcatcgctacgagatcaaaggttcaagaaccattaaaatcgaagttaaaacaaagaatttatggataaaatggtattttaggcgaaataaatctaatagatccgatctaacatat

SEQ ID NO: 78644 - DNA, 391 bp, Zea Mays
gttaggggagagaagagaaagagtggggagggagagcgaggagtacaggggcggtggcggctgagaaagccagcaggggcgcgcgtgactaggtttaggagatgttagatgggccctggtgggccggttttagattagggtttttttctttttttttcttttctaaattccgaaatacatttttatatagctcaaaaattcataaaaaatgcaccaaaactatttataaataaaatacttgtttttagtctaataactattatattatttaattattatattaattactaggtttttctttaaaaagaattgataaaaaaaacttccgataatcaatcaagcgcatacaaagaaaaatgatcaaaatgcaaataaatcattagacacttaa

SEQ ID NO: 78645 - DNA, 859 bp, Zea Mays
ggtgcactaataatcgcatatctctaacaaatttcacaacgcacatacacataaattgtgaatcacacgtgttcatattacaacaaacaaaatatacaactcatgaatcgaatcaaaacgtacttttataaaatacacaaaataatttgggtcgtcttcaaccttcggttcgtgcatgcgacggggaggactcgacggggtttcggccgggtgaagagcggggctcgactacggacggcgagtgcgtggctccggcgacgaactacgggctctgtgaactccggcgacgaacggcaacaaacgacggcgtcgagcagtgtactggcgagctagagagatggggtgagcttggtaggcaggagaagggagagaggtgtgctgccttttatagagagcaggagggaagagggagagtcggccagagagagggaggggtggccggctgttcaatggggcaccgtcggacttcatggcgccattgatgggtctgtttcttcctcgacgtcaatggagagagggagagagtaatagggagggagtaacggacacgagacattcatggcgcggcttgatggacgtcgtggccggtgcggctcgggtgttcggtgcgcgggcatcgcggcggcatcgcggcgctgcagtcgggctcggatgtcgctcgggtgcaaggaccgtcgcggcgtcgggtcggctggcgcgcgcacggcttctaggccgcggcagcggctgctgcgcgcggtgggcacgcggggagcagggcactgcggtgcggtcgctggtgctgctgtgcggctacgcggcagggagagatgcgaggggagagagagaagcgagggagtgaaggagagagagagttagg

SEQ ID NO: 78646 - DNA, 398 bp, Zea Mays
gttataactaattctggtataattattataattttcagaaatatttaaaaatatatttatatttttaatagaaaataataaaaaaaaaagaaaaagaaaaaatttcgaaaccctagccgctggccgaatttggcccaccagggcccagccgcgcgcccacttctcccacctcctctctctctctctctctctctctctctctctctctctctcttacgcgtgggccagccccggccccgcggtttcttccacctcgtgccgccgcaactccgggcgcctaggcgagcgcgccccggcccggccccctcgcctcccccacggaccgtttccccgagtaaaggacgccgccggtcgaccgttttcttctcctctctctcccccactaactctcccattaa

SEQ ID NO: 78647 - DNA, 214 bp, Zea Mays
atcaccttgaatcctccccctttccgcccttcttccctccaccaaaatccaattggagacatgcaccaacgcgacgtagatccgagcgggaaaggaatgacaccttggagagaagggcttgaggagggggcggctagggtttgatgggggaggtggggtggcggctgcaaatgggtggaggagtgagaggggcgtcctccaagcctagagagag

SEQ ID NO: 78648 - DNA, 1497 bp, Zea Mays
attttataagctttccagattgttaaagagtgcattcatatgatttgtgaaactccagttatgtttgttttactgtggctgttcctgtttacctgacaaaaatgagtgggtctgttcactggtgggtttcatctagtaaatggccgaattggctcttccaactatggagacttttgtagagggataaaagttcttacttccagcagaatttcataatttttggttcagcagttttggagatatcgaattttaaagttaaccatactgctgtctaaaacagattcagtcagttatcttgtcagatgttttagaacttgtagatggcagaatttaattatctattgaatactgaagttgtagagtattttgtgtagatactcctagagtatttgtttgatatcaccgctgttttaattttaaagatacaaaattaacaaacagcgttgctgttgtatggcatgtggtttagggtgggagtctttccactgggtcttggtttcaagtgtaggagtgttttgttgattgatggcaaatgtttgtgaaatatgtgtactaagttttatgcccactagcaggtggctacactccagatcatgtctagtacatttcttcttcttcgatgaaggcaagtgaatgtagcggtggttgcttccgttctgacctgttatttctatcgcctacactctaatattcagaagtatcagattctctcataattggactctatggtgatgctttactttcttgcattatactgatgctcaatcatatattgatgatgattatgatttgagtatgactcatgagattaattcacacccctgaaggtaaatgaagtattatttgaggttggtattgtatctgaaggtaaatgaagtattatttgaggtttgtgttgtatctgaaggaagtgaagtttattgataaatgtagcatgccatatacattgcattactcatttgcatatgaagttttgtcgtgacctatggtccgaccgtaccggtacaacttagcatcgtacgttgcccgagaaggggtatgatgcggcttcatacccttagaggtatgaaggcagaagacatatgcattgcattcatatgcattcattgaagtgatatttgcagatgatgtggttttaaacccccagaggtatgaagatagagtacctacacattgcattcctatgcatacattgaagtgatatttgcaggtattgttgacgcagggaagtgttatagaacctattgtggttgttcgaggaaatgagatggtattggttatagtgggactactgagttctatatctacaagcatttctgatttttaattgtgactcttttaaaatgttgatgaattcaatttgtggtttaaatatctcgtcagaacaattagcttgctgagatgtttcatctcactcttgcattactcaatgcaggtgcttgttgctcatcaaggggagtgggaagtagcagcacatccaccttcattctcataata

SEQ ID NO: 78649 - DNA, 100 bp, Zea Mays
atgagttttgtgatattcatattgacttgatatgtcaatttgcaacatatttggagagagtgaaaaaacaacacaatacacaaacactgagggatgcaac

SEQ ID NO: 78650 - DNA, 453 bp, Zea Mays
caaggaggtctactacttcttaagacactactataggcgtccacaaattattttggtgcacggttctgccgagggctcctcgccatcaacaccgattcggggatccgaggccgccatcaatgcgcacctcctccccatgacgtcgcatggaaggttgacacgacgccgatccgccccacctactgcccgtcaaggaaggttgtcgtggatccccccaccctcctccccctctgctccgcgattacagggatccgaggctgccatcaacgcgcaccagctccccacgacgtcgcatggaaggttgtcgtgacgccaatccgccccacccaccgctcgtcaaggaaggtaatcgtgatcccccaccgtcctccccctctacttcacgattacggggatccgaggccgccatcaacgcgcatctagctcccccacgatgtcgcatggaaggtgccg

SEQ ID NO: 78651 - DNA, 876 bp, Zea Mays
tataatagctctttttgtatttaataattgttcttgttctttttgaacccgagtgcttcataaaccttaaaacatacatctataaccaaactgaaactgttaaacaagggaactaattcagcagccattccaaatcttacctttgcagtggactcaatagtatcttcggccctgaaaccgaaagactcggaatccaatgaacgccagccgggctgcaagggatgaggctccaaggtcatcctcaccctacagcggggtacccggtgctcctcgaacaactgcactgcgtactagggaggcgtagcataaccggctccctgcagtacctcccacaaaatgcgggaaaagccttcttgtgcaagcccatctgtgtgggaatgtgcgttccctccttccgtggatacgtgagaagtcatatgtgcaagggcaagtgtaagcgaaagaaaaaaagaaaaagaatcccaaaaataaaaggaagctagtgcttggcttttcccatggttaagttgagatctttgatgtagacttaatttataattacatgtgtctcttcgattatgtagccttttcattgacatttttctaagaagctagaaaactaatgcatgcatgctcgtcctaagcgacctcacattaagtacataggggtatagtaattccccacctatatcatagcagcctgtagggcatatccaaatagccacctagctacccatctagtatcctaaggcttcacgtcctaggtctatccttatggtcctaacagctatccaacttggtttctaaacaagttttacttttaaaaaggttggtaataatgatttattggttcctctgtggtggtacaagctccaataccagctgtgacggaaccgc

SEQ ID NO: 78652 - DNA, 322 bp, Zea Mays
gttagaagttgggccgcgcggtggaactcagtattgggccgatgcgtggggttttggttaggtgggccgagtggtcactatgagcccatgtgccttttttttcctttttcttttttttctttttttctttcccttttatttgaacctcaagttatattcaaatttaaattcaactttgtggctcttcatttataaactctatttgtgcaattaaaaatactaagtctgaagatatttatttatatattttatttatatttttcatatctcttctcttttccttattttcaaattctactttcaatttagggtttgacccaac

SEQ ID NO: 78653 - DNA, 302 bp, Zea Mays
tggaactcggtattgggccgatgcgtggggtttcggttaggtgggccgagtggtcactatgagcccatacgccttttttttccttttctttttttttctttttttcctttcccttttatttgaacctcaagttatattcaaatttaaattcaactttgtggctcttcatttataaactctatttgtgcaattaaaaatactaagtctgaagatatttatttatatattttatttatatttttcatatctcttctcttttccttattttcaaattctactttcaatttagggtttgacccaac

SEQ ID NO: 78654 - DNA, 221 bp, Zea Mays
ctcatatgtgtgccaaagaagaacaccacatataatgacaaagtgtatagagataatgtcacaaatatcataaatgtcattattacatagcggaagtcttacaaaattaaatgataataaaaaagcgaactaagtattattccttggcgccacaaagctgactgggagacgccacctagatcaactcgtactcctcattgtacggctcctcctggaccacc

SEQ ID NO: 78655 - DNA, 336 bp, Zea Mays
attggtgcttgttgctgtcataccatcctttcttgtctcatttcctctctcatctcctgcctttcctggcgcatctcttgacgttcctgccgcatctgagcttgcatatccatcatagtatttgccatcggttgtagcatctgcatctaagctacaaccactggatctgtcctagccggtggagaattcggaggattcatttctgcttgccgttgtctaagcaccctctggttgtgtgggttggcaggtagatcaattctgcctcccttcctggtattgaccatctgggtcagaaacacatggtaagaaagaattatagacaagacgagtaattat

SEQ ID NO: 78656 - DNA, 212 bp, Zea Mays
cctccccttccttttggacgtcacccctccccccctcttccatcgtctttctcctcaaacctttgcagccctcaccacccaaaaccctagcccccccatttctcttcccccctccaaggtgcagccctcccgcgtgttctccgtcgtgtggctgcgatctcaattggagtttggagggaggaagaaaggaggaagggaagaacccaaggtga

SEQ ID NO: 78657 - DNA, 217 bp, Zea Mays
attttattttgcacacctgtagtaatctcgttgtttccttgtaactccactcggtaatgaatctttacttcaacccttctgttggaaccataccgatcttacccttgattgttttctccactttgtcgtttcgcgagtcttgtcttaactatatcctttgttatgctttttaattattatcatatgcacccttgacacctctatatcctacattgat

SEQ ID NO: 78658 - DNA, 235 bp, Zea Mays
caaaaataaatattttagttataaataattttggtataattgttatgatttttgaattatttaaaaatatatttatttatattttaagtagaaaagaatagaaaagaaaaaaagaaaaaaaaaacctaatcactcggccaggccgaattcggcccagccgaggcccactagggcaacagccgcgcgcccaaccctcccctctctctcaccgaccggtggggcccacccgagcctg

SEQ ID NO: 78659 - DNA, 142 bp, Zea Mays
ggaagacttattacaaaataaaataataaagataaagcgaactaaggatcgtcggcgccaatgtcgactgagaaacgccacctagatcagatcgaactcctcagcgttaggcagctcctcctgaaccacctgctcttctcct

SEQ ID NO: 78660 - DNA, 732 bp, Zea Mays
atcacttcatcaaaatgtatattccaactccgagatgtttgcttcaacccataaatggacttacgaagtttgcatatcttcctagcatttttagtatcgacaaaacattcaggttgtgtcatatgcacatcctcagctagacttccattaagggaagtggttttgacatacatttgccatatttcataatcaaaatatgcagtaatagcaaggataatctgtacagactttagcattgcaattggcgagaaagttttatcatagtctacaccatgaatctgcttgaatcctttggccaccaatcgtgcttcatatacgtgaacattttcatccatgtctgtcttttccttgtaaaaccacttgcagttgataggacttgcaccatcgattggatcactcaagttccaaacttgattgtcatgcacagattgtatttcggattccatggctccaagccacttatcggagttagatcccatcattgcttctttgtaggttgcaggcacatcattgtccaacaataatatgtcacgatgctccgtggttaggagtgtgaacttttgagttacgcgtcgtttccttgtacacctatgtggggcacgtgtttcatcaatatattgcacatcttgtacatcatcaatagaatgcacaacatcttgtacatcgtgtacgagttcagtgggtgctgaaatatttttaggtgtttcttgaatttcttcaagttgcactttg

SEQ ID NO: 78661 - DNA, 195 bp, Zea Mays
ggtcggcgcgcgtttcagctagttgggctgcgctgggaaaagacttagtgggccgaaaatggaatccgcgacccacgtagggtttttctcttttttcttttctgatttgtttttcttttttgtttttagaattcaaatttgaatttaaattaggttatgggattcatccatgatcagagtataccaagttcaaat

SEQ ID NO: 78662 - DNA, 925 bp, Zea Mays
gtaactcctaggctgaagagagatgcaaattcatgagatgggatttgataagataatgaagatagatttggatagaatatcgcgacatgttgagacaaaatgcagcgatcactctgagagtgtccacaaaagatagcacatcggtgtagtcttataatggatcacaactattaatcgcgataccagcgcgtgccgagtagctcaaccatgtgtgcaccatagtaggctctcggtctcgtcgcggcaccatcagtcgttagtcatgacaccattaccaaacgcaaccaataagaaatttatacagcacagatagatagagcccatgagggtatggctcagaaaataagaatgtgaccggagttaaagcaaagatcattggcaaaagagcatcacatgaaaattttcttcaactcagagaactattttatgatcaacatggagattatcatatcagatattagcacgagatttgatatgaggatgaaccaaccatgagatcaaaatagattgttaagcttttagagacatgagaggacaaaggacaacagcgaaatccattaatccacatggatatgccttttaaagataaggttggcaaaaacaacgtcatgatgcctagagaaagagcatcggaaagactagaaatgagagattagattgatcgacatccgatacttgagaatgggttatagcggataaccagataatatggcagaatcatagaggatcccgagattcggatgataaagccaacatgattcacaagaacgaggattaccagatccaggctaaaggagaggtaggcaaaccggatcagctaggatgattaacagaaatgctatgatgttttaggagcaaggatttatggaaagaaacatgaccttgatagggtttgcgtaactagacaccaacaacaaatatattt

SEQ ID NO: 78663 - DNA, 1706 bp, Zea Mays
gctacattgagtaataagtggaaatgaggtgactgacaaaagatgttgattggtaaaaatgtttgataccatgtatgactagttaggtactcatctagtttaaaaaggatcatactaaaacttgaaaagctaaaacttgtttttagactcagctagtgtttttggcaaaccaaacccctcagcaaaacagctgcatgtctagaggtagaggagtagactcctcacaccggataagtctagcttagtattcgtatactcagccttgcttgtggcataatttttgcaggtactccttaggatgattggttgctggtgtgacttggccttcgtccctgccactgggacagacggtcgagtgggttactgcttccgcaggagaggaccaggaggagtagcgtggccagacttcgccatgttactcgggttttctccgttagttatttccgctgcattaaaatttatggttattatttctgaaactccgataacctaatcactaatgatacttgttaaatttgtggtattatgttttattgtatttctctgtgcctcaccttcgagtgagctagtggtattcgatcctggataagtggctttatcggactagatccgagggactgacgggttattcctgtttaagtgtgttgctgcccttaagggtgcgacttgggcacttaagctggaataatttgggcggttccgccacatgtactgaatgctttgcgactgttcagtgaccgtggttggaggtgagcggttgccttcttcttctataaataatgcctttgcctctccggctttttcacatctcttgctgttctctgatgcttgctttcttcttctttctttatttccaccatgggcaagggtaacaaacgcaagcgcgagccgactcctccatcggaggacttcggtgactcggaatacttggaggaggagttctcctctgagtccgaggggtctccggctcccgtctctcccccggcgtcgtccgatgacttggacgactctcaggggattgccgtggaggtctggacttacatccgggccgtcgagcgctccgggctcgagggctcggatgagtcggagtactcctcggacgaggaggactcgcccgaggaggacggcgatggtgacgacgacgacgacgacgacggaggcgacagcggcgatgacggtgacggcggtggcaggggcggcaacggcgacgacaagggtggcaacggcggcagcagcaggggcagcaacggcggcggcagcagcaagggcagcaacaaggccagtggctagatgccactggtctttagatgttagtatagtgtaatgaaataatgtagcagtatttagtagtgtagagtagtatagtgtagcgtagtagtagtagtaatagcagtagggaagtatcaactcataatgagttgatttgtaagtacggttacttcccttaatgaagaatgacttcgtctcctcctgtgtcaattattttgcttcgtagtaagttgatctcttatttgtgaagttgattccttcggaatagaaactaagtaattcgggcatcatatcgccgctttgggggtgatggccgagctattattgtcgatatttacgcatttgaaatagagtccgagtgatgacgaaaccatgtcatcgtcggaatgactgatgaccacgtcggcgctcttagaggtgacagccgagtgaattgt

SEQ ID NO: 78664 - DNA, 610 bp, Zea Mays
gtggtaactaggtgtgttgtacgttgtatacgtgctgcaccttcgtaataagaaggttgtggaattaagtggtggtaaaacaatgttcttatgtggttaaactgtttgatattattttacttgctgagatgtgtcatctcactcttgcattactcaatgcaggtacttgatacatgttgggaatgaggggagtagcagcacgtccactttcactctcacaataacgctgcctaggcgcagccatgatttaattagaaacctattgtcaaaggaagtttgtttatttttttatatggtcgtgcgcactggttaattcagttcaggtcgtatatttatctttccttgctagtcgagtaataatacttagtatgttttagtcatgatatatgtttatactctgttgctccctcttttatgcaatcttgcaaaggggatgctgccgaaattatatatatggatgtcggaagtgtagtacagtagcataccgggttgtttgtggaacctggagtgttacgttccttgatatagcttttttcctaacttacttaataatcattagttatatcattttcccttcttacatcactttactggttatcttaactcactc

SEQ ID NO: 78665 - DNA, 427 bp, Zea Mays
cgagaagattaggcgccgaaggaaataaatcagtacgcggccggagaattcttgatgtggatgaataagaaagcgaagccgcacaacacccgtctgatgttcgacgacaagcccgagccaggatttatcagcattcgtacgagtattgagtcacgtttgatgctggtgagctgatttatagtttttgtaagtttatctgatgattggattaactagacttattagtcgtaataattctcgtgtttagcaggcgcgtcgtgtttgtgttagatgtttactaaaatacctcaacaccaccggtaatgtaatcatgtgaataactacgtaatatggtacaacttaggtctaaaatgtaggatttacgaagaatgttttagagaacgaataggttaagtatgcataggttggtccgtcgtttgtgaaaaat

SEQ ID NO: 78666 - DNA, 253 bp, Zea Mays
aggttctctggaagagatggttgctgggataacttggccgaccaccctgccaccgggttggactgtcgagtgggaccctgcctcagccgaggaggagcatgaggagtgatgggacaggcttccccatctctctatttatttaccgttagtttatttccgctgcacttcgaacaatgatggttacttttgcaaaaactccgatgatgatgatggtgatgtaataatttaacattatggcatgtatggttttatg

SEQ ID NO: 78667 - DNA, 387 bp, Zea Mays
tttctgatctcaattgggattcctttaaaatgttgtttaattcaatttgtggtttaaatatctcgtcaaaataatttgcttgctgagatgtatcatctcactcttgcattactcaatgcaggtatttgattcatgttgggaatgagggaagtagcagcacgtccaccttcactattataataacgctgcccagttgcagccatgatttaattagaaactcgatgtcaaatgatgtttgttttttctagtcgtgtgcactggttaattcaattcatgttgttatgtttaactttcctttgctagcatattaataatgcttagtatgttttttgtcatgatatatgtttatacactgttgcccctcgtttatgcaatctttcaaaggag

SEQ ID NO: 78668 - DNA, 451 bp, Zea Mays
gttcttcgcggccacggaaagatctacaaattatctacgactcatacatagactttttatttttttgaggccactaagaccacggaaaactggcatgaacagaaactgtcgaatctgccattctgcagaaaactaaattcgagatcaaaacctaaccccgcatcaaatccaacctctaatcctttaattcccatgatccacaacctccaaaagcctataattacagggaggaacaaggatctcatccatacctagggtttccccaagaaatcttcaagatgagatggggaagaacatctccttgatcctctcttcctcttcaattcaacgtgcccctccttttcttgatccttgctgcgtagggggagatcttgggggaggaagcaatggaggatggctgccatagggggagggggcgtccagccaagggggagaaaaagggggtggcgac

SEQ ID NO: 78669 - DNA, 472 bp, Zea Mays
gtcctaggctaaaccatgctagagacgtgagcctaggcacaaaggtagtcactgaaaaagaacaactagcatagcacaaagagaaacaacagatttagagattcagcccccttctttcttcttcttttcctttttttcttttcttttctttttttcttcttctttttttgcaggggcctaaaccctttttcactatgacaacccaaacaataaggatattgctaacaacccctttaaatcagatttaacaaatcttgttaatatagaaagtccagaaatctctatgatgattgtggagcgctcagaatgaattttgagacaaggtcagatccattggaaagaagataagataagtcttccagattgtatttaaacttccaaatcggacatgagatgtatccgtggtggcaaaaacgaaccagagatgtttatggtgatggtggatctcgtggtgaccaaaacgtggtagaac

SEQ ID NO: 78670 - DNA, 1013 bp, Zea Mays
atatctcccaaactactgaaccaaaaattatgaaattctgctggaagtaagaacttttatccctctacaaaagtctccatagttggaagagccaattcggccatttactagatgaaacccaccagtgaacagacccactcatttttgtcaggtaaacagaaacagccacagtaaaacaaacataactggagtttcacaaatcatatgaatgcactctttaacaatctggaaagcttatgaaattatctacaacttcttttaccaacccacagtttaattctgttgataaaatttcctaaatcttaagagaacagattctgcacagaattatgagactgaaaaactgcaatagtaaaactgcaataactttctggtcggatgtccgattgaggtgttcttcgcggccacggaaagatctacaaataatctacgactcatacatagacttttcatttttttgaggccactaagaccacggaaaactggcatgaacagaaactgtcgaatctgccattctgcagaaaactaaattcgggatcaaaacctaaccccacatcaaatccaacctctaatcctttaattcccatgatccacaacctccaaaagcctataattacagggaggaacaaggatctcatccatacctagggtttccccaagaaatcttcaagaagagatggggaagaacatctccttgatcctctcttcctcttcaattcaacgtgcccctccttttctcgatccttgctgcgtagggggagatcttggggggaggaagcaatggatgatggctgccatagggggagggggcgtccagccaagggggagaaaagggggtggcggccaagagggggggtgaagggaaaaaaaggggtggccacctagggtttttgtgggagaaagaaacgacgcctcagatgacttctatctttgcatccaatggcccacaaccctttacctcatccacgcaccagagattaacttttggtcaacatttttttgggatattacac

SEQ ID NO: 78671 - DNA, 418 bp, Zea Mays
cttcttgctgtttgccctaaactttagtaattgggaatgaagtaaatattttggtgagtgtatttgaattagtgactatttaggccttctgtgtatggcgaaatttgtaatgcaaacagggtttagtagacaagtatacatagtattattaagttgtttcggtagtgtggtgtttataagtatgaactgctattcccacttgcacttaacatttagtcattccaagtttttgcttctaagtgatattcgaatggaattatgtaatgtgttgatggtgtttatcttgctaagacatctatcttgtgctagttatacttgttttcattcatgtgcattatgcatatcatataggtacgataattgatcacgtaaggtggaggaccaaggatggattattctcaaggtaatgctgatgaat

SEQ ID NO: 78672 - DNA, 1860 bp, Zea Mays
acttaatctagcattaaaatgttgaaagtaaggatccactcatagtaagcttttctgcaaataaagtccttgattcttgataagccttaccttgaatccttttaaaaccagcatacccttgagagtcttttctttagtcgggtaagtcttgctgagtacttgcgtacttagggttttattctcattgttgctgcaggttacgagtcactttgattgtgattggtgttaagcgccgatgggcacgaccttcttataagtctaagtacttcttctatacttattattgaagatgatcacttaagctagcatatatttcaaacttataattaatttataacatttcaaagtttattctttgaaccacttttgtaaccacttcgatcaatataatgtaaatttgttgtaacttgtaaaatttggtaataagatttccgctgcaaattgttggtgtgtgatttgtgtttacttaattttgcgatcttggttgtaagttgtttatccggggtccttgggacactcggactgatcctgctaagttatctggtgcacatgcatagccatctgaggtctttgagacaaggacaggtgcatgtgggcccaataacttgggaggttctgccacaaccttcatcatcactactgctatcatcactaggggatggaatactcattttaccacatgccataaggcacttgcgtgatgaccgtgatgagcgcgatgaggatcgctggttgtgtgtcctttgaggttcatcttcacttgaacagtcatccaaagttttgacacttgtaagcaccttgcctttgctcctcccctttgtgggttcgaccatatttggacagctgtccctgaagtgacccttctccccgcatgcgaagaatgctcactttctttgctttttcctgtcaatgttaaaaagaagatcctcgacctgcagaggcacacccattagattaatcttgcggatcatccccattacctttccgacacgtcatattgtttcttcgtcctcagacgatgatgttgatggttgattatcttcatcatcatcactttcttcttcttcttcttgttcacttgaggaacttggagtgggagccttcttctttcctttgctcttttcatcacatgcaaaagcatatgtccttgaagaagttgcctcctcttgtcgacccattttttgcgacatctcaaatgccgcaatttttccaatcacagtggcaggatcatttgactcaagtcctccatgttgtaaagaatagtgatgatgctcccatacttttgttgtggtagaagggagataatcttcctcacaatgtccgcatcacctagcttattaatgccaatagaattaagctcattgatggttagattcaaatgagagtacatgtctctaacaagctcattttctttcatggcaaaagaattatattcatttaaagctagacaatgtttttgctcacggacgttggatgtgccgtcatgaagctcatgcaattttaaccaaatctcattagcagtttttaatgtaaaaacttgattgaaaatttccatgctatttttggctctagcattcaaatggatttcttttccctcactcgtggtgggtttcttgggatttttgggaggtttcatcccattacaagtgactctccaaacacctagatcaacgacctctaggtaacaagccattctagcactgtaatatgtgaagttagtgccgtcaaagtgtggtgacctatggatatccatccccttcctctaaaaagtgtcggctcgattagcggggaagctaaaacgtttcagatgagccaaaccaggctttgataccaattgaaggaaacaatgatgcctaagag

SEQ ID NO: 78673 - DNA, 343 bp, Zea Mays
cttgaatcctttaaaaccagcatacccttgagagtcttttctttagtcgggtaagtcttgctgagtacttgcgtacttagggttttatttccattgttgttgcaggttacgagtcactatgattgtgattggtgttaagcgccgatgggcacaaccttcttataagtctaagtacttcttctatacttattattgaggatggtcacttaagctagcatatatttcaaacttataattaatttataacatttcaaagtttattctttgaaccacttttgtaaccactccgatcaatataatgtaaatttgttgtaacttgtaaaatttggtaattagatttccg

SEQ ID NO: 78674 - DNA, 4767 bp, Zea Mays
gttattttgggacttttgagttctatatctacaagtatttctgatctcaattgtgatccctttaaaatgttgattaattcaatttttttggtttaaatatctcgtcgaaacaattcacttgctgagatgtttcatctcactcttgcattactcaatgcaggtacttgattcatgttgggaatgagggagtagcagcacgtccaccttcactctcataataacgctgcccaggcacaaccatgatttaattagaaacttcttgtcaaaggatgtttgtctttaactagtcatgcacactagttaattcaattcatgtcgttatggttatcttcccattgctagccgattattaatgtctagtatgttttcttatcatgatatctgcttatactctgttgcttccacgtttatgcaaattttcaaaggagatgctgtcaaaattttatatatgaatgttagttgtgtagtttagtagcatttcaggatgtttgtggatcctggggtgttacagttggtatcaaagcataggctttagattcttggcaatttgaagataaatttgacacactcgcacatataggaagggtatgggtttaaatatctttgatatatgttagtgtctttgaagtgcagatgacaataaccacacccctcgctattcctttacggttatgtggtaagttgtttatggcttaatgcttgatataatttatttctgaaattttgatattgttttattaatgcgatagatatcgctggtcatttgtgagaatgaagttgttattatgcttgtgatatacaagtatgcctatgttgttttcaccatgttttcatggttgagttttattacaataatattgttatatatgtttgattgtggatgtttctaagaggagtgtgaatggcatgttttggggtacaaggtaatcatcaatttgaatttaagttgttgagcggttggtggatagctccaactatcattgcaaagaatgattgtttatgttgagaaaccagttctgaaagaaatgaatattggtactttatatggatttttgggggaagtcttttcatagccagaatggcttacatgtctctctcctattgtgtgttttagttgccacaaagcctagatgtggtttaaagtggttgcctgttagtcatactaattgtagaataaatctttgattctcttgatccattgattatgtattgatacattgaggatctgatggttcccttttcgatgcatgcttgtggagccatttttttagaccacctatctattggtttgaaggaagtcattgcctagcctagagttggttgggtgtggctagtcacctactcctagatgatgtggtttttacatcagcttaatatgtttgtcaaatgtgtgaaggattaggggttattattgactttgtatgtctggtactttgagtgcatcgtatgatagaatgaaatgtaagtttatgaactacagtagatgaaaacttatattatgtgtaggttaagatatttttcttagttgagttgttggatgaagtatagtgacattggttaaccaagtattgtgttattgtgctgtcagtgctctttgtggagcttttggcatttcttcgatgacctatgccgcgcagaatgttattcgcttcttgttggctttattgctccattagttctgtagattttctcccttttgcggggtgcaaagaatgttagattacatgattatcttttcatgatggcaagaataaggtttaggaagattaggagttttgtttcaatagaactacttgttttcgtggtgctttgaggtgaggtgtttgatcttcttatacattcatcgggtgtggatgtttcaccatttaattaaaattaattattgaagttggtaagggttgtgcttagtgcatattaccccttcataaaagagtgttgtcttaagacattgatgttgatgtatagttgcgtcccaatttgatggtgtgaaattgtagtgttgattgcatctatgacttgctttgagcttcattgcatgttgtttcatgcttgatgtcaggttgtgtagtttccttagacaattagtccaaggtagaagttcttgtgttaattaagaccaataatggacccatgttttaaatgatggtgctatatggggtaccttgggtgttttgcttggagtgaccgaattcgaggacgaattctttttaaggggggtagagtgtaatatcccaaaaaaaatgttgaccaaaagttgatcttcggtgcgtggatgtgggaaagggttgtgggccgttggatgcaaaggcagaagtcatctggggcgtcggttcttttctcccacaaaaccctagggggccaccccttttccctccaccccccctctcttggccgccaccctcccccatttttcccttggttggccgtcccctctcctcccatggcagccgcccaccatttcttcctcctccatagatcttcccctccccccatgcagcaaggatcgagaagaggaggaacaagatggattgaagaggaagagaggatcaaggagatgttctaacccccccatctattgcagattttcttggggaaactctaggtaaggatgagatccttgttcctccatataattatgtgtttttggaggttgtggatcatgtggattgaagaattagaggttggattagatgtggggttaggttttgatctcgaatttaatttctgcagaatggcagattcgacagtttctgttcatgccagttttccctggtcttagtggcctcaaaaaaataaaaagtttatatatgagtcgtagataatttgtagatctttccgtggccgtgaagaacacctcaatcggacatcagaacagaaagttatggcagtttgattatagcagtttttcagtctcataattctgtgcagaatctgttctcttaagagttaggcaattttatcaacagaattaaactgtgagttggtaaaagaagttgtagataatttcataagctttccagattgttaaagagtgcattcatatgatttgtgaaactccagttatgtttgttttactgtggctgttcctgttaacctgacaaaaatgagtgggtctgttcactggtgggtttcatctagtaaatggtcgaattggctcttcgaactatggagacttttgtagagggataaaagttcttacttccagcagaatttcataatttttggtttagtagtttgggagatatcgaattttaaagttaaccatactgctgtctaaaacagattcagtcagttatcttgtcagatgttttagaacttgtagatggcagaatttaattatctattgaatactgaagttgtagagtattttgtgtagatactcctagagtatttgtttgatatcaccgctgttttaattttaaagatacaaaattaacaaacagcgttgctgctgtatggcatgtggttcagggtgggagtctttccactgggtcttggtttcaagtgcaggggtgttttgttgattgatggcaaatgtttgtgaaatatttgtactaagttttatgcccgctagcaggtggctacactccagatcatgcctagtacatttcttcttcttcgatgaaggcaagtgaatgtagcagtggttgcttccgttctgacctgttatttctattgcctacactctaatattcaaaagtattggattctttcataattgaactctatggtgatgctttacttgcttgcattatactgatgctcaatcatatattgatgatgattatgattcgagtatgactcgtgagattaattcacacccctgaaggtaaatgaagtattatctgaggttgtattgtatctgaaggtaaatgaagtattatttgaggttgtattgtatgtgaaggaagtgaaatatattgataaatgtagcatgccatatacattgcatgattcacttgcatctgaagttttgtcgtgacctatggtccgaccgtaccggtacaacttagcatcgtacgttgcccgaggaggggtacgatgcggcttcatacccttagaggtatgaaggcagaggacatatgcattgcattcatatgcatttattgaagtggtatttgcagatggtgtggttttatactctaagaggtatgaaggcagaggacttacacattgcattactatgcatacattgaagtgatatttgcaggtattgttgatgcaggaaagtgttatacaacctattgtggttgttcgaggaaatgagatggcattggttattttgggacttttgagttctatatctacaagtatttctgatctcaattgtgatccctttaaaatgttgattaattcaatttttttggtttaaatatctcgtcgaaacaattcacttgctgagatgtttcatctcactcttgcattactcaatgcaggtacttgattcatgttgggaatgagggagtagcagcacgtccaccttcactctcataataacgctgcccaggcacaaccatgatttaattagaaacttcttgtcaaaggatgtttgtctttaactagtcatgcacactagttaattcaattcatgtcgttatggttatcttcccattgctagccgattattaatgtctagtatgttttcttatcatgatatctgcttatactctgttgcttccacgtttatgcaaattttcaaaggagatgctgtcaaaattttatatatgaatgttagttgtgtagtttagtagcatttcaggatgtttg

SEQ ID NO: 78675 - DNA, 1728 bp, Zea Mays
ttatcaacagaattaaactgtgggttggtaaaagaagttgtagataatttcataagctttccagattgttaaagagtgcattcatatgatttgtgaaactccagttatgtttgttttactgtggctgttcctgtttgcctgacaaaaatgagtgggtctgttcactggtgggtttcatctagtaaatggctgaattggctcttccaactatggagacttttgtagagggataaaagttcttacttccagcagaatttcataatttttggttcagtagtttgggagatatccaattttaaagtgaaccatactgctgtctaaaacagattcagtcagttatcttgtgagatgttttagaacttgtagatggcagaatttaattatccattgaatactgaagttgtagagtattttgtgtagatactactagagtatttgtttgatatcaccgctgctttaattttaaagatacaaaattaacaaacagcgctgctgctgtatggcatgtggttcaaggtgggagtcttttcactgggtcttggtttcaagtgtaggagtgttttgttgattgatggcaaatgtttgtgaaatatttgtactaagttttatgcccgctagcaggtggctacactccagatcatgtctagtacatttcttcttcttcgatgaaggcaagtgaatgtagcggtggttgcttccgttctgacctgttatttctattgcctacactctaatattcagaagtattggattctttcataattggactctatggtgatgctttacttgcttgcattatactgatgctcaatcatatattgatgatgattatgattcgagtatgattcatgagattaattcacacccctgaaggtaaatgaagtattatttgagcatgccatatacattgcatgactcatttgcatctgaagttttgtcgtgacctatggtccgaccgtaccggtacaatttagcatcgtacgttgcccgaggaggggtacgatgcggcttcatacccttagaggtatgaaggcagaggacatatgcattgcattcatatgcattcattgaagtgatatttgcagatgatgtggttttatactctcagagatatgaagatagagtacctacacattgcattcctatgcatacattgaagtgatatttgcaggtattgttgacgcggggaggtgttatagaacctattgtggttgttcgaggaaatgagatgatattggttatattgggactactaagttctatatctacaagtatttctgatcttgattgtgattcttttaaaatgttgattaattcaatttgtggtttaaatatctcatcagaacaattagcttgctgagatgtttcatctcactcttgcattactcaatgcaggtgcttgttgctcatcaaggggagtgggatgtagcagcacatccaccttcactctcataataatgctgcccagacacagtcatgatttaattagaaacttcttgtcaaaggatgtttgttttttaattagtcgtgcacactgattaattcagttcatgttgttatggttgtcttcccattgctagtagattattaatgtcttttatgttttcttatcatgatatctatttatactttgttgcatccccgtttatgcaattttcaaaggagatgatgtcgaaattttatatatgaatgttagatgtgtagtttagtagcattctggggtgtttg

SEQ ID NO: 78676 - DNA, 263 bp, Zea Mays
gccatagagcgtgcaagccactatatgctggcaagattgtgaggacgaataggacgagcatgcatcatgacatataactttaagttaaaccccctatgtagtaattttagtacgtgtttcgtctaccctgttcatgctacctgtctttgcctttctatgttacctttccctgtttttgaagactggaagccaagtttagttggtgggcagaataccttgcgctgcagccagaaggacgttaagttctcgggttgagttttgtg

SEQ ID NO: 78677 - DNA, 562 bp, Zea Mays
gttgattcattgatctttccttgtcgttccgatagaagcgtcggaattcgaggtcgaattatttttaaggggggtagagtgtgatacccaattttctgaaaagaagttaaatttatttttcccttttctttcgtgatctgtgtagttggggttggagtttttaggaagcattcaccagtaaaacaacagattacttgttggatttgtgcgctggggtcgggagcagatgtgagagcgagtttgggccgtggatctcgatccggcggtggggagcccattagttccccccccccccttaaccctagccgcccccttcctctcactctccaacccctttggccgccccctctctcttcctctcttccactcttgcagccaccccaatccctctccttcttccccatgtgattgcagcgccacccctcaaccctagccgcccccacctcttcctctccaaggtggagcctccccgcttggtgtccgtcgtgtgggtgcgagtcttccatgggagtttggagggaggaagaaggaagaaaagaaggaggaaaggaggaacccaagg

SEQ ID NO: 78678 - DNA, 241 bp, Zea Mays
ggagtagcagcacgtccactttcactctcacaataacactgcccagacgcagccatgatttaattagaaacttattatcaaaggaagtttgtttttttaactagtcgtgcgcactagttaattcagatcatgtcgtatgtttaacttctcattgctagccgattaataatacttagtatgtttttgtcatgatatatgtttatacactgttgccccctcatttatgcaattttgcaaaggg

SEQ ID NO: 78679 - DNA, 602 bp, Zea Mays
agaaaaattggaattctgttgtttgatatttttcaagtatagtggtagtatgatacacccagcccaggtggggttggccgaggcccaacaaattagggttgcccggagctcaacagttcattaagcacacccaactcagggaaaggcccaattgcccccaaaagactagtccaatgggggaagggtggctctcccttttaaagtggcttcctcctcccaagttaagcgaggtgggataattctaaggctcacacggtcaccgtccgactacaattgggccaactgggcctattgcgtctttgccaacgggtaatagtggaggatgtcctcatcattcccaccttcttaaaatgggccctagctttgataccagatgatacacccagcccaggtggggttggccgaggcccaacaaattagggttgcccggagcccaacagttcattaagcacacccaactcagggaaaggcccaattgcccccaaaagactagtccaatgggggaagggtggctctcccttttaaagtggcttcctcctcccaagttaagcgaggtgggataattctaaggctcacacggtcaccgtccgactacaattggg

SEQ ID NO: 78680 - DNA, 928 bp, Zea Mays
cttgcgtcggccttcagctcgcgaagcttccctggtggctgctctcgttttccatatccgcgcccaaccgaggttcctccctacgcgtgtgagctctgttgcgagcgccgatccgaacccacaaagcctcgtcggtgctcaactagctcgacgctggcccgaccatcgccctgctgtgtcgtgcaacattttccacagcaccgctcttcggtcatggccattaaatcatcgttaatcttgccgtcgcagcttctctgtcatggctgaactcagtttcctccgtgccaccaaccgttaacctcgtcgttaagcacaaacgctttacttcctcaccactacacctccatttgctatcggagagaaagattctaggacgttttggtggaaaggagaagaaagctcatgtgtcgctcgcgaggtgcccgaagtaatggtgaaaccggaaatcatgattgtattcatggcgttcaagacgaattaaattattggtaagttgttgtcgctctcgctctttgttttaaatatttctcatcagtttggtctatttgcgctgtccagataagctggtgacgtatacaaaaaacgtagtagtgtgattttgtgtgacgctcgataggtgtttagcgatttaggagaaacagtgaacatcatcgttttcgttaattccaagtcacacagtgatacgataagctgatgtattattgctcgtagccgaatcgttagatagattggctacctagataggtcgcgacaattatcccgtttgtagcacgggcacttattttattagacatttgtcggaatgccggagctatatttagcgttgtgattgtattcataatttcgaagtcgtcatgctgtgtagctaagtttaggtttaaagacatagattatgcgagaagtattaaatctgtgttttgtatccgat

SEQ ID NO: 78681 - DNA, 408 bp, Zea Mays
ggttgtttaatcaaggaaggaaatgcatcaaccgtttagcacacaacttctatgtaacatcccagtttttaccccaaggttagaaaccctaaaactcctaaaccccccttcttattatctcttaaggccctcaccttataagacttctcattcatcatatgcatacaccatggttgttagtagcacctcacatagaatatttttttggcacccaagaaacatagataaatatatgttcaaaagaaaaaggagaaaaaaagagaaaaagaaatagaaatagaaaaagaaaaaaaaggaaatccctccccccctcggttgggccggatccagcccacctctctccgcgcgctcctcccctccctcgtggcccacgtggcccacctcctgcgcgctcctcccctccctcac

SEQ ID NO: 78682 - DNA, 55 bp, Zea Mays
agagagagagcggtagaggatagggatcagctgagagtggcagcttgaagatgag

SEQ ID NO: 78683 - DNA, 161 bp, Zea Mays
cttccccttgcatccaccctccactacttcctcctccctctagatctccccccacgcagcaaggatcgagaagaggaggagcaagatggattgaagaggaagagaggatcaaagagatgttctacccccatctcttgcagattttcttggggaaaccctag

SEQ ID NO: 78684 - DNA, 231 bp, Zea Mays
ccaggttcgcgcgtagtaggatttattggtcgaattcctgggtggcggcctagcactcgatttctttttttcttctttttttttcattttctttactgttttctttttatttttatttctaaatctcaaatttgaatttgaattttgttgtgaatttcactctttaaattaaatgcacaattcaaaataccaacatgaataattattctcattattttatatatattcttt

SEQ ID NO: 78685 - DNA, 789 bp, Zea Mays
ttttgatatttttctcagcacaagaagcaacaagataggagctagacgaagtttcacctaaaacagagatcagatgtggtctacagaaaatcaggaagttctctgaaaagcgtgcgagaactttgacggatttttttctttattttcctgaattttttttgacaattttgtcgaacccaaacagaccgaaggttagtttggccgggctcagaatggtgtcaacaagctcctgtaaaaatttcagattttttggacacccgagcgaaaagttatgcccgttttacggaaggtacctcaagttatgttctaaaaacgaccgggatgaagcaactgtatcctttctccttcgttatcttttttttctgttttttttttgacgtaaccgaaggagaaaaacaaggaagcggtcgttgactcggtatgttttttttctgtttttttttcgtaaccgaaggagaaaatcaaggaaacggccgttgactcggtttgtttttctgttttttttttgacgtaaccgaaggagaaaaataaggaaacgatgttgactcggtttgtggcgtgatcaaacgggagatggtggcggcgctagggtttgaatggtggaagaacacaatgcaaccagcaacaaatgacgcgaaagcacacaaattcaacaatgcagattattgaaagaaagtgcgaggctcaaaagggtgctgggataagatctaacctgaatttttatgtggttttgtggactgtaggaaaaaaaacgctcgataaactcaccgatcaacctggaaatctgat

SEQ ID NO: 78686 - DNA, 833 bp, Zea Mays
ctccactattacccgttggcaaagacgcaattggcccaattgtagtcggacggcgaccgtgtgagcctcagaattatcccacctcgcttaacttgggaggaggaagccactttaaaagggagagccacccttcccccattggactagtcttttggggcgattgggcctttccctgagttgggtgtgcataatgaactgttgggctccgggcaaccctaatttgttgggcctcggccaaccccacctgggctgggcgtatcatctggtatcaaagctagggcccattttaagaaggtgggaatgatgaggacatcctccactattacccgttggcaaagacgcaattggcccagttggcccaaatgtagtcggacggtgaccgtgtgagcctcagaattatcccacctcgcttaacttgggaggaggaagccactttaaaagggagagccacccttcccccattggactagtcttttggggcgattgggcctttccctgagttgggtgtgcttaatgaactgttgggctccgggcaaccctaatttgttgggcctcggccaaccccacctgggctgggtgtatcatctggtatcaaagctagggcccattttaagaaggtgggaatgatgaggacatcctccactattacccgttggcaaagacgcaattggcccaattgtagtcggacggcgaccgtgtgagcctcagaattatcccacctcgcttaacttgggaggaggaagccactttaaaagggagagccacccttcccccattggactagtcttttggggcgattgggcctttccctgagttgggtgtgcataatgaac

SEQ ID NO: 78687 - DNA, 297 bp, Zea Mays
aaaaccctagccccctgccctatgaacttcactatagactccgaaaaccctagtttcttggagatccgtgaaggaaagttatattcgagacattagataataaacttttattatcttagcattttcatgagcattacatgagcattcatgattatatatgtttatatctagaaaacgaggaggaaatagaagttgaagaagcgaggacttcaccaccaccacctgaagaaccacaggcaggaaactgcttttactttgatatctgcggaacagagcctgattcacctatcacacaag

SEQ ID NO: 78688 - DNA, 318 bp, Zea Mays
tttcgaacgaaaacgaccgagatgagacaaccgctttgtatcctttcccctttcttttttgtttgttctctggttctattctttctctttctctttctttttttctttttttttcttttcttttttctgttttttttacgtaaccgaaggagaaaaacaaggaagcgacgttgactcggtttgtggcgtgattaaacgggagatggtggcggtgcgctagggtttgaatggtggaagaaagaaggatggtgaaaaaaacacaatgcgaccaacaacaaatgacgcggaagcacacaaattcaacaatgcagattattg

SEQ ID NO: 78689 - DNA, 299 bp, Zea Mays
cttatgactaatggcttcaaagtcagaaaagccgatcctacactctttactaaaaccattgcaaatgatttgtttgtatgccaaatttatgttgatgatattatatttgggtctactaacaaatatacatgtgaagagtttagtaggattatgattcaaaaattcgagatgtctatgatgggggagttgaagtatttcctaggatttcaagtgaagcaactccaagcttcatcagccaaaccaaatacattcaagatatacttaccaagtttggattgaaggatgccaaaccaatcaag

SEQ ID NO: 78690 - DNA, 169 bp, Zea Mays
aaaacgttatgaaccaacttttcaacgtttaaacgtttaaacgaacgttgaaacgtcttttcaaacttgacatagaatttcaaatatagaataagttcatagtttcatacataagttgagttcacaaaccaaataacattagcataaaaagaaacaactcaagttcaac

SEQ ID NO: 78691 - DNA, 465 bp, Zea Mays
gccccctcgccacagtcggcgtttctcacagctcggaccgcgcccagccgggcggtcccttgcgtcgcgcggacctcccccgagctcgccctgcgctcggattccatctccctgcgcgcgctagctccagctcagccgcatccttcttcttcctcactgcatctccgtcttccttcccctgctagccgcaagctgccgagtctccctctgctccagccatggccgcgcgcttcatccccctgcgtgtcgcgccaaagctcctccctcttcctctgtcggcgcccagctcctccgctcgccggcgtcaagtccctgctcgtcttcctccacacgacgcgcgcccagccggagttcggcccatacgcgctcccctctgctcatccccaagccgcgcccagccgaagtctcctgcgcgcgtgcctgcgcctagctcctctcagcggcggagccagaaatttttagaag

SEQ ID NO: 78692 - DNA, 337 bp, Zea Mays
ctggtttctgcgatgagtcaaactaaccattactagcttgaaacttggtttgttcagagtgagaagtatgatgagcatgctatgtcaagtggtaagctatcagcatcattggaaattcaatgaaaacgtcctcatcatgctactaattgagggggttatatgacaatgaaatctagagtatctcactcatttttactaattgaggtttgctattgcgtaaggttttctggttccctgtcttattacattaacaatttgtcaattttagcttagatctaatgccatattttttgtctctaaaaacactctataagctactttaccatttaattttaac

SEQ ID NO: 78693 - DNA, 244 bp, Zea Mays
cgccttcaagccctggtgtgtgggccctgtccgccgagatccgctctgataaccgaaggccgctttgaccgccatggccgaactccaccgccatatcctggggctcatctctataaaacatgctgatctctgggaatccaccgtttgtggtcgactgggggaagcaagcaagaattcttccccccatagccaatgtgagttcgggcgtggcctgtccttcgttgggtgggaatttcgtcaccga

SEQ ID NO: 78694 - DNA, 3775 bp, Zea Mays
tccaggtgtaatgaaaaatatgcaagtgtctccgcatcaccgacaggcgcgaagggtaaggaagcgccaaaccaactatgatgcatttagatagctggaacgtagggtcgcttatagttaagttaaaggagttagttgaaacgactagaagacatgtaaatagcttatacgtccaacagaccaaatagaagggtcaggaggcgaggtggtagacaataccgatttcaaacattggtacaaaaggatagctgcaaatagaaatggagtagaaattttgattgataagagtctcaagaacagtgtggtggatatggggagacaaggagataagattatcttagtcaagcttgttgtggggatttggttgataagagtctcaagaacagaccaaattttgattgataagagtctcaagaacccgtgtgcagcatgagggtccgccccatataggtcagatctttactcattctttgagccctcccagcccctacatgaggatccacccccctccccataggtcaatcgatctcgtgtgcacacaaccagagaaaccagtgagtgatcttttttaacgttaacttgaaattcgctcccactgggattctaacataggacctgagtgctacttagaccacctaaccaacttggtgcctaacgagtggagaagtatattggtaccgatctacaagaataaggaaaatattcaaagttgtactaattaccagggaattaagttgatgagccatactgtgaaactatgagagatagttatcgagcatcgtgagaggaataacgaagatctatttgaaccaacatcgagcaaaagaatgttatgtggtgggctttggaaaaaaacataaagttccaacaaagtattagtaaagacatgtacaacaagtgttgtgactagtcttcgaacaaatgatggggacacaaatgacttctcgattagaatagggctaacatcaaggataagctttgagcccttaccttttgacatataaggggatatcctttggtgtatgttttttttgcgaacaatgtagttctagttgataaaagtcgagaaggagtaaatagaaaactagagttatggcgggagactctagaatccaatggttttagactcaatagaactaaaatagaatatatgaggtgtgattttgacattacacgaggaaggagatgttagtttggaaggtcaagcagtgcctaggaaggacacctttaggtatttaggatcaatattacaaagacggggatattgatgaacatgttagccatagaatcaaagcaagaaggatgaagtggcgtcaaccatctgactttctataggacgacgattagacctgctatgttgtatggtgcagaatgttggcctacaaaaagactacaagttcaacaaataagtgctacgaaatgtgtatgtcgtgttagatttgtggttgtgttttcaagtcgtccgacttagtcggactagtcggttttgggtggtcgatcagggcaggcgaccccgattaggacacctgatcgtctggtcgtccgactagtcaacgaatagcgacgattagtcgctcgatcaggataccatgtccgaccagggttcggcgcacctcaaatttttcgcaacccgccgtcctgggggtattgttcactgagtctaggataatttaccagctagcctctgcacttctctgtatttgaggcccagtccagaaaactcgaaaatcagataaaataaaatataaatagatttttaatgtataaataatagctagaaacttgccaaattcatataaaattcatacgaactccaaattggtccattccagttcctaaaattttgtaatattattgtttatccattagtgcctctgttttggcatgaaagactcagtaaaatttatctattacttaatcttgtattaaatacataaaaccttggaaaattcataacttaaaatctataacttcaaatttaatgattccagttcctatgatcttattttaatgtctagattattattgtgtattttacttacatgtttggtgtgatgttaatttttgctatactatgtatgtattgtgttgatgcgagtagacgagcaagctactgaggatcctggagttcagcagatagaagttgctgagcagaagctcattgaaggcaagttgtgcccttgatcacttcctttttacccagtcatgttcttattaatcataatgatctgcataggttaattttgatgggacccaataggttaccctagattttgactatctttatactttgtttcaccactggttttattactaaatttttgggtagtacatgctattgctttatgtggttttgggtatagagatattcactactcatgattacactttttattatctgttcattttttactgttcatgacaagatcattatgttaatggcaacatggagaaccacccggaaaaacagtgctaccacaagggtttaatgggacgcccttggctgattaactaggaaagctagtggatgaataccttacccgaaaggggcaagggcagtagcggagtggtcagtgtagggaggttcttgggttgattttgctgcgatggcggtcaggcgaggaattcctgcaatggagccttcctataaactgtagcgggttttctgaagctagtggaactttgtaaaggccttgtagtggtaccctgcctcgcttccttggtagagatgtatggggtctgatcaactccgtggcaaataggtaacacgacttgtgggtaaagatgtgcaacctctgcatagtgtaaaactgatatactagctgtgctcacggtcatgagcggctcggaaactcacatgattaatttatggaacttaaacttaatttgccatttcatcgcattgggattattttattattacttttatttattatttctaaggtttggtatttacttatacttagtaattgctaataaaattttgaccaacttataaaagcaatgctctgcttcaacctttattttgttgatcagccttacacttcacatgaactcccacctttggtgagttcatgcacattattccccacaacttgttgagcgatgaacatgtgtgagctcactcttgctgtctcacatccccaccccccacaggagaagaacaggtggtcgaagagaagccgcctaacactgaggctttcgacttgatctaggtggcgtttcccagtcagctttgtggcgtcagggaataatatatagttcgctttattttatcatttatttttgtaagacttctgctatgtaataagtacatttatgatatttatgacatttatctctatgcactctgttattatatgtgttgtcttctctggagcatatatgagatgcacccgactttgttccttaaatccgggtgtgacacttttttctggcacacgcccttaaccaaacacgcacttaacatttgggtgttgtggatgaaactctaggtgcaactcaggtctcagggaccaaaatttgcttaggactattgctgctgcaggtgttggttcctcctctcagacacagacctatgctagaaccagaaaacgacctagaaatgcagcagttgcagcccaagacatacgtgaagatgacaattctcctaatgaagatgaacaagaacaagaggcagcaagacaaatgaacgatgatgaaggcaaacatgaattaggtggaaggggagctgctgttgatgaatttcagttgtatgaatatcttctttaggtag

SEQ ID NO: 78695 - DNA, 173 bp, Zea Mays
aagagatatatcaatacaaaatgaatcatactaatatgatataattctcatcacagacgattaaccacgaatgaaccagcttatgcctacatcatatttcaaaatatgaacctcaaaagtcaataaccaaagctaattatttggttctttaaacagtgtgtgcaacgtgccgc

SEQ ID NO: 78696 - DNA, 445 bp, Zea Mays
caacaagtcaaaacggtagcaaccaccgctacattcacttgccttcatcgaagaagaaaatgtactaagcatgatccagagcataaccaccaattcttgaagaggaacgatgacgacgacaggcgactgtgtgccctaatcttccctctcttctctcccttgttcttcctttcttctcttgggcaaggcacaaaaggggatggctgctagggtgggaggacgtggctgctagggttagggaggtataaatagaagaaaactccctcaatcctaatatccaatggctcagatcgaccggcacttgaaaaaactcattcagactccaaacaaggcaaactagtagtcgatcggaatcgtctcgacgatatctatgcatctacggtctccgatcatcagtaggacacaccatattaggattataaacatggtttggtttttagggtat

SEQ ID NO: 78697 - DNA, 252 bp, Zea Mays
tacactgggagttatgcaacatttaagatgatggaaatggccatgaatagggcttgtacccaggcacaagaacgacttgaggaaacaaaggttcaagcggaacagattattggactagagcatcaggtgacagaacttcagacgcaacaccaagctgatcagaatcgcattaaggagcttgagcatcagctaactaatgctcactctaaatcaaaagttttgagtcagcaacaagaagaaattcgcttgtat

SEQ ID NO: 78698 - DNA, 2777 bp, Zea Mays
ccgctcaaggactcagcctcatcttcttcaaaatcgttgtgcccgtctccagctctctccactgcagcaccttgcgcgcgccctcctcaagctcgcttctctctgctcacctctaccctgctggccttcgttgacacagcgctgcgcgcgcagggcactcgtgttccggatcacgccgtgagcctctctctcgccgcgtcactctctctctttctcgctgcagtcgctccctgtgcagcgctcgtgttccctccgagtctgctgctccttgttcctcccactcgcccagtccccggccgcatgcatccctgctcggcgtccttcctttgctcgcccagccgctcctctctcccctgccgcgcgcgaagctcctctgcaggtcgcgtcctccgctcagccggcgatggctacctcgccattgtcctatgtgcgtcagcacgaaaccgtggtcgtgtttatcgaatttgtcaatgctctgttaccgattcgattgtcgtcgctgctgcgtgcctcaccactgcctgctcgcgtttgccgtcgagccgttgaaaccgtccttgctcgtgacttcgtcgtcgccagagcctacgctaacctgctcaaccacacctcgtcagctcgctccagacacaatctcatcgtcgttccacgcgtcagcaagaaatcccaagaatcaggtgaagacgaagctagcagcgcgatatttcccaagcgctcgacaaattgcttggatcagaaaatcactaccgatctcgcggattcgagtcagctgctgaaacagtaagctgataaattattcagaatagttcaatcgttgaataattaatgtgctagtgcgatacttattaaggttctcgataaattgcgtgagtcacgaaactctcgtcgacttcgcagttcttgcgattatcgagccagattcagctatggcgaattatttcgctattccggtcacttagctgaattagtggaccgggtagaattttggtaggcatgtgtgatgataaaatattttaatcatttataaagatgtagttaaaattataaggcaagggattagttcagaatttaattaattaactgataagttgtgattaggctaattgtatttcatgtgtatagtttgttgttcgtgatgtttgcgttaggttcgagaagcgtaattattgcgtgtagtcgtatattaataactactgattccgtacaaaattgtacaacgcatcgccactaggtgtttaaattcaccatcgcgtagcactatttaggggttttgatattcctgtctatatgcattcatatgcataatgcatttcattcaggtgcgataattaatcacgtgatgcggaagatgactcaagtcgaccccaagcgcgggctactccgcatgttgatgctgatgaacaaacctgcctgatcaagtgctaggacaaggatgatcgtcaagtggacatcgtctaacaaacactaacctagtgttacccgggcaagccccggtgcatgcaaccccttccttgtgtttttatattatttttacacactttaagtctagtgaatgtgcattaggtttataggagttgcttggaaacccttggatgcattgccttccttgaaatccatacctttatagatacttctggtgaagtatcaaaatatgatttacaaaaatgcttagccctgcttagatcttgtggatagaggttgtcttttgcaataatgcctagctcaggggttatcctgaggaaggatggcttctatctgcaagaatattttcatcgggagcatggtgggatcttactgcaaagttccctataatgctcttttcatcctaaggaacacaaacaatcctaaggatggaagtacttaaatcgggacttgggctaggaaaaggtgatgttctacctaggttagttaaggattggatgcgcatgtaggcctgttgatcaaggactatcttaactagccacatgccctagaaatgggacagggtaagcttgaacccggctattccatacatgaaaagacaatcgcgcactgggagtggagagatgacgagagtgacacgtaccctcctggcaaaggactgcctaaaaggggtggtgtgctctcgggtggcgcggacctgttcatgcagttgaggatccatgggaatggtagacatgcaaggtttacgagaaacatatgtcgtgtggttagagatcttgagctgagtaaatcgattcgaatcgccgttatatccccggagagtggagacttgatctccgacctacaacctaagtcagaatgtgaacctcatgaataaaaattatgttgtattgatgagatgcaaatagagtctattaatatttaatctggcgttaaaatattgaaagtaaggactcactttagtaagctatttctgcaaaagtatctatgttgattcttgctaaagcctctccttgattcccaaatccagcatatccttgagagtcttttctttagtcgggtaagtcttgttgagtaattccatactcagggttttattccctgttgtttttcaggttttaactttgtgctactgttgatggtgttaagtgcctgtgggctcggccttcttataagtctaagtaacccttctatacttcttactgaggatggtcacttaagctagcatatatttcaaacttataaacaatttataatagttcaaaattattcctttgaatcactttttgtaatcactccgatcatgtacattataaaacttgatgtaacatataaaatttggtaataagatttcc

SEQ ID NO: 78699 - DNA, 278 bp, Zea Mays
gtaaaaagggtcgaacaattacaataccacctagatagcaagacaagagaaacacatagcacgacctaacaagagttaccaatctgacacgaggtaaggcatttctaacatagcagtacatcacattattcacaagttcttattatcggaataaaggtgagagaagcatgttgatgcataagagacaattataatgcaacaatcacgatgcatgctcattctagtcgtcttctcagacctaactactttttcgggtgcttgctatagcatcctttcta

SEQ ID NO: 78700 - DNA, 230 bp, Zea Mays
gtaattaaataataattaaataatataataataattagtctaaaaacaagtattccattgataaatatttttggtaaattttttatgatttttagagttctttaaaaatgaatttcggaatttaaaaaaaaagaaaaaaaaaccaaaaccccacccagccggcccacttaggggcccagcaccccattaccccaaccctagtcgcgcgcactgcatttgccaaccaccgc

SEQ ID NO: 78701 - DNA, 1764 bp, Zea Mays
aaataagcaattcaagccgcctgaaaatgagtcaggcaataggcgccaacacgacaccagttggacctaagtcaactgctcaggcaaatgattacacctctcggtcacatcaagttactactccaggacagcgcagtaaacactgtgcataccaagacacccctcgggcacacccattgggtgtgtcgcccagaattttcaaagattttatgaagaagagatatccacaaaatatacgcaatgaatgtaccacgacaaaaggaggatatcggcttagatggaagcaagtccaaatatggctactaaagtgcaagtctcatcaacaaaagcattgaagtacagagcagggtgatgtccagctgagaaccatctgcctcaacgagccagacatccaatccgtcaccgatcaaatttatttcagacctaacaaggcatggacagatggcattgtttgaatatatattcataaagtgaagacaaaatgttgatttctaaagcataagatgaagacctttgaatgaattaattctaaaatccactcaaagatcgggggctacacccgttgggtgcacctccagtaaacccaatagatttatagtcccatgaagtcaaaatgctgatttctaaagcataagatgaaaacctttgaatggattatttcataaatccactcaaagctcggggtgcacccaatagatttaaagtccgatgaagacaaaatgctgatttctaaatcataagatgaagaccttataatggactatttctaaaatccactcaaagctcgggggctacacacattgggtgcaccgagatgcacctaatagatttatagtcccatgaagacaaaatgctgattttaaagcataagatgaatacctttgaatggattatttcgaaaatccactcaaagctcgggggctacacccaatagatttatagtcccatgaagacaaaatgttgatttctaaagcataagatgaagacctttgaatggaatatttataaaatcgactcaaatctcgggggctacacccaatgggtgcaccacccatcgacagagcagaaatcaggccatataacaaacccataagccagagcaagatctttgggctgattatttcaaagtcaactcaaagattgggcgcttgtggtggacagatatctcctaggtccactagaaggcgaaaaggcctcgcgcggggcctcaggccagttaccccgcaaggccatcctttcgtgggccgggctagagctattggcggaatgggccgacctgagaaggcaatggattcaaccccaagcaatccgtcgaatcgtgcgctatccaaagaaaccatccgactttcccgcgcatggtgtcctcgaatatcggggcagattagggatgagtcggcggtgttttcgggagatcagttcaatcggttcactattatttaggaggcatgtgatcatgatgtacatgtggagtgccctacggtcgtgtatataaggcccagggggtaccccataattttcatcaccatcgacctatctcattagcttttctccattcaggagataccacttgtaaccaccacatacagatccaccccaggaagtagggtattacgcctcttcaagcggcccgaacctacaaaaaatcgtctcactctctctctcatacgaccagcacgaacaattgagttacaatcaacagcaccgtcctaaccaaaagcaccgcaagggtaaccctgggtgtgcggtcgggctctaaacaccgac

SEQ ID NO: 78702 - DNA, 947 bp, Zea Mays
tgtaacacctcggggtccaccaacaccccggaatgctactaaacaacacttctgacatctatatataaaatttcggcagcatcccccttgcaaaattgcataaatgagggggcaacaatgtataaacatatatcatgacaaaaacatactaagtattattaatcggctagcaaagagaagttaaacatacgacatgaagtgaattaactagtgcgcacggctagttaaaaaacaaacttccttcgacaataagtttctaattaaatcatggctgcgcctgggcagcgttattgtgagagtgaaagtggatgtgctgctactcccctcattcccaacatgtatcaagtacctgcattgagtaatgcaagagtgagatgacacatctcagcaagtaaaataatatcaaactgttaaccacataagaacattgttttaccaccacttgattccacaaccttcttattacgaaggtgcagcatgtatacaacgtacaacacacctagtcaccacaccttgcaggtagaaaccacaatagtaacatagtaatgtcacacttcatatatatacctcatgagtgcaaatgtctgcaaatgcaaggatgacttctgccttcatacctctaaggatatgaagccgcatcgtacccctcctcgggcaacgtacgatgctaaaaatgtaccggtacggtcggaccataagatcacgacataacttcaaaatgcaagatggatgatgcgatgatcatgtcatgcctacaacacttcatataacgtgattcaaaaaaatacttcaacttcatccaagatgggaatcaaccacatatatcattaccaaattatgatcatccacaatattagacaattgagaattaatacttccaaacaaataaacttcatcatagaattcaatgattaacataattaaaacttatgcatactcaatgtcag

SEQ ID NO: 78703 - DNA, 363 bp, Zea Mays
ggcaaaccaaacccctcagccaaacagctgcatggtctggaggtagaggagtagactcctcacaccgggtaagtctagctgggtattagtatactcagccttgcttgtggctaaattttttgcaggtacctccttgttttggttgatggtgtgacttggccttcatctctgccaccgggatagatggtcgagagggttactgcttccgcaggagaggaccaggaggagtagcgtggccaggcttcaccatgttactcggttttctccgttagttatttctgctgcattaaaattatggctactatttctgaaactttgataatgtaatcactaatgatacttcttaaatttgtggtattattc

SEQ ID NO: 78704 - DNA, 811 bp, Zea Mays
ctcctttgtaattataagcatcatagaagcaaaagagatatatcaatacaaaatgaatcatactagtatgatataattctcatcaaggacaattaaccacgaatgaaccagtttatgcctacatcgtactctaaagtatgaaccttaaaagtcaataacccaagctaattatttggttctttaagcaatgtgtgcaacgtgccgctacttcccactccccttgataagcatcaagcacctgcattgagtaatgcaagagtgagatgaaacatctcagcaagcaaattgttttggtgagatagttaaaccacaagatgaattaatcaacattttacaggaatcacaattaagaacagaaatacatgtagatatagaactcaatagtcccaatataaccaataccatctcatttcctcgagcaaccacaatagtttgtataacacttcactacgtcaacaataactgtaaatttcacttcagtgaatgcatgtgaatgcaatgcatatgtcatttgccttcatacctctgagggtatgaagccgcattgtacccctcctcaggcaacgtacgatgctaagttgtaccggtacggtcggaccataggtcacgacaaaagttcagatgcaaatgaatcatgcaatgcatatggcatgctgcatttatcaatatacttcacttccttcacatacaatacaaacctcaaacaatacttcatcttccttcagataaatacaaacctcaaataatactttaccttccttcagatacaatacaaacctcaaataatacttcatcttccttcagatacgtg

SEQ ID NO: 78705 - DNA, 541 bp, Zea Mays
ttaccttcaatcaagccgaaggtacaaatgtaatcatgtgttattcaaattcattcatgattatataaaaaggatatattatgatgtcatatgattacccatgttgtttcccgtgtttcatatgcttcgtctttcattgatatataagatacatgtatgttaatgatatgcaaatttagtaaacacgatgtatatggtgaagtaatattaaggcagtggttaaactaaggttcctttatcgtacgatgttcttagtgttttatacttacttattttagggtcttgagtggaataaagaatttaatcatctcattaaagttttaggggacacttagagagatctagttgcgtaatattaattcattccacaattcccctttttattttctatttatgcttttaaagtgagcttgaactaccataatgatttagaaatttccaaaaatgttgtaaatattacagtgggttagtattggtcactgtagtctattctacatatttgaggttaagattaattaggataaatttaggcaaaaataac

SEQ ID NO: 78706 - DNA, 184 bp, Zea Mays
ctccttcagccgacgggacacagcgcccgcctcgtccttgacggcagcgagcaccgaaatctcaccgccagcgctgagagcgccacccttcgccacaggcactgtggcagacaccattgtcgccaccgcaggcggaacaacaaccagttgcccctcgcccgatcctgcgacgcatcaaaaaaac

SEQ ID NO: 78707 - DNA, 459 bp, Zea Mays
cttggcttggccgcccctcccttttcccccttggttggccgcccctctccttccattgcagctgccctccattgcttcctcctccctagatcttcccctactgagcaaggatcgagaagaggacgagcacgttgaattgaagaggaagagaggatcaatgagatgttctaccccatctcttcttgcagattttcttggggaaaccataggtaaggatggtatccttgttcctccctgtaattatgtgcttttagaggttttggatcatggggattaaaggattagaggttggattggatgtggggttaggttttgatctcgaatttagtttctgcagaatggcagattcgacaatttctgttcatggcagttttccgtggtcttagtggcctcaaaaaaataaaaagtctatctatgagttgtatacaatttgtagatctttccgtggctgggaagaac

SEQ ID NO: 78708 - DNA, 240 bp, Zea Mays
cacgctcgtcgtcgctttctcaggcgtcgacgtcgctgccattagccgtggtaccgtccacggtgccgtccaccggttatgtgccgccaggcacctcatctgttcccctgacccttgattccctcgctgaagtagtccgggaaatctcacggaacatggctgtcatgcagggaaacatgatcacgatgcaggggaacatctcctccatccatacctacatcaccggcgcccagaacccac

SEQ ID NO: 78709 - DNA, 66 bp, Zea Mays
agctcttgcgcaccaacacttgcttagctttttaagttttaagcttcgactttgaaaacagttttt

SEQ ID NO: 78710 - DNA, 651 bp, Zea Mays
ctcacagctttggcgctgtgtcaaccttcgtattctttgggcttctcccactgtggtaccgattcgagtccgaagatacctgttcattcattatactccagaaacattgttaaattatgtttttgaggaccttcggaagccgaaggcccccaacacccccttcacccgcatccagtgtcgcttccaccgctcagggttgatcagtcgctttgacattttaggcggataaaaacctacgcgagcttagttaatggcagattttggactaggcttacgggtatttcccctaattgatgtaactcttgagaacttttgagatctgtgagatgttgtaaccttgttatcttcatttcgaacctaatattatgattatgacatttccttcccatatgagataatagcttgttgttcgaaattgtgagttgggatgacattggcgacaatctttattttcagatggcagctaggcagtgtcgcgagcataacgagaaagttcccccgccgcctcctccagctcccacggtgcaggagctgatggcccagcagaatgagattctgtgacagctcttgcagcgccagccccacccccagcagcatggtggaagccagtatcagctacctccgacaacggcaacctactaggagtttctg

SEQ ID NO: 78711 - DNA, 364 bp, Zea Mays
cgatttttttggtgtcactttgaaattctcttgcgcactattttagaaacaagtttttatctcaaaatttttatcgactttggatttttagtcggagaaggcgaatcgtggcattttaaaatcgctgttgatatggggttttgaattcggtgcagacacaaagatactaggctgagttgagtaagaattaattagggacgacatactgagtattccgtttgagaaagcggattcggacaaaatagtcagacatagatcaagttcgaggaattagactcgggctcagatcaaataacaaccatcgagagtttgattaaatgagctccagatgagatttataattcgagaatgattttcgagtttt

SEQ ID NO: 78712 - DNA, 976 bp, Zea Mays
aaaaatcaatttctataggtacttatccaatctctttgttctctgggccgagaactgaatacagagaactacagggactgaaccagaagttttccccagactcagaataaccctaggacggactgtgggttggttttctaaaaccaggagggcttttctgcaaaacacgcacatcgaagggatattgcggtttactggttgttggattcgagatcgagcgcccagatcagactgcccactccgcgaatcggtatgtgatcccaactgttggatcccacatcggtggctctgatttaaaaacctatgacctaatctcccgcgttcatccgccgattgacggacgtgatggctccattgcccaaccggtacgcttggatgatctcggccgtgcagattagatccgaccactcccgatcgtcttcctgaccctgccgaactccgccgacccccagcttcacgccgcgatgaagccatggccagagggacctgctctaccccccaatgagccgagtactaaattcgttgggcgctaaatgaaattgggacgatggcggaccagggaaggaagaatcttacaatggttacgcagcgcttgactctgtccacggcgcacggcgaattcgcggcgacagtgatgaattggaggcgcccagatcgctccccctccttgattccactgtgagtgcattccggatgaccaggcggagctcctcgactccaccccgggtacccgccagcgatgttctcacatggcgacaatctctttcctcacggagatccgcttggacaacacggcggcaccgaggcgattcacggggtgtcgaaaagcgaaaaggaagaggagaggagaggaaagaagtcgcgacgatccggcctatatgggcgcaaggtcgttcgcgacgcggagcaatggagctccgggtcttcgggcgtacccgccctagtcggcgaggttgttgagggagctgctgatgac

SEQ ID NO: 78713 - DNA, 255 bp, Zea Mays
gcccattctatttaaataataggtttgtgcctaaaataatttattctttaaaatttggtattttatttataaaatattatctttgaatttattacaatttttaaaatatttaaatataatatagatatatatattataaaaaaaaggaaaaaaacacacacacaacacacgctacacatataaattaagaaaagaaaaacaaaaaaaaaatctaggcttcactggacgtatgctttgcctacaagccgctagacc

SEQ ID NO: 78714 - DNA, 2431 bp, Zea Mays
taaggattagaagataagattgcatgtagataaggattagaagataagatttgttagagagaaaataggagatctatctcattagataaggattagaagggagtataaataattgtaagcgccactctatagatcaagcagaaacaagattgttccggcttcccagagggagcccggagattactgtgacctagctgcccctttcctcgcgcctctctcctctcacgcgcggtgaacacggtgacccgccgccgtgcatcgcgccccaaaccccggccaccaatcacccaccactacaacctgcgatcaatccgggaatcagccccgattcctatcaacctggtatcagcaatttcaggttcgatcaccatgtccagccccaaccctccaccttctccccaccacccgcagccgccaccatctccggggctgtcccagccgccgggtgcccagctgtagacaccggcatcccaggggacgaccgcccccatgctcggcgatcacacggtggccgcactggtgcccactgcgccgccagccgacgccgtggcgggctcttcccgcctccaggcattcacgcctcatgagatgacggcggccatcttggagctaggccaggcggtggctgggatccgcgccttcctggcagggccctatacaccgccaccgcagctacctccgccgcagcaaccgcccgcgtcggcgacctcgtaccaatacgggatgccgccggactgggcaggttctgcttcatcttcttcaccacaggcgtctcagggcctccccatccatatggtccgatttccgccctcgccctcaccactgccggcgtgggcgaccgtgacatcggcacccgtcttcggatcggccgccatacaaccacacgtaccgtttcagccagccgctgggggagttccctctcacgggggctcatcggcggccggtgtcctctacggcggggtggatgggtcgctgttccacggcagcagcgttccgcccccggggtccaggggccagtgctcatccccgccagcagcagcaccgacggcacccgcgacatccgatcccctgcctccacgattctacaaactggagttcgcaacatacgacggcgctgcttaccccgtcaattggctcaatcaatgtgagcagttttttcggggccaacgcacgctcgcttccgaccgcacatggctagcctcataccacttgaggggcacggcccagacgtggtactacgccctcgagcaggacgagggcatgccgacgtgggaacggttccgagaactctgccacctgcgtttcgggccgccaatacagggcagccgacttgcggaattgggtcggcttccctttcagtccacggtgcaggagttcgccgagcgcttccaagcgcttgcgtgtcacgtcgacagtgtatcctcggttcagcgggcggaactcttcgtcggcggccttcccgaccacatacgggtgcaagtgcagatgcaccatccacgggatcttcagaccgccatgtactatgctcgcgcatttgagctatgcacggcggccgcacagccagctccgacatcccgccccacgcgacacgcccctcgcccgccccagcagccaccggcgcgtgcgcaagtgggggggcaacctcctacagcggcgcatacacctccaggggggcgcccctttcgtcggctcacaccggcggagatgcaagagcgacgccgccaagggctgtgctacaactgtgacgagccatatgttccgggtcacgtgtgccagcgcctcttctatttggagtgcggggactacatcgtcgacgagggcgcgctcgcgactaccgatgacgcaggactgcaggctgcgtccgtccaggaccctgaggccgctattgcttttgtggtctccctccaggcactcgcaggcattcgcacagagagctccatggtgcttccggtgatggtcaagggggagcgacttatggctctgctggacaccggctccacgcataacttcctccagagtgccaccatgcgtcgtttggggcaggtacccgccgcaggggagcacctcagggtcactgtcgcaaatggtgacaaccttcgctgcgccggggtggcccgcgatgtacccatctccatcgagaacgagcacttctccatcacgtgcgtcggcctcgacttgggttgcttcgacttcatcctcggcgtcgactacctgcggaccttagggtccatcacttgggacctcaaggccatgacgatggcattccagcgcgacgaccaccgtgtattgtggcggggcatcgggggtgccgaccctcctgaccctcgagcctccgtagcagcggtggtagccgcaagtgaccagcaacccatgctggaccggcttcttcttcagcatgcctccacattcgaggagccccgaggcctgccgc

SEQ ID NO: 78715 - DNA, 200 bp, Zea Mays
cactataatatggtaagatatcaatcaacacattcttgatacttccaataccaaaaggggatatgataataacatatcatgatatcgcacgaagcgattgtcaaaaatatccttttctctttccaaaggaattatgagaatattttgtttccccacttatagagtttgtggctcaattctccacattgcatgcttcttcc

SEQ ID NO: 78716 - DNA, 383 bp, Zea Mays
taatgagtcggcttcgagtttgtgttgaaccccccttttatgaatgaagaatgcagttatttcacttaaacattgttgcctgctttttgctcgtgcgcttgaaggcttgccgacattttagaggtaatgctcgagtgatgattgtgattcttacttttccgagttatgatttgacattttagaggtaatgcccgacttatggagccaacttatactcatgccgacgtgtcttcttgagttccgaaccctaaatctcacttttctcctccgccacttctctgttctctgagttctcgagcctgcctgctccgcccgagagattgcaatggctcccaagcggaagaggcagagtgctgctgctttgattattccgcccatcgatc

SEQ ID NO: 78717 - DNA, 752 bp, Zea Mays
ctttgatttctactagtgctgaaaaatctgcgctatttacagaactgccattctgctagtttgttacttttatcttgttgtgcttcgataggacacgtcttagccagcaattgtgacttgtgctttagacacttattgaacttcgctagtctgcactcgattttgttccacattcacatacatattgtgcctgtcctacatctccacatactatatcttctgatcaatacagatttgacccttgcaatcgcgatttcactacctcttggtaagtatcacgaaccagcctccgattgtaccatcctttccttgtatttcatcagacacttgtaagagcttggtaagatacattagagtgtgttcttgtgttccacctaagaggagcgtgtagtgagattattagggataaccgtcaccgtttgtttcctgtttttgtgtttcgatggcaggcgacgacgaggaagcaaggatccctacagacttcgatgaatgtgttagccgccaagatcttgaggcaaacaacaagctcttgaaggagcaaatggaggagatggtccacaagtcagtgcatgatgccttcattgacatgaaccttggcaagacttacgagaggctggatcaacgattgtcccagatcgtcgacagacttgctgtattggagacgcaacaacaagcaccgccgccaccaccacctcctcgtccacgtcttcccgatgatgccgtgtttgatgaagaaggtaattatgatgaag

SEQ ID NO: 78718 - DNA, 159 bp, Zea Mays
gagggtgtgattggtgttcgcggttgggcgtgggtcgtctgcaagcaagcctcttggcgcgagggtcgtcggggtccattcaattcgtcgtcggagtgctccatgcgactgttctgcggtcggtcgcgatcgacctacctgggcacccaattagccggt

SEQ ID NO: 78719 - DNA, 119 bp, Zea Mays
ggacggaatgtgttccgtagggtggactctgagtagaagtttgaggagggaggggaaactgattagacaatttggatagggtagaagtgagcagagtggctacactagtgggtcaactg

SEQ ID NO: 78720 - DNA, 1059 bp, Zea Mays
gtctccctggtagccgccgccgcccttggctcctctcccacctggccgccaccttccttctacctcgtccccctgcttccctgaccgagcagcgcccaggcaaccgcatagcaccgcgtgaccctgaccgccaggagcccgaccggccgaagccccaccgccaggacgccagccgcgccacccgacccgaagccgcccgcgtccctgcacacgacgcgccaccgaggaccgacgccaggactcgaccgcgacccaggctaccgtcgccacgtcgcgccaggccgagccctgcatccgcgccgagcgaccgcgccaggaacccgacacccgcgcgtccattcgtcatgcgtgtaatgaagcttcaagacgaccgtttctctcccccattacttcctccctccattgatgcatcatgaagaacccgccaacgccattgatgaccatggagcacccggcgccctctcatctcctctctccctccctataaaatctgggactcccttcctctcttcctccccaagctcctctctcccttctccctacccgagctccctctctctctcacacactcctagttcgtccgcgccgtcgccattcgttccaaagcccgtggagactcgctggagttcgtgctcactgtccgcgtcccccggccgaaccccatgtctcgctccctactcgaccgagcactacccctcgtcgacgttcatccctgcgcatgagcaagaacccaaggttgaagacaaccccaaaacgttgatttattttgtaaagcatgttttgaattaatttataaatcttgtgaattatcgttgtaatgatttggcgattcacgtgtataattttagagatttcgatgtatacgtatagccaaaatcgaaccccatggcaatactttgaatatgtgtatgattttataattttaaaaatgagtacggtcactattcactaccgcagtgattttcatactagaaaacatttacagatttgatttcgctttagtgtgtgtggaccgatattgattagtattggtataagtatagttttattgatataaga

SEQ ID NO: 78721 - DNA, 61 bp, Zea Mays
ttgttgattgtgtatggtaattctagcgcacaaaataacttgtataaaattagtaagtcta

SEQ ID NO: 78722 - DNA, 400 bp, Zea Mays
agcacaatgtaacatcccaaaattctaacccaggtttgaaaccctaatctcccccccttcttatcttctatcccaaaactcccttagatttttcccatcatatgcatacactttgtttgatcacaagcacctcacttagattttattttccaacacctagatcatccactaaatgatttgttcaaaaagaaaagaaacaaaaatggaaatgagttattaaaaataaaaagaaaaagaaaaagctcttcttccccctgctgggccaattctggcccatgtcgcggccgccttcccccttccccacgcccgcgcattccccccttcggcccattagccggcccgctcgcgcgcacgaagctgcccgcacgctcccctcactctctttcgctgacgagccagc

SEQ ID NO: 78723 - DNA, 129 bp, Zea Mays
ccatctctctgtttatttatcgttagttttattccgctgcacttcgaacaatgatgaccacttttgcaaaaactcagatgctgatgtaataatttgatactccttaatgtatggttttatgctttattg

SEQ ID NO: 78724 - DNA, 943 bp, Zea Mays
ctaatattgtctatgcttcacctattcagtctattagatctgatctcactcttgtgcttgcgacatctttgtagatgccccctgatcataaccttcttgtcttttgggattctttttgtcttccattattaaattgctaccatttgaccatatctattccattggtattgacttgctgcatcttttggattcttccatacccttatcccttaattcaaatacttaagcctgaaaactctgttgcccatataaacattctagtttatattttcatgcccttcctgtctttttgagatcccttttctattctgttgttaagtcattatctttcgataatttctatgcccttggtcttagtatgctcgtatccttggaatcttacatactcttatattcttatgtatgcttattttcataccccaataactgttcaagacatttcagttaacatgtccttgaccacccctgtttcttaacggtccatgagcgatcattttatgttgcccatccttggtgatctcattgttcctttataacttctctcgataatgaattcttacttcaaccattctattgcaccctcacctatcttaccttgattattttctccacttcgccatttcgcgagtcttgccttaactctatcctttgttatgcctttcattattatcacattcgtctttgacacctctataccttaccttgatgcctatcttatacctgcgctccaaaaccttctctctttcgtctcaattttaaacattgaaggttacctattttccctcagttgtatcctattccttgtcgcttgcgagtttttaactccaccctttgttatctgttactacctttaccttcgccgtctctccatcttaccttgatgactatcttatgtctgttatttaaagttccctctctcatctcaattcgagggaagtgtttt

SEQ ID NO: 78725 - DNA, 877 bp, Zea Mays
attctgacttagaggcgttcagtcataatccggcacacggtagcttcgcgccactggcttttcaaccaagcgcgatgaccaattgtgtgaatcaacggttcctctcgtactaggttgaattactatcgcggcgcggtcatcagtagggtaaaactaacctgtctcacgacggtctaaacccagctcacgttccctattggtgggtgaacaatccaacacttggtgaattctgcttcacaatgataggaagagccgacatcgaaggatcaaaaagcaacgtcgctatgaacgcttggctgccacaagccagttatccctgtggtaacttttctgacacctctagcttcaaactccgaaggtctaaaggatcgataggccacgctttcacggttcgtattcgtactggaaatcagaatcaaacgagcttttacccttttgttccacacgagatttctgttctcgttgagctcatcttaggacacctgcgttatcttttaacagatgtgccgccccagccaaactccccacctgacaatgtcttccgcccggatcggcccggcgaggccgggccttggagccaaaaggaggggcggtgccccgcttccgacccacggaataagtaaaataacgttaaaagtagtggtatttcacttgcgcccggaggctcccacttatcctacacctctcaagtcatttcacaaagtcggactagagtcaagctcaacagggtcttctttccccgctgattccgccaagcccgttcccttggctgtggtttcgctggatagtagacagggacagtgggaatctcgttaatccattcatgcgcgtcactaattagatgacgaggcatttggctaccttaagagagtcatag

SEQ ID NO: 78726 - DNA, 1274 bp, Zea Mays
ggcaatgatccttccgcaggttcacctacggaaaccttgttacgacttctccttcctctaaatgataaggttcaatggacttctcgcgacgtcgggggcggcgaaccgcccccgtcgccgcgatccgaacacttcaccggaccattcaatcggtaggagcgacgggcggtgtgtacaaagggcagggacgtagtcaacgcgagctgatgactcgcgcttactaggcattcctcgttgaagaccaacaattgcaatgatctatccccatcacgatgaaatttcccaagattacccgggcctgtcggccaaggctatatactcgttggatacatcagtgtagcgcgcgtgcggcccagaacatctaagggcatcacagacctgttattgcctcaaacttccgtggcctaaacggccatagtccctctaagaagctaactacggagggatggctccgcatagctagttagcaggctgaggtctcgttcgttaacggaattaaccagacaaatcgctccaccaactaagaacggccatgcaccaccacccatagaatcaagaaagagctctcagtctgtcaatccttgctatgtctggacctggtaagtttccccgtgttgagtcaaattaagccgcaggctccacgcctggtggtgcccttccgtcaattcctttaagtttcagccttgcgaccatactccccccggaacccaaagactttgatttctcataaggtgccagcggggtcctattagtaacacccgctgatccctggtcggcatcgtttatggttgagactaggacggtatctgatcgtcttcgagcccccaactttcgttcttgattaatgaaaacatccttggcaaatgctttcgcagttgttcgtctttcataaatccaagaatttcacctctgactatgaaatacgaatgcccccgactgtccctattaatcattactccgatcccgaaggccaacacaataggaccggaatcctatgatgttatcccatgctaatgtatccagagcgatggcttgctttgagcactctaatttcttcaaagtaacggcgccggaggcacgacccggccagttaaggccaggagcgcatcgccggcagaagggtcgagccggtcggttctcgccgtgaggcggaccggccggcccggcccaaggtccaactacgagctttttaactgcaacaacttaaatatacgctattggagctggaattaccgcggctgctggcaccagacttgccctccaatggatcctca

SEQ ID NO: 78727 - DNA, 664 bp, Zea Mays
tattcatttgatatcttggacctatgtcacaattatgccaacaagagattgcaaaatgaactctaaatacaacacaagtgtggaacacccctttgaaaaggtaaaacgcaaaggtacatcacttatgacacttctccattacctttgtgccatctaaggaccctcttcatgatagtgtgtaacactccaggttccacaaacaacccggaatgctactgtactacacttccgacgtccatatataaaatttcggcagcatcccctttgcaagatagcataaaagagggggcaacagagtataaacatatatcatgactaaaacatactaagtattattaatcggctagcaaggaaagataaacatacgacctgaactgaattaaccagtgcgcatgaccatataaaaaaaatgaacaaacttcctttgacaataagtttctaattaaatcatggctgcgcctgggcagcgttattgtgagagtgaaagtggacgtgctgctactcccctcattcccaacatgtatcaagtacctgcattgagtaatgcaagagtgagatgacacatctcagcaagtaaaataatatcaaacagtttaaccacataagaacattgttttaccaccacttgattccacaaccttcctattacgaaggtgcaacacgt

SEQ ID NO: 78728 - DNA, 2138 bp, Zea Mays
aagaactctagttacaggtaattgtacttaacttgacaaataaaattggatttttaaggatccactttagtaagcatttctgcaaaacagagtctttgattattgaaaagccttaccttgactcccatataaccagcatacccttgagagtcttttctttagtcgggtaagacttgctgagtaattccatactcagggttttattccctgttgtttttcaggttctaactttgtgctgttgttgatggtgttaagtgccggtgggctcggccttcttataagtctaagtaacccttctatacttcttattgaggatgatcccttgagctagcatatatatttcaaacttatacttttgtaatcactccgataaactaatgtaaattttttgtaacctgtaaaatttggtagtaagatttccgctgcaacaatattggtgtgtgtgatttgtgttacttaatcccgcggttctggttgaaagtggtttatccgatgtccttggggcaatcggacagatcctgttgagttatctggtgcacatgcatggctgtctgaggtctttgggacaaggacaggtgcatgtgggcccaataacttggaggttctgccacaggcttcttgcttggttatgcatcaaatgcgcatggatatcgtgttttcaacaataccaccggtcttgttgaaatagcgatagacgtgacatttgatgagtctaatggctcgcaagggcatgtttctaatgacactgcaggaaatgaagaactaccttgtgagtaggggtgggcgtttgggttacccgaaattttcgggttgggtaattcgggtttttaaaatttcgggttttgagaatcgatacccgaaattacaacgggtttttcaatacccgaaaattcgggtacccggaatttcgggttcgggttcgggtattcccgaactacccgaactattgtgttggcttcataaaaacacatacatcctattaaattagtataaaatatagtttgaataatgatatacatggatatataaaacacaagaaatctacaatcacaagttatgcacacttacacataattatagatgtacaaattaaatattaagcatgacatgagtacatgacacatgaaagttcgggtaattcgggtatttcgggtacccgattgtgatacccgaattacccgaaataatttcgggttttgcaagttgctacccgaaattcctgaacaaaattcgggtttcgggtatttcgggttcgggttcgggtattccgggttcgggtttcgggttacgggttttttgcccagccctacttgtgaggccataaagaaacttgcaataggtgaagtgagacctcaagaaaaggatgatgaggaaggaactttctggatgaccaatgaggttgttgatgtgggtgcaaaggtggtgagtgacaaagtctccacccaagcaaacccatcaacctcaagtcatccaagccatgaacaaaatcatcaaaggatgccaacagtggtagaagatgaacacgaaagtattgatggtggagtgcctcttgatcaagtgaatgatgaggaggagcaaatacaaagacaaccatcagtgcctcatcctagagtccatcatacaattcaaagggatcatccggtggacaacatcctgggtagcatcaggagaggggtaacaactcgatctcgtttagctaatttttgtgaattttactcgtttgtttcctctcttgagccacttaaggttgaagaagcattgggtgatccggattggataattgccatgcaagaggagttgaacaacttcacccggaatgaagtctggtccttagtccaaagacccaaacaaaatgtgattgggactaaatgggtctttaggaacaaacaagatgaacatggcgtggttacaagaaacaaagcacggttggttgcccaaggctacactcaagtggaaggacttgatttttgtgaaacatatgcgtcggtagcaaggttagaatcaattagaatattaattgcctatgcaactaaccatgatttcaagctatatcaaatggatgtcaagagcgcatttctaaatggaccactacaagagagggtatatgtggagcaaccaccgggttttgaagatccaaa

SEQ ID NO: 78729 - DNA, 4916 bp, Zea Mays
ctagagcttggtatgactgtcttaaagattttttaattaagaatgggtttacaataggaaaagctgactctacattatttactcgcaaagttgacaatgaattatttgtgtaccaaatatatgttgatgacattatatttggtagtactaatgaaaaattttgtgaagagtttagcaaagtaatgacaaacaggtttgagatgtctatgatgggcgagcttaaatacttcctgggatttcaagtcaaacagctcaaggaaggtacttttctatgccaaaccaaatatacacaagatatgctcaagaagtttggcatggaaaaagcaaaacacgccaagactccaatgtcatcaaatggacatctcgacctaaatgaggaaggtaaacctgtagatcaaaaattatatagatcaatgataggatcactgctttacttatgtgcatctagacctgatataatgttgagtgtttgcatgtgtgcacgttttcaagcaaaccctaaagattgtcatcttgtagcagttaagagaattctaagatacttagttcacacccaaaacctaggattatggtatcccaaaggctcccttttcgatttacttggctattctgactcagattatgccgattgcaaagtagatcgaaaaagcactactgggacttgccaattccttgggcgatccttagtatcatggagttccaagaaacaaaattgtgttgcactttccactgcagaagctgagtacatagcagctggggcatgttgtgcacagttgttatggatgaagcaaacccttagagattttggttgtgagtttaataaaattccacttttgtgtgacaatgagagtgccataaaacttgcaaacaatccagtgcaacactctagaacaaaacatattgacatcagacaccatttcttgagagaccatgaagccaaaggagatatcgaattgtttcatgtgagcaccgaaaatcaactagccgatatcttcacaaaacctctcgatgggactaggttttgctttcttaggagtgaattaaatatcttggattctcgtaacttaacttgaaaacggacacatagattgtttaattcaccatttttgattaatagttttaaagctttgtgataatctttcaaaacttcgtggaaatgttaaaattcgaatgaattttagtcctaagatttttttacaacttttcacttgaagctcaactggcttagccagctgaactttctagttcagctggaggaggccagctgaacttcagctcacctgcttttaaccagattttaccaggaccatcctggtcaaaaccggttgaaccggcattgtagaccggttgaaccggtctctgaccggtcagtgcagttctgtccgcgcaggtctctgagctgcagctttttcagtcgcgcagtatttttctttgtttttccgcatagcatgccatgcagaatcttttttctttttaaccggtcgcatcctgcagggcgcgcaaattttattttggggctgtctggtcacagccgagcagcagcgtcaggcgcgcgaaatatattttttttggaccggtcgcatccactctgcagggcgcgcagaatctttttctttttgaccggtcgcttccactctgcagggcgcgcagattattttttttgggtgtccgcttgctgccgctcagcagcgtcaggcgcgcagtgacctgtccggtcgctgtctggtcagttttgacagctcgcgcagcaatttttttaaccagtcgcttctgcatagctttgtcagcccccgcgccagaaattttttttatccggtcacagccgaacaagcgtgtcagggcgccatgcagaatctttttttttgccacagccacgctcaagtgcagggcacgcagaaattttcttttgcgcagctttttcggtcgctgcgcagcaaaccttcttttgctgtccggtcgcatcgtcgctacgcagcaaaccttttttttggctgtccggtcgcctccgcgcagcagtctgctcgcacaaaattattttttttgggccgcgcagctttttcttttgccgtccggtctcatctgcgcagaactttttgacttgtgtgacgcatggaatctctgcagtacactttttcagaatcctgcgtcagaaatttgaatttttggcgtcttccctctgctgtttctggctctctgaccacactggtcagaaccagttgaactggcccatggaggcggttgaaccggtcctgaggaccagctcaactgcctatatatatttgtcactccacttctcttctcccactccttccactctcgccttagtcgcttcacaacatttagagccttctctctcacacacctcaaccggttcacagtttcaaaaccttttcaatcatggtgcgtcgtcgcaatccttccgtgattgagtttagcagcgactcggacgagattcaggaggaatctcccgtaccctctcctccgcctcgtcgctccctctctaagagaggacgtggctctggtaggatggatggagagggttcttccatgccctcgcagccgactcgcgggagacgccaaaaggttggcgcctctcgtcctcgtcgtagcacgtcttcctctgggtatgctccctgcccaagaggaggatggggctttcgacgacttcgtcgaccttccggcgccagatgctctctacgtcaccggactgcacatgcatccggcgaacgtcacccgcgatccgcatgaacctcccgtcgacttctctctgaagggaatagacacccttcagcgcctgaggttcaccaaccctactctcactcctcgtcatcctggtgtccaggaccctcggttctggaatcttttccaggctgacttctacaattctgtcattctttccaagaaacacccagtcgtcggacataggtttatagactgggagggttgtgagaatatgggagatgctgacatgacgtcagctctccaaaacttagagagaaaggggttacgaaacattatgaccatggaatacccctggaacgacgaggtggtagctcagttttatgccaccctctggataaagaaagtagatgaggaagctgatgggtatgattacccagtcatgtatttcttcatccagggtaactggcacaaagtcagttatcgtcattttgcccatattctgggcttctctaatgcagatattcagggcagcaacatgcgagtgcataacattcggctgcccatgcgggaagagacgaaatttattcatgtctctaatgagcgggagttctggacgaccgctaacatgcataggtactacaggtaccttaattctttgtccaggatgaccgttctcccgaagggcagaaatcaaatgaacgtccttggggagagtcgagtcttcctcctcctccttgctccaaacagtctcgcccgcatcaatgtgtttgacatgatctgggaagagaacgtccgtgcttcctggtctcctcttagagggtgtcttcatgcaccctttatcatgaagatgatcgaagtggtcacccagacccacttcgaaaaacccgtcaaacactcccgctatgtaccctactgggttgattcctccaacccagctgctcgtacgaagcgggctccctcagggtctggaggccctgcctcgtccactgagccacctccccagcctccccaacatccatcttcctctcgccccgctgctgcctcgcgtccctctcctggccgcggatctcccatgccacgtgctcgtggtcgtggtcgaggtcgtggccgagggatgggtgctcgcttggtccatgggtttgcgacattcttctccatgtgccgcaacatttctgctgatgtccatgaggtggcacggcgtcagcgggagactgacgacaatcttcgtcgtcaagcttccaccatgggcatgccttttgtccctcgctcgcctgacgtgcctctccatcctcctcccccggagatcaatgagtggcaccagcaggcctacggggtgccatttatgtctgcagacgatgaagaagaagaagcctatgttgatgatcgcgaggagtttgccctgcctccctaccatggggatccgggtcaatcatcctctcaccctccgcctccctacccgggtccgggacccattcatggtgaccctaggccatccggctctggttaccatcaccaccctccacctcctcctgatcatcgtacatcttcggcatctgttttttctacggctgatgagccacctcgggactccacatttgaggaggacgtgatgaggaccctcttccctaactacacttcataccctccatcatatcctccgtcatatcctcctcctggaggatattgattcatgtatccttgtctctctctctgtttttggtacttgttgctaaaaagggggagaaaatcctacctctagtttgtggttctttcggttttcttttggattatttttgttttggccactgttgtggcttgtatcctcttaccattgtatgaaataaaactgttgggttgttattcaaagtaatatgatggtcttctggccatcatcttttgtcctatcagtttgtaatgactactctgctatgaagtaaaaatgatgtgtatttagagatagtcatgtgcatcacaactcatgttatgacattcttgcacccctcggatgattgtatttagtatggtttttgtcactatctctaaatgtgttgctcacatgacatattatgtcaaaacgttggattcacaatcgtgcacacatttagggggagccatctacatacaatcattcaaaagaaattttatattgcaaatgtatatcttcttgaccttaattgttttggcatcaatcaccaaaaagggggagattgtaagtgcaatcaaccccaagtgag

SEQ ID NO: 78730 - DNA, 74 bp, Zea Mays
gtctaggagtgaatgcactagctcctgtattgaatgtgaagtgctggaaacttggatgcttggagtggtggtgg

SEQ ID NO: 78731 - DNA, 889 bp, Zea Mays
aataaagtgaatgacacggtgatttgttttaccgaggttcggttcttgcaaacctagtccacgttgaggtggtcacaaagaccgggtctctttcaaccctttccctctctcaaacggtcacctagactgagtgaactttctccttagtcaaacgggtcacttagacccctcacaaggaccaccacaacttggtgtctcttgctttgattacaagtgtcttgagaacaagaatggggaaggaaaaagcgatccaagaacaagagctcaaagaacactagcaaaaactctctctctagtcactaggtgtttggagtgtatttgagacttggagaagctttgattcttttgaattgtgtcttgtattgattgcactagctcttgtattgaatgtgaagtctgaaaaacttggatgcttgaagtggtggtggttggggggtatttatagccccatcctccaaaccaaccgttgggaaggctgtctgttgatgggcgcaccggactgtccggtgcgccagccacgtcacccaaccgttagggttctgacggttttgaccattggagctctgatagcttggggcaccggacagtccggtgccgcaccggacagtccggtgtcgcaccggacatgcactgttcattgtccggtgcgccttctggcgctactctgactctgcgcgaactgtccgcgcattgtagcacttttgcaggtgtccgttggagtccaccgttgcgctggagccattgctctgactctccagaaactcggaggtgaagagttcagcctgtacgatccctcgtgcaccagacactatccggtgcgccagaccaaagttctctttggtttcttttgctcctttcttttgaaccctaacttagatcttttattggt

SEQ ID NO: 78732 - DNA, 433 bp, Zea Mays
cgcactttctttcaataatctgcattgttgaatttgtgtgctttcgcgtcatttgttgctggttgcattgtgttcttcctccattcaaaccctagcgccgccaccatctcccgtttgatcacgccacaaaccgagtcaacatcgtttccttaattttctccttcggttacgtcaaaaaaaaacagaaaaaaaaacaaaccgagtcaacggccgtttccttgattttctccttcggttacaaaaaaaaacagagaaaaaaaaacaaaccgagtcaacggccgcttccttgtttttctccttcggttacgtcaaaaaaacagaaaaaaaagataacgaaggagaaaggatacggttgtttcatcccggtcgcatcactagaacataacttgaggtaccttccgtaaatcgggcataacttttcgctcggatgtcc

SEQ ID NO: 78733 - DNA, 820 bp, Zea Mays
ctactgtgtggttgtttccaagtaatggctgataatatggcttcggacatatgcttcggacattcattcgtgcattacatcataacatttgcatacataagcattcattcatagcatttgtgttcccaagtggctgcttcggcaaaaaagcttcagagaagtgcctttttatgacttgttacgctatgttgtgtgcaaaagtgaaaagtttcgttgctttggcacaaagaaaagtttcagtataggggagaactggttttttatgaatcgttgtgtaaaagagtagtagttttttatgttttgtatagaaaagcctcggcagaaaagagaagtagttttttatgttttgtaaaggaaagcttcggcagaaaagagaagtagttttttatgttttgtaaaggaaagcttcggcagaaaagagaagtagttttttatgttttgtaaaggaaagcttcggcagaaaagagaagtagtcttttatgttttgtcacgtacaaaaaagcaaagattcggcaaaaagaggaagcgaccttttaggcttcgttgtgtacgaaaagaagggaaggtgttttttcgccttcggctcaaaatactgatttcgtccacatcaaagcgactcaagcaaagggtaagaatatattacaaggtatgtacaaagttccttgaagatagtctagttgtatttacaagaatatcctgagtttttctacagtacacttctactgatcttcattaagtttcagcttcgacgacataatttaggcatcatcttcaccttcgtcatcctacataaattaagagattatgagtaagaatcaag

SEQ ID NO: 78734 - DNA, 5212 bp, Zea Mays
ctcccctttcaacagagacctttttggacgcctatttctcccaagtttatataatgtcaagccagggtcccttaataaactttgttcatggatactacctctccaactttgttatagacattctggcacaaagttacacagaacagcctttataggtcctcaaagtggtgcagacagacagaaattcagaacagactagtctaattaacagtctgaaactgctagcctaacagctcaactttgagcaactttttcttcaatacttgtacaggatcaagctgttacagcccgtggccgccgacgcgatcgccgggacgtgagcagggtattcaccgtcgccaggagagacaatgagagaatatttggtaggtgtttctactcagatttttcgtaacctcctctgttctgttacagcatatttattcccacatggggacggcccacaaacagcccacacacctccatacgcacaacgaaatacaccccaacgcacacggcccatcttcagccttcagtcccagctccatcagcggtaggtgctccacctccttggtcgtcaggcatgacagttgccccttcccgagaagttgcttgtccccaagcaacagcttgaggaaaacgagccttcaccacatgtaagtcctcccaagttgtggaatcgtgaggcagatgactccagcgaatgagcacttgaggaatggcacgatttcctttcttcaccaatctgcgatccaagatttccagtggaaccacattgcgataagacaaatcatcatagtggggaagagaggagaacactggtgaataattaggggtgaaaggcttcaattgagagacgtggaacactgggtgtatctgggcatcagcaggtaactccagacgatatgcgacctcgcccaccttctccaaaaccttgtaaggcccaaaaaaattgaaggctaacttggggcacggtcgattcacaaccgaagactggacatacggttgaagtctgagcaacaccatctcccccacttggaattttctttcagtgcgtgcacgatcagcttgcattttcatcctgtttctggcagcagccaagtgctcttgcagcatactagaaaaggcactcctgtcagcaagcaactgagccacatcctggtttgtatccgcagagagcactagtgctgcagcaataggaggttcatatccatataaagctttgaaaggagaacaccccaacgcagtgtgaaaggatgtgttgtaccagaactctgccaacggaagccaagctttccatttttttggttgagcatgtactgcacagcgtagatacatttcgacacactggtttactctttcactctggccatccgtttgtgggtgataggccatactcagattcaacttggtgcccaaaagcttgaacagatgagtccaaaaggtacaagtaaaaatcttatcacgatcactgaccatggactggggcaacccatgaagcttaatcacatgatctaacaggagctgagctacttgagcagctatgaatgggtgtttcaaagccaagaagtgagtatattttgtgaaacgatcaacaaccaccaaaattgtatcataactttcagatttgggcaacttttcaataaagtccagtgtgatatcctgccaggcacctgtaggaacaggtaaaggctgaagcagccctgcagggtggattctttcacttttggcctgctgacacacctggcattgcttgacaaagttctccacatctccttttaatcccttccaatagaacaacttttttatgcgttgatatgtcgcctgaacgccagaatgaccaccaagggcactgtcatgcatagctgatacgagcttggtccgtaaagctgagttgttaccgatccatatcaattctcctttcttaatcacccctatactgagctgaaagccgtgctcatctggactatgtaaactgagtttggcgagcaactgttgcgcttccagatcagtgaaataagaattgagcacttcctgcatccatagaggctgcacctcactaattaaagtcatgaccagcaagggtcccactctggaaagtgcatcagccacaatattttcattgccttgcttataaactaccttgaattgcatgcccatcatcttagccattgccttcctttgaagttcagaatgtaactcctgctgacccaagaaactcaaggctctgtggtctgtgtgaatctcaaactcacttctctgaaggtaatggcgccacttatccacagccataataagagctagaaactccttttcataaatggacaactgcttgttttttactcccagtgccttgctcaaatacgccaagggtcgtccttgctgtagcagcactgctcccagaccgtgctcactagcatctgtctcaactacaaaagtcttctgaaaatcaggtagtgccagcacaggtgtagtgcacattgcttgtttcagagcttggaatgccccagttgccagttcagtccacacaaattgtcccttctgtaacagctgagtaagaggcttagaaatagtgccataattcttgacaaagcgtctgtaataaccagttaaaccgagaaaacccctgagctcagtaacattgctaggttgtggccattgcagcatcgcagtagtcttggctgggtctgttgccacccctttagcagatatgacatggcccaaatagatcagttcctgtcggccaaaaacacatttcttttgttttaaatagaactgatgcgatttcattgcttcaaacaccaacctgagatggtctaagtgggactgccaggaaggactgtacacaaggatatcatctatgaataccatcacaaagtgtctgagatatggagctaataccatgttcatggcacattgaaaggtggcaggtgcattggttaagccaaagggcataaccttaaactggtaatgaccatgatgtgttttaaaggcagttttatactcctctccttctcccattcttacttggtggtatcccgaagtcatgtccaagctggaaaaaaatttggtgcctgacagctcatccaagatttcttccacaaccggcataggaaacctattcttgatggtcatgtcattaagtttgcggtagtccacacaaaaacgccatgtaccatccttcttttgaaccaacaaaactggagaggcaaaaggactaacactatgttctatgaggcctgccttcagtaattcagaaatttgcctttctatctcggttttgtgggctggtgaatatttatagggcctggcattcacagggactaaccctggaatctgaggaatgtggtgatcaaatggccgagcagggggtaaagttgcgggaatagcaaacatctctttaaattcatccaacagattctgcaactccacaccaacagttggttcctcagacttgggggttacttccagcaaggccaaagcccagacatcatttccttttaaccatttgtccacatgcatagtagacacctccaccactcttccacactgtcccccagtccccttcaatttgacctcttctccatcaactgaaaaactgatcaccttcttctcccaatcacagtgcattggactgtgttgcttcaaccagtcataacctaaaatagcataatacgcccctaactccaagactctcatgttagtcctgaaagtgtgtccatctgcccaccattccagtgaatgcaccatttggtcacttctgagagtttcaccattagctaccttcacaatagccggagaacacttggatgtaacgagaccaagtctgtccaccatcagcctattaatgaaactggctgagcttcctgaatccatcaataccaacatcacctgattgtggacaagggccctgactcccatacaatcgtcagacacagccccactgatagcatgtaaagagagccgaaattcctcctcctccacttgctcctctttctcaatatggctcagtgtttcatcagacagcatcattcccagctcctcagtagtcagagcatttagttgcatctgaattttttttgggcatctagactggtggcctggttcatacttctccccacacgagaaacacaaaccattttgccgtctatattccttgaccaacctctccttggataactctattgctggggcttgtggtctgccttctgtccttccaactggaccattgaattttggttgagatactatctttagagatttttgtcgctgcttttctaaaatcttctgttgtatctatgccaacctagcagctcaatccacgatcgtgggcatatgcgactgaactgaaccctgcagttcttgtttcaaccccttgataaaatgcgccacaaacaatgtttcatccaagccttggttatgcaccacagttgcatacctcacctcatcgaactccttcagatattcctccaccgaccccttctggtaaaccgtcatcaggttgttcatcgcctgcgaatattcatccgccccaaacttcttcatcacagcatccacaaactcctcccacgttactaatccatactgcaacttaaaaatctaaaaccatcgtgaagcatttccctccatatgcagtgaggctgatgttacccagacagcttcagggactcgatacatcgcgaaataatcagcacacttcctcaaccaaatcttcggctccaatccatcaaacctagggaaggtccacttcggtatagatactggtggatactcccccgcatctccgccaccattcccacctccccgatcgcgaacaggagaataaccgcgataccttcgattggcgttcggctcgtgatgtcaaggttccccgcgagctcgctcctccatcaccgattctgaaccttccatgttccgcgccatccactcgagtcggatctcggccacctctcgtcctgtcttctccacttgctgcgccaaatggacccgctcttctgccgccttctgagccacagccgccgccaattccgactgcatcattagcttctgttgtacctcctccactccaacgaccttctccgtcagccgatcgatcttcgccatcatccgatcccaccgatccccgtcttccttctccttgttcgccatggcctcaagtacaaaccgggtctgcaccgagggttttggaacgggcgccatcgcgactgacccactccgaggagcgcgagctttg

SEQ ID NO: 78735 - DNA, 1587 bp, Zea Mays
ccgggatccacaaacaccccagaatgctactaaactacacatctaacattcatatataaaatttcgacatcatctcctttgaaaattgcataaacggggatgcaacaaagtataaatagatatcatgataagaaaacataaaagacattaataatctgctagcaatgggaagacaaccataacaacatgaactgaattaatcagtgcgcacgactagttaaaaacaaacatcctttgacaagaagtttctaattaaatcatgactgtgtctgggcagcattattatgagagtgaaggtggatgtgctgctacttcccactccccttgatgagcaacaagcacctgcattgagtaatgcaagagtgagatgaaacatctcagcaagctaattgttctgacgagatatttaaaccacaaattgaattaatcaacattttaaaagaatcacaatcaagattagaaatacttgtagatatagaacttagtagtcccaatataaccaatatcatctcatttcctcgaacaaccacaataggttctataacacttccccgcgtcaacaatacctgcaaatatcacttcaatgtatgcataggaatgcaatgtgtaggtactctatcttcatacctctgagagtataaaaccacatcatctgcaaatatcacttcaatgaatgcatatgaatgcaatgcatatgtcctctgccttcatacctctaagggtatgaagccgcatcgtacccctcctcgagcaacgtacgatgctaaattgtaccggtacggtcggaccataggtcacgacaaaacttcagatgcaaatgagtcatgcaatgtatatggcatgctgcatttatctataaccttcacttccttcagatacaatacaaacctcaaataatactttatttaccttcagatacaataccaacctcaaataatacttcatttaccttcagatacaataccaacctcaaataatacttcatttaccttcagatacaataccaacctcaaataatacttcatttaccttcaggggtgtgaattaatctcatgaatcatactcgaatcataatcatcatcaatatatgattgagcatcagtataatgcaagcaagtaaagcatcaccatagagtccaattatgaaagaatccaatacttctgaatattagagtgtaggcaatagaaataacaggtcagaacggaagcaactaccactacattcacttgccttcatcgaagaagaagaaatgtactagacatgatctggagtgtagccacctagggtttccccaagaaaatatgcaagaagagatggggaagaacacctccttgatcctctcttcctcttcaattcaatgtgctcctcctcttctcgatccttgctgcgtagggggagatcttgggggaggaagcaatagaggatggctgccatagggggagggggcggccagccaagggggagaaagggggtggcggccaagagggggggtgaagggaaaaaaaggggtggccacctagggtttttgtgggagaaagaaacgacgcctcagatgacttctatctttgcatccaatggcccacaac

SEQ ID NO: 78736 - DNA, 316 bp, Zea Mays
aaaaaatctcacttttattgttttttaagcacactttattttaataatgggatttgccctaaaactatttattttgtaacttctctatgttactattattttggaatatatataatttctgagtttaaaaaaagagaaaataattttcgaaaaaaagaaaaaaaccaaaaacaaaacgcacacacgcacgcatctgttttattaagaaaaaaacaaattaagaaaacaaaaaatacacacgcattcaccccactagtggcccgctcggccagcagtcccacgtgacccactctccctctctctttcttacaatgac

SEQ ID NO: 78737 - DNA, 703 bp, Zea Mays
atctaaggtgccaaaaattgccatataatttctgccacacttacctaatgttggatgctcaaattcttcaccacacttggcatgtctaagaaaatattgccacacttttatatgtcctatataaccttaggtgtggcaggcctttaatgaaaatgatacttccactgagaatagactaagggcattttcaatggataattttattacactgtttccaaaactgacatgtcaatatttttctaggaaacaacatattcagagttccatccccatggaacttactcatcttccatgaaactctctcatatctctcttcattaaattgcatgtcatgttatcttgtttgcttatgagcatgtcatttaggttctatttggttcacataattgtaacatgatggataatagataacgttaaaccatgtttgtttaagcccaacagtaatcagataccgcactagagaaacagatatagtcctattcaaacttattatcgctatcactcaagtgtgaatcattaccgttgtcatttacattataattcgtgaaccaaacatcaccttgatttaatgagaatgaaaattccttgaaactccgagaataacctaattggactggacgcaaatagtaaatcctgaggatgtaggggtacgatggtgtcgtgtttgggttggaggtggtcggagcagtagaatcatctctcg

SEQ ID NO: 78738 - DNA, 485 bp, Zea Mays
cttaacccaaaggtttttaaggtaggtttccgaaaaagaagatacactctgttggtatgagtattatatcaatcctattaaacatttgactaagctatcacacaatccatcggagctaggatatcacatgtgtgcatgtggatccgtctcaccaacatcgaccgtatttttgtgactgcttttcaatctacactagaagtattagtagtatagcaaaataaaaatggtagaagagactatggtcgagagcttggtaaaaaagggcaaagggttgaggtgtttggtaccagtatttatttttggaataatgtgactatttttaaggtttgaaaaataataactgactttgaacaaagctatggtgacatgtaaaaaaaggagtattgaagctgcgaggacgtgagaaggacccatcgctactatccttgtaaatcacttatggcgtgtttagtttgtggagtcactctatgcttcattaggtgatg

SEQ ID NO: 78739 - DNA, 122 bp, Zea Mays
aaaccctaatcgtcaccgtcgattcctgtacttctgtagacatcaaaaactcaggccacagggaagtcaagtgctcgaaactcgaaagggaaggaaattcacacaatgacaaaaacaatagc

SEQ ID NO: 78740 - DNA, 1478 bp, Zea Mays
gtcaaagtatggagacaacttatattatactattcatgaggtgcagtgtgtcataaaataaacgtgatgctcataacatagtatgcactcatcaattttctacatcttatgtttttcttatgattccccctttttgttaattatatctccccttcttaaaagtcttctaacacttagttacataagactaaaggtaagctttaatgcaaaatttctccccctttgtcataaatctccaaaaaggatacaaagaatataaagggtagaaattatgattaagcaagatgggaacacactattatgaaaagggtccttagatggcacaaaggtaatggagaagtgacatgaagtgatgtacctttgcatttttaccttttcaaggggagttccaaacttgtgttggatttagaattcatttgcaagctcttgttggcataattgtgatataggtccaagatattaaatgaagattgtcatactaaattgaaggtgaagcttgatacctggaggctagatgtcacctagcattttcttatcacaacaagaggcaacatgacaattgcacaagtatggattctacaactagtgatcatgtactaaaaatatcaattgaaaaacaccaattgaatataatcatacaacataaggaacatgtgcactatttaatcaattaagttctagaaaggagaatttataagctatgctactttagacatttgcaatccaaaaggatatgatacatatttaccaattttagatgacataagatgtgacagaacctcccaagtaattaggcccacctacagttgtccttgtccaacagacatcagacaccctgtagatgttcctaagtcacttgacaagttcggtatctttccttaccttaccaggaacgtttcacccgtcttgcagacattacagaacatcggagttatagaagtgcggaagcaattacataaacttacatttatttagaaagtaagatcaagttacttattacagaccagagctataaacgagtgctgagtagtattattattacacatatcaagggagacaaaaactcctcccgatagctttaaaacaaaaagatcctatatggaggaccacgtcctcccgcatcttcactcttgcttttcttcatttgataccaccttggagcaaaagcaacaaaaatttgtcgcttcctcacctaaaaacaacaaagggataaaccctgagtatgaaattactcagcaagtcttacccgactaaggaaaagactctcaagggtatgctggataaataggagtcaaggagaggctttagcaagaatcaacttagatacttttgcagaaatagcttactaaagtgggtccttactttcaatattttaacgccagattaaatatttaatagactctgtttgcatcaagtctaatttcatcatctcatcaatacaacatcatttttatccatagtgttcacatcttgactta

SEQ ID NO: 78741 - DNA, 294 bp, Zea Mays
gaacggcagggcacagtggctggccaggaggagagaagtggaaaggggagttgggccggctaagttcaattcggcccatagggtacatgaacttcattttctttttctttttttttttgaatttttattccaaatctaatcacaaattctaaatttgttcaaaattcaatttgatttggggttcgaatttcccagttgaatgcacacaagcaaaaccctagaatgcatgcaaccattatattttacttatctatttcatctttttaagcatagtggcataaaaatatataattc

SEQ ID NO: 78742 - DNA, 258 bp, Zea Mays
gttgggccggccggcggcccacgcaggcgcgagggagatgggtcacggggcgagtgggccaaaatggtttcctagcccaagcggcggctctctcttttttttctttttttattttgttttgaatttctttctccatttccttttgtattttctttcttttttttaatttctaaaatttaatttgagtttaattttaattgtgaactcttgctcattttaaatttacaatctgaatatactaatatagaaggacctaac

SEQ ID NO: 78743 - DNA, 1126 bp, Zea Mays
ctttaatgaagaaggtttttgagacagatatatggtaggaaatgtcttatattgatttaatacatattgattttgaaaaccgtctcaaataaatataccttttgatgcattaagtttacaagaattgtcttatattttgattagtatattagacacttctgtatatgaaaccatctcaaataaagatattattagagtcatctagactatacaaactgtcttagatgttagtgagtatactagaaacttgtaagcataaaaccgtctttgtatgatatttctaataagacatattgtgaaaaaacgtagtaaatagtaaattctgcttagattgacctaaatatgttccatagtgtttctaaagcgcaaaacatgtttgaatcatgttaatatatcctgtagaagtccccgtaattattcgattttttcgattagctttttatttttgaaaagaaaaatctaattatgtgtttgttgggatggcccatcgatcactaaaagtctagaaatttaaccacttatgatcggtcgctatagagttaagtgtgtgactaatggtgggtcactatatatagacaggttggatgatagaaacatctctttacatttaaaatcgagatgatttctctaggtggagctatccacgtcgccccaaaaaccacatccgcccatgcgacttgatccatctcacgcggccatccggctggcttctttcactttggaaccctcgcgaggccgccatccccttctctctcccttctttcatctccccctccccatccggatcctccaccatcggttccccattgctacctccaccgcccccgctccgaggagggccatgaagagaggacagtgcagtggcaatgacattagctctcgtagaaggctaggaccaacaattttgattcatatggtagaacaagtttagataacatgcatagccactaaagtttttttagagtcgatgaaccagatgtgcaggccgtgctgggcttaaaggaatagaatttaagacccgatccagatctaccttcgagctatattaacatattttatattattttgtgctggatcgtgcttttagcttctatttttgattctgctcttgctgccaaaaagtccg

SEQ ID NO: 78744 - DNA, 214 bp, Zea Mays
cctcccctctctcttccactcttgcagccgccccaatccctctccttcttccccaagtgattgcagcgccacccctcaaccctagcccccccacctcttcctctccaagatggagcctccccgcttggtgtccgtcgtgtgggtgcgagtcttccatgggagtttggagggaggaagaaggaagaaaagaaggaggaaaggaggaacccaaggt

SEQ ID NO: 78745 - DNA, 775 bp, Zea Mays
agtacatttataaaatacacaaaataaatttgggtcgtcatcaaccttaggttcgcgcgtgtgacggggatggatcgacgggtttcgaccgggtggagagcaaggctcgactacagacggcgaatgcgtggctccggtgaactccggcgacgaacgacacgctccggcgaactacggggatgaacggcaacaaacgacggcgaacgacactagcgttgagcgaggagcactagagaaagaggcgagctcgagtagggaagaagggagagggctctgctgccttttatagacagagggagagaagaagggtctgccagagagagtaacgcggtcttcaatggccatcacaacgacagtttctaacgagcgtaatagagggaaggagaaacggaagggttcatgctccattaacaccgagacgaacggacggcggtttcctggcgcttgggctcgctgcgcaggggctcgggcacggtcggtcgggctgctcgacggtgcagggacgcgcaaggcgcggctgcgcgcagggacttcgggcgctcggtgcggctgggcgacgcagctcgcgcagacgcaggtgcagggcagggcgcgcggcttgcgcacacggcgcgagagcagggtgctcggcgtcgcgtggctcggccggctgcctggttcggtggctgcgcggcgtcggcctcggctggtcgggagagagaagcaagggagagagagcaataggcggcggctgcttagggagtggagagagagaacagagggagagggagtctgg

SEQ ID NO: 78746 - DNA, 395 bp, Zea Mays
cctctcccaccttcaacagaccgcgcggatctcgctctccggcgaccccccaaatcagcgctgagtccgaaactttaacgcccgccgcgctataaaatccgggtcgcggcccttcgaccctcacctgccatgccccttttcccttcttccattggaccaggtctcaccgtgacaccaatgacgggcgcatgagtgagacccgccgccgccaccgtgaattcgtgaatcggtcgtcgcttcggcctcggcttgtggtcgggaatctacaccggtgtatgtcgcatggtccgggagcttcctcgtgcggcttgggtggccggaggcaatgtaattgcttgccggagttcagtgatgcctcgagtccgcatggctccatgggcagcgtgttccgttgc

SEQ ID NO: 78747 - DNA, 398 bp, Zea Mays
cttacatttagtaactgctaataaaatttgactaacttattaaaagcaatgctaagctttaacccctattattgatcagccttacacatcacatgaattcccacctttggtgagttcatgcacattattttccacaacttgttgagcgatgaacatatgtgagctcacccttgctgtctcacacccccacaggtcaagaacaggtaccgcaggatgaagcgtatgaaggatgctatgatgtgttcgtgagaggtctatgccgtcgtctcccagtcaacttcgggttgctggatcgttgcctccttatgatgtaattatttatttattttgtatataactcctattatagtaaagatgtgacattcgttttctataccatgattcatcatatgtgtgag

SEQ ID NO: 78748 - DNA, 748 bp, Zea Mays
tccggatccgaagttggtcgtctcggtgtgaaatcgccgtcgtgtctgggattttgacagtctccctactcgccgtcgaacttgggttctctgctcatcctttagcgctagcgcgtcgccgtgatgttaccgtctcgccgtgattccctgatggttcgtgtctccgcatgttcaaatcgccgttccgcgcgtcagcaagaaatcataagaatcgggtgaagacgaagctagcagcgtgatattccctaagcgctcgacaaattgcctggatcggaaaatcgctaccgatctcgcggattcgtgtcaactgttgaaatggtaagttgatgaattatttagaataattcgaacgttaaataaattaatgtgctagtgcgatgctcattaggtgctcgataaattgcgtgagtcacgaaactctcgtcgacttcgcagttcttacgattatcgagccagattcagctatgacgaattatttcgctattccggtcacttagctgaattagtgaaccgagtaaaattttggtaggcacgtgtgatgataaaatattttaatcacttataaagatgtagtataatttataaggtaatggattagttcagaatttaattaattaactgataagttgtgattaggctaattgtatttcatgtgtatagtttgttgttcgtgatgtttgcgttaggtttgagaagcgtaattattgcgcgtagtcgtatattaacaactagtgtttccgtacaaaat

SEQ ID NO: 78749 - DNA, 3451 bp, Zea Mays
caattaggaataacctatccactccacattacatggttgcaggcaattgcaaaggtcaaagactccctacatgtcccctatgcaattgtcacacccggatttaaggggtaaacccgggtgcgtctcatatgtgcgccaaagaagaacaacacatataatgaccaagtgtttagagataaatgtcataaacattattacaaagcggaagtgtcttaaaaataaatgataacaaataaagcaagctaatattatttccttgatgtcattaagtcaactgggagacgccgcctaaacttcatcaaactccacatagtagtcctcctcctgggctacctgctcttcacctatggaggggggttatatattgcaagggtgagctcacaaaagttcatcgctttacaagtgtggggaataatatgcatgagcttgccaaaagtgggggtaaaagtcacctagagggggtgaatatacgaaacctgaaaattaaaaactttgaacacgcactatgcccggggttagcgttagaaataattcagagtgcggaagatagttctccttgctaggagttgctcaatcaatgcggataactttgggagccaactcaaatcaatatgagcaagggaacttttagagagaggaaagaggggaaacaaatcaagtgaagatcaacacaaatgaacatggtgatttctttaccgaggtttggttccaaagaacctagtccccgttgaggaggctacaaaggccgggtctattccaaccctttccctctctcaatcggtcacacagactagtcgagtgcttctctttaatcacttgggtcactaagaccctgcaaggatcaccacacacttaggctagctttacaaagcacttagaagaattagaaagagaaagagaaagcaatccaagcaacaagaacaacaaaagaaacactaaacaccctctctcaagtcactaagtaattgagttgattttgaggcttggagaggatttgatcttttgattgtgtcttggagtgtatgcttttgctcttgtattgaatgtggagttcaaaaaacttggatgacttgaatggaggtggttgggggtatttatagcctccaaccacttcctagccgttggctgactttgctatcgacgggcacaccggacagtccggtggtgcaccagacatggcactgttctgtccggtgcgtgtcacatcagctgcccattagggtttggagcagttgaactttgaagtcatttgtcctcttgcggcatcgaacagtctggtgcattctggctttgcagttctgactcctgacttgtgcactgttcactgttcatctgacatcgcagtcgaccgttgggcgcagttgaccgttgctccgttggctcaccgttcatgtctggtgcacaccggacagtccggtgaattatagcggagtgactctaggaaaaactcgagagcggccagttcatgggtgccttggcctaggcaccggacaatgtccggtgcgccactggtagcaccaatgcttgtctttactccaaactttgttgagttccccaactccatttctttgtcagtttatgttgaactttgtgcacctaagataaatgacaactaggcaaactagttagtccacgtggtttgtgatggacgtcaaacaccaaaatcgattataggaaatgattaagctaatttccctttcagggggctcatgtgaagtgtaaggctgatcaacaaataatggttaaagctgagcattgcttttaataagttggtcaaattttatgagcaattattaaatgtaagtatataccaacccaaagtaataatagatcaaaattaataataaaaccacaatgcgatgcacatgacaaaattgagtttaattccataagttaatcatgcgagagtcctgagctactcatgaccgcgagcacggctagtataccagttttacactctgcagaggttgtaccctttacccacaagtcatgctacccattttccaaggggtctagaagtctcattcatctctatcgagaagatgaggcagggtaacactatgaggcctttacaaagttccactagcttcataaaacccgctacggttttttaggagagcgatataggaatcccccgtctgaaaagccatcgcagcatgctcaacccgagaacctccctataccaacaactctaaaagtcgtctagagggggttgaatatgcgaaacctgaaatttataaactttgaacacgcacttcacctagggttaggtttagaaataaaaaatagttaattcagagtgcagaagataattcttcttgctatgagttgctcaatccatgcggataactttgggagcaaactcaaaacaatgtgagcaagagaacttttagagagagaggagaggggagaaacaaatcgaatagtgaagatcaacacaagtggacacggtgatttgtttcccgagattcggttccaaagaacctactccctgttgaggaggccacaaaggccgggtctatttcaacccttttcctctctcaatcggtcacctagaccggtcgagtgcttcttcttaatcactttggtcacaaagaccccgcaaggatcaccacataattaggtgtctcttgcttgctttacaaatctcttggaaagtttagaaggtaaagaagaaagcaaccaagcaacaagagcaacaaaagaaacacaaatcaccctctctcaagtcactaaacacttttggtcacatgacttgattttggaacttggagaggattgaaggctttgaatgtgtctttagagtgtattctttgctcttgtattgaatgaagagagtgggatgcttggatggcttgaatggtggtggttgggggtatttatagccccaaccactattctagtcgttagctgaattctctgttgatgggcacaccggacagtacggtggtgcaccggacaaagcactattcattgttcggtgcgtgccacgtcagccgatcgttggggtttggagctgttgaccgttgaatacttctgtccttttagtgcaccggacagtccggtgcgacctgtcgtcgcggactgtcttctaacttctgacgctgcagactgcgggcgccgtcccacagtcgaccgttggtggagtcgaccattgctctgagggctcaccggacagtctggtggcacaccggacagtccaatgatttttagcggacgagctccgagaaaccccgagagcggccagatcgcggagtgctccagctagggcaccggacagtccggtgcaccactgactgcagcaagtcggtttgctccaaatttgtagaattgccccaaagttattttctttgtatgtgtatgtgaactttatgcacctaagaaaaataacaactaggcaaactagttagtccataaggtttgtgatggacgtcaaacaccaaaatcgttt

SEQ ID NO: 78750 - DNA, 215 bp, Zea Mays
atcatgaacagtaaagaattcaataacagtaaagacatgatcatgaatgatatatatcttaacacccaaaaccacatagagcaataacagatactatccaaaagttcagtggtaaacaagtcataaagatgaccaaactagagtgacctattgggccccatcaaaattaaacctacacatgccaaagtgattataaagaaaattattgagtgaag

SEQ ID NO: 78751 - DNA, 340 bp, Zea Mays
gaagccgcgtccttcttctctgcgcagggcgcccttgcgtcccctgctctagcgagctcccttccctgctccatggccgagctcgcccagcagccatggcgcccaagctctctgctcccatctcctccctggcgcagtgggagaagctcccatgggcgccaccccctgcagcttccccttgccgggcgcccaacagcagcacatcaccctcctctttctctggtctttccatggccgagcccccctctcccagccagcgccctccccaagtgcaggtgtccctctcccatgcatgcctgcagcaaggagctccctccccagagccatcccatactcctca

SEQ ID NO: 78752 - DNA, 518 bp, Zea Mays
cccccctctaggcgactatcacgggtcttgtatttgaaggagagatgcctggcgtctgacgtgatggcaaactatgcagttgattcgtgcctactgacttcctgtagagagccgaggccgagacctaggggttgtccgtatgctcgagctcccaagggagaggcctcccatgccgtagtggttgtaacaatgtcggggtatgggcaaaggctacttatggcgtgggtcatcgtcctggcgcttgatgacatcgagattccttgctgcattcatcaagatcagagcccttgctcggttgatgcggaagtcttgtcgaggcttttgctgagccgtccttcgatgcgcgctacaaacggacgagtggctgtctgtgggattcgcgtcgtagttggtggccgaggccgagctcgggcgaggcggagaatcttgagggttgagcttaacgtcgggcaagacggagaaattgcgcctgaaggctggacccggagtcaggcgaggcggatagattgcgccagaag

SEQ ID NO: 78753 - DNA, 177 bp, Zea Mays
atggagtgagcttattaataggctttaattttttcgatgtttagtacgaaaatgttattagtttgataaaaacctagaatgctcgtccctttttttgatctagcatttccttatctattgtgtttttcacacgaccgatttggaccttgatctttcaatacttgtacctaatcattg

SEQ ID NO: 78754 - DNA, 734 bp, Zea Mays
aaacggggaagcaacaaagtataaatagatatcatgataagaaaacataatcgacattaataatctgctagcaatgggaagacaaccataacaacatgaactaaattaacagtgcgcacaactagttagaaacaaacatcctttgacaagaagcttctaattaaatcatgactgcgcctaagcagtgttattatgagagtgaaggtggatgtgctgctacttcccacttccctggatgagcaacgagcacctgcattgagtaatgcaagagtgagatgaaacatctctgcaagcgaatcgttttgacgagatatctaaaccacaaattgaattaatcaacattttaaaaggatcacaattaagatcagaaatacttgtagatatagaactcagtagtcccaatataaccaataccatcccattttctcgaacaaccacagtaggttctataacacttccctccatcaacaaaacctgcaaatatcacttcaatgtatgcataggaatgcaaagtgtaggtactctgtcttcatacctctgagggtataaaaccacatcatctgcaaatatcacttcaatgaatgcatatgaatgcaatgcatatgtcctctgccttcatacctctaagggtatgaagctgcatcgtacccctcctcgggcaacgtacgatgctaagttgtaccgatacggttggaccataggtcacggcccaacttcatatgcaagtgaatcat

SEQ ID NO: 78755 - DNA, 814 bp, Zea Mays
atgacttcttagtccataagggtctgagtcataattgtaatcttttgtaaggggcatgattgtaatttctcataggctgcgtcctgtgcctataaatagatgaacagtactcctttactgttcacgcaatcctgtaatcattaacgcatcacactggaattattgttctttgctaaggcaaaggtataaatgtacttaaatattatgttttgatacttaagttggtatagtaaaatatatgtttaataatatctgtctttggtataaatttctttaatgcttcatgttctggcattgtttatattgttttatagagttgatcacgaaggtaaaaccttcgtgatattttgcttatggtctttgtccgaagttcattatatcctaagggagataatgcttcagcggacgaagggcattaacatttaacattttatgttgccttgttcttaattcttagcatttgagaacaagtccccaacagggcccaaagccttttgcgaggtcttctagccttctagtggacccgggggatatctgtcccccacagatctgtcttttcatctttaagtcggtgcaacccttcatctcaagtcatgttgttatgccgaagttccctggagggtagcttcggcattatttctgtgctgatcttccgaagatgtttcttcttacaggaccttcgtcgatgaagcagacccccaacacttcactaaacttttattctaagtggcccctaattcacattctagtcgacttatagataatctaattcaaattcttaacttagattagataagttaatccaataaatagg

SEQ ID NO: 78756 - DNA, 823 bp, Zea Mays
gcagcttggacaacgccaagaagatttgggacaccctcaaaatctcacatgaggggaacgatgtcaccatgctcaccaaaatggagttggtggagggcaaacttgggagattcgcaatgatcaggggcgaggagccaacccaaacgtacaaccggctcaagaccctcgtcaacaaaataaggagctatggaagcacgcgatgtacggaccacgacgtcgtccgcctaatgctaaggtcttttactgtccttgatccacatcttgtgaacaatatttgtgagaatcctaggtacaccaagaggagatacttggaaagttcgtaagcgggcggatgatgatcaaggaggcaagatacgttgacgatgcgttgaacagcccaatccacgagcctcaaaccgttgctctcaaagcaacgaggagcaaggaagtgctacctagcaaggtggcacaagttgaggcagcgggactcaatgaggaagaaatggccctcatcattaagcgtttcaagacggcgctaaggggtcgcaaggagcatccaaacaagaccaagacgaaggggaagcgctcatgcttcaaatgtggtaagattggtcattttatcgctaactgtcctgataatgatagtgaccaggaacaagggaacaagagggaaaagaagaaggcttacaagaaggctaagggcgaggcacaccttggaaaggagtgggactcggattgttcgtcgtccgactccgacaacgaaggactcgccgccaccgccttcaacaagtcggccctcttccccaacgagcatcacacctgcctcatggcaagggaaaagaag

SEQ ID NO: 78757 - DNA, 2298 bp, Zea Mays
cccccccacgcaacaacgatcgagaagaggaggaacaagatggattgaagaggaagagaggatcaaggagatgtgctacccccatctcttgcagatttttcttagggaaaaccctaggtaaggatgggatccttgtttctccctataattatgtgcttttggaggttgtggatcatgtggattgaaggattagaggttggattaggtgtggggttaggttttgatttcgaatttaatttctgcagaatggcagattcgacagtttctgttcataccagttttccgtgatcttagtggcctcaaaaaaataaaaagtctatatatgagtcgtagataatttgtagatctttccgtggccgcgaagaacacctcaatcagacatcagaacagaaagttatgacagtttgattatagcagtttttcagtctcataattctgtgcagaatctgttctcttaagagttaggcaattttatcaacagaattaaactgtgggttggtaaaagaagttgtagataatttcataagctttccagattgttaaagagtgcattcatatgatttgtgaaactccagttatgtttgttttactgtggctgttcctgtttgcctgacaaaaatgagtgaatctgttcactggtgggtttcatctaataaatggccgaattggctcttccaactatggagacttttgtagagggataatagttcttacttccagcagaatttcataatttttggttcagtagtttgggagatatcgaattttaaagttaaccatactgctgtctaaaacagattcagtcagttatcttgtcagatgttttagaacttgtagatggcagaatttaattatccattgaatactgaagttgtagagtattttgtgtagatactgctagagtatttgtttgatatcaccgctgttttaatttaaaagatacaaaattaacaaacagtgctgctgttgtatggcatgtggttcagggtgggagtctttccactgggtcttggtttcaagtgtaggagtgttttgttgattgatggcaaatgtttgtgaaatatttgtactaagttttatgcccgctagaaggtggctacactccagatcatgtctagtacatttcttcttcttcgatgaaggcaagtgaatgtagcggtggttgcttcctttctgacctgttatttctattgcctacactctaacattcagaagtattggattctttcataattggactctatggtgatgctttacttgcttgtattatactgatgctcaatcatatattgatgatgattatgattcgagtatgattcatgagattaattcacacccctgaaggtaaatgaagtattatttgaggttggtattgtatctgaaggtaaatgaagtattatttgaggttggtattgtatctgaaggtaaataaagtattatttgaggtttgtattgtatctgaaggaagtgaaggttattgataaatgcagcatgccatatacattgcatgactcatttgcatctgaagttttgtcgtgacctatggtccgaccgtaccggtacaatttagcatcgtacgttgcccgaggaggggtacgatgcggcttcatacccttagaggtatgaaggcagaggacatatgcattgcattcatatgcattcattgaagtgatatttgcagatgatgtggttttatactctcagaggtatgaagatagagtacctacacattgcattcctatgcatacattgaagtgatatttgcaggtattgttgacgtagggaagtgttatagaacctattgtggttgttcgaggaaatgagatggtattggttatagtgggactactgagttccatatccacaagtatttctgattttaattgtgactcttttaaaatgttgatgaattcaatttgtggtttaaatatctcgtcaaaattattcgcttgctgagatgtttcatctcactcttgcattactcaatgcaggtgcttgttgctcatcaagggaagtgggaagtagcagcacatccaccttcactcttataataacgctgcttaggcgcagtcatgatttaactagaagtttcttgtcaaaggatgtttgtttctaactagttgtgcgcactggataatttagctcatgtcgttatggttgtcttcccattgctagcagactattaatgtctattatgtttttttatcatgatatatatttatactttgttggttccccgtttatgccattttcaaaggagatgctgtcgaaattttatataagaatgttagatgtgta

SEQ ID NO: 78758 - DNA, 287 bp, Zea Mays
attcctccttggagggttatggcgggtcattacagcgtaattaattacaagcatggatagatgcactaacaaccctgccctcatagcagcttacaagtgggaccctgtatcattggccggctatatgtgggcccttattacaataaggagtaggttaccacgcatggtcttcgcgttccacacgttagccttcgaaattctcgacggtcttcgttctgacccgtctagacggagggaacacccaagccttcgcccgctctgtgcactccctccgtagcgaatctcac

SEQ ID NO: 78759 - DNA, 852 bp, Zea Mays
ccggattcaaacagcgatatcttttaaaatataattctaaatcaagcgcataagtactcattggaaagataagacaaatccctacatgattatcatactggttaacactaattactcccgaaaaatccccagaaactgctaatactgctgctgttcatccccctgaaaaatctgtttttttggacagcaacataaccggattcaaacaacgatatctcctgaattataactccgaatcgagcgcataagtacttgttggaaagataacataaagccctacatgattctcatactgattaatactaattactcccgaaaaatcctcagaaactgctaatactgctgctgttcatccccctgaaaatctgttttttggacagccacatacccggattcaaacggtgataactttcaatttataactccaaattgagcgcataaatactcgttggaaaggtaaggtaaagttctacatgatccccaaactgatttaccttaattcctcacgaaaaaaacacagaaactgctagactactgctgttcacccaccacctaaaattctggacagccccctctacccaatcgcaaacgcaacctctaatcaattaaattgcagcgcaaatgaacaagggatgaacacaaaaatcaccttggattctccccctttccttcctcccttcttccctccactaaaacgattgaagactcgcaccacgacgacgatgatccgagcggcaaggattgacaccttgggaggaggggattgaggggggggcggctagggtttggtggctgcaagaattgagagaggaggagatgggcaggggggcggcggccaaggggggagagaag

SEQ ID NO: 78760 - DNA, 560 bp, Zea Mays
agtggacatcatcacacagtgctcagatgataatataaaagggaaataatagtcgattacatcatatgtctgagacatccacatagtttttacaataatcaaagtgcgaaaacgaaatgtagataaacgcggccttcacatgcagccgactgggggttgccgctaacccacgcctagaactcatcataatcttggaactcctggtggtctccttccacaacttcatcttctcctgagcaggggttgcaatgctgacaacctgggggggaggggttggtgtgtagagcaagggtgagtacacatcaacatactcagcaagtatcctgtttggctgtagtggactagctttatgtggggtaagtcaagcagttgcttttagttggtcagattattattactagtagagaaatccaagttttagaattaacccacgttattaaccgaaacgtactcctttccaaacggaaagagtaccacttaccattactagagtcaataccaagaaccatcaatctcattgccacctacaatccgaacatctctgatcaggtaccactaat

SEQ ID NO: 78761 - DNA, 233 bp, Zea Mays
aaccactctacatcctcgtgttcactcatgttcatcgaccatctagcagacaggcaaaacgcttaggcccctcctcatcttaggatttagggcgggtgcgttccgccacccgaccagagattttcctctccgacggcttcaaagttggaaaagcttaccctactctcttcactaaaacaattgttaaagacatgttcatatgccaaatttatgttgatgatattacatttggg

SEQ ID NO: 78762 - DNA, 400 bp, Zea Mays
gtattcttcacctccagctccaattcggcaacacgcttctgggtgacttgggtctccattcgggcagcctgggcctccgactgctactgggctatgtcatcttttagttcgctcagcaaacggctgagcccctcattttatttctcaagagagctgaccttctccagaaggtttcgactcttgttttcagcagcagatttgtccctaatggcctatgtgttttgcgtcaagagacgctcaatcttgtcctccgaccgctttctctcggagcgcaactgtaaggtcgctacgtccaccagcgccccagacgccacttgatcagggaaggcagcagcctgccaacatgcagacttcattaaaaaaaagaaaaaaaactcacatatcgcagctgccgtgcaac

SEQ ID NO: 78763 - DNA, 573 bp, Zea Mays
ggtaaagacgcgcaacctctgaagagtgtaaaactggtatatcagccgtgctcacggtcatgagcagctcgaaccctcagatgattaatttatggaattaaattcaatttgtcatatgcattgcattgagggtgttgttatcatttttgttctactacttaattgggttggtatttacttatacttagcaattgctaataaaattttgaccaactttaaaagcaatgctcagctctaaccatcctctttggttagccttacacttcacatgagctccacctttggcgagttcatgcacattattctccacaacttgttgagcgatgaacgtatgtgagctcactcttgctgcctcacaccccccacaggttaagaacaggtaccgcaagatgaggcgcatggaggatgccatgacgaggtcgtgagaggtctaggtcgtcgtctcccagtcaactttggattgctggatcgttgtctccatatgatgtaattatttatttattttgtacagaactcctattatatagtaaagatgtgacattcgtttctgtaccgctattcatcatatgtgtg

SEQ ID NO: 78764 - DNA, 633 bp, Zea Mays
ttacatgataggttttcttattttgtgcaaccttatctttaataaaaaatagggtgatttcaagtggattttatgtctatattatagttgacgaggcatgcatgttttccttctatggtttgtttctatagccaaaaaggttatgcataattttttatttgttggaggctagtcatatggacgatatggacaacccgttttatattgtttttagtcgcagatgatatatggtagtttttttatgatcaattctttatgcatgcttgttgaattattatttggaccgttttatcttaaacaaagacaatgattaactggaagttgcttatgtttgttagtcatctatctttataatgatgtggttgttgcatcaaatggagatttttttatatgaatgatggtttgatagatcatgtatgtctactactttgaattcatcctatgacatcacgaggtacaaattgtgcaagtgcaataataggaggtattgttgtatgtgaggttaatcaaggtagtttggttaggtggaatgtcttattgaagtccaattactcctgttgagcatagtatcgtattattattttagtgttggaagtaatatttatgaagcttttgcatgagtctatgtcaaac

SEQ ID NO: 78765 - DNA, 522 bp, Zea Mays
tcttgtttggctaagtttggtttaggctataggaacactgtatgcagtgcattcatatatacattccttgaagtacttgcatatgtcaatgattgatttggtgtcaggaaagctttgtccgaggtatataggaccgtctactatcttatccgagttggcagctgggcttagcacatgcaattatcggaatctatgatcagagtacaccatgtattccatgtctttatgtggaggaagtatttgtggaatccagaccatcaaatcgagctagagccgattcctgtgtagcaagaccagactctaaagtgtcgtctgctgcgtatcttagaatcctaggagcttgaggagctgatgcggtagaagtacccgaactttactttatgtgtgatttttgttggttcattaaatctttcctttgtcgtttcgatagaagcatcggaattcgaggtcgaattctttttaagggggtagagtgtgatacccaattttcaaaaagaagagaaattgaagtttactcttttt

SEQ ID NO: 78766 - DNA, 753 bp, Zea Mays
gtaaacgtctgtaaaacagtaaaatttatgtttgatgtgtgcgcgggggtcgagagctctggcgtaggaatggttttgggccgttgatcacgatccggcggtgggaagcccacttccccccccccaaaccctagccgccccctctcttaaggccccttgtgggcagccgcccccctttccctcctttggccttcaccctccccccctcttccctcttctctcttccccaagtgttgcagccgcccccctctccattctcaagttttttttgcagcagccatctcctcaaccctagccgccaccccccatctcctcttctccatgtgtcgttctttctcgtcggatcttcttcgtgtgggtgcaagtttctattggagaattggtgggaggaaggaaggaggaaaaaggtggaactcaaggtgatcttgaagttatctatgtttttgcgctaaaattcaattgattatatgtttatctatgcgaatcggtagaggtgctgtccagaatttttgtgggagggcgaacagcagtagttctagggatttctaggaatttttcgtgggcaattagtggggatcagtaggagaatcatgtagagctttgtcatacctttccaacgagtacttatacgcttgattcagagttataatttaggagataccgttgtttgaatccggttatgttgctgtccaaaaaaacagatttttcaggtgggtgaacagcagtagtattagcagtttctgggaatttttc

SEQ ID NO: 78767 - DNA, 301 bp, Zea Mays
ccccctcttccctcttctctcttccccaagtgctgcagccgccccctctccattctcaagttttttttgcagcagccatctcctcaaccctagccgccacccccccatctcctcttctccaagtgtcgttctttctcgtcggatcttcttcgtgtgggtgcaagtttctattggagaattggtgggaggaaggaaggaggaaaaaggtggaactcaaggtgatcttgaagttatctatgtttttgcgctaaaattcaattgattatatgtttatctatgcgaatcggtagaggtgctgtcc

SEQ ID NO: 78768 - DNA, 947 bp, Zea Mays
cggtttgaggaatgcgggtgcgacataccaaaggtgcatgaaccacgtgttcggagagcatattggtcgaacggtcgaggcttacgtcgatgacatcatagtcaagacaaggaaagcctccgacctcctctccgaccttgaaacgacattcaagtgtctcaaggcgaaaggcgtaaaactcaatcccgagaagtgtgtcttcggagtcccccgaggcatgctcctggggttcatcgtctccgagcggggcatcgaggccaatccggagaaaatcgcggccatcaccaacatggggcctatcaaggacttgaaaggcatacagagggtcatgggatgccttgcggctctaagccgtttcatctcgcgcctcggcgaaagaggcctacctctgtaccgcctcttaaggaagaccgagcacttcacttggacccccgaggccgaggaagcccacgggaacctaaaggcgctccttacaagcgcgcccatcttggtgccccccgctgccggagaagccctcttgatctacgtcgccgctaccactcaggtggtcagcgccgcgatcgtggtcgagagacgagaagaagggcacgcattgcccgtctagaggccggtctacttcatcagtgaggtactgtccgagaccaaaatccgctacctgcaaattcagaagctactgtgcgcagtaattctgacgtggcgaaggttgcgacactacttcgggtctcatccggtgactgtggtgtcatccttccccctgggggagatcatccagtgccgagaggcctcgggtaggattgcaaagtgggcggtggagatcatgggcgagacaatctcgttcgcccctcggaaggcgatcaagtcccaagtccttgcagactttgtggctgaatgggtcgacacccagcttccagcagctccgatccaaccggaactctggaccatgtttt

SEQ ID NO: 78769 - DNA, 999 bp, Zea Mays
aggtagagcgtgccaacgacatgattctgcaaggactcaagccacggatctacaacgacctcaacaaattcggcaggcaatggatgaaggaactccccacggtggtctggagtctaagaacgacgccaagccgagccacgggtttcacgccgttttttctagtctatggggtcgaggctatcttgcccactgacttataacacggatccccgaggacgagggcgtacaacgaccgaggcaactggaccaaccgagaagactcactggaccagctgaagaggctcgggacatggccttactacactcggcaaggtatcagcagtccctacgacgctaccacgcccgaggggttcggtcccgagacctccaagtgggggacttggtgcttcggctatgacaagacgcccgaggacgccacaagctcacgcctccctaggaagggccattcatcattgccaagattttgaagcccggaacatataagctggccaacagtcaaggcgaggtctacgacaacacttggaacatccgacagctacgtcgcttctacccttaagatgttttcaagtcgttcatatacctcgtttatatacgcaaataaagtctaaccatcaaggaagggtcagccttgactcagcaaagcccgaccctccctcgggggctagaaggggggaaccccctccgcgtcaaaattttcctcggaaaaagtctttctgccataacatctttcgtgctttttcgactgcttcgatagtgggatcctgaaaacgacagagtacacgtaagcggcaaggccgaccgagccgagggactcctacgcctccgggatacggatacctcactcatcaccttctgcgataagtaactcacgctcggataagcgattccgctggccgaacaagtcttaacgctcgaaagcttttctgccgaaacgatttttcgtgccttctcgactatatcgataacagaatctaacgaacgagtaagagtacacgtaag

SEQ ID NO: 78770 - DNA, 533 bp, Zea Mays
ctgttgaaaattttaaccgaagccaaagctctctacattgtgctttccaacaagcgcttcgtcacttaagatcagcttcgtctgaaagaaactgaaaactaaaatggccagagtaagatctactaccagggtgtcccgtgagggagacgaaactgaagtgactgagacagcgccaatatcataagtgatgaggtgctcaggtctagttgtgtaagagggagctactgccgaagggatccccaatgtcgaagctaaacagactgaggctgaggtcgggagtgacaacgaaagtgaagaggacaatggcattttgagcccaaccaaacctagtcacattgaatttggaagatccaccataacagcagaggacttggttgtgatgaagaagctagactactttggagaaaatgaagatggattgattcgctttgctggggaagaagtaattctagagccaaaggaagagaggttgttgtgttcaagagcttcttcagggcggggcttcggttccccctgtacgatatgatagggga

SEQ ID NO: 78771 - DNA, 449 bp, Zea Mays
gattatcgaagtcgaaatcagttttatttcgggctgccgtctctcgccccgatccaaaactttggatataaatgacggatacaaattcatctgattccgaagtattcaccaagtcaaaatcacatctaaatattttacccaatattgtattggtccaactctttattgccttttaaaccataatactggattcgggatatttttgtattctgtgagaaaaaacaaaaaaaaagaaaataaaaatatatgcttgccgctctgctctgagaaaaacaaatctcaccgcacaaccatctcttcttatctccccgccgccctcccttgatatttctccaccgagccatcgttctctgtcatttccttatctacacgcgccaggccttcctatctcctgctcctcccacgcgcgctcgcctagccatctcccatggcgcttggcttcctccttc

SEQ ID NO: 78772 - DNA, 240 bp, Zea Mays
attttgggatgttacatccaccgtgtattgtgacaagaatttctccttcgcttgacacatgtagtcctcgtattgctattgctcatcggccgtcagactttcaacagccagcttcagaatattgtatggggagatatcgatgtgatatttagaaccaaccatttgagggcctgatttttagtagatctagacacctattcccagcggagtcaccaaaaagtgtgttggcgtcaatctagg

SEQ ID NO: 78773 - DNA, 585 bp, Zea Mays
tggggattttttttgccatggttatcgcatggatgaaaagagtggctcaattggccataggtgccatgacaatctattgggtcgagtgggtaggaaagctaagatattttagccgaaattaaaagagtttattcacttatttgatttattttctgttttatatgtatatacactatatacatgtatatattgagttttcttgctaaaaataattggtattcagttgaataccattgaattcaatgggacccaccatgtgtctaccgtgaattggagttgctagtttgattaataattctataataaataccagattcaataccaaatcaactgtggtattgaaatgagatgttatttctattctattgtttggatgtcgctgaattgaggtttaaaattgtgtgatctaattgcacataatacaaaagataatgctcagtactgggagaataagtttatagttaaagtccaaatccagaaaattaaatctatcattccaaatctcgattctatacgtaatcaaacaacggaattttagaaagctggttctaattcataattacatcctaacacgctgtatagaag

SEQ ID NO: 78774 - DNA, 414 bp, Zea Mays
gactcagggacgaaggactcaccagtaatccccttcaccagaacctccagttcctcccaggacaggtcagcccccggcccgcgctggatctggccgatgtcgtttgagtcggtgaaccagcaacataaatgcgccctctgctgcagcggcgtgatccagcgcttcaggaagtctccgaccacgtgcatcgacgtcaggccacccgctgccaagctcttgatcctgtccagtacgaactggaactctggcgccagggatggcttggctctccactgctttcggtcaagtcttggaccgtcgctcgacagggcgaggcgatcgttggcctccgcgctagcaatcacccagtcgtcgtgccagttctcccaccttgcgccgccaagggaggggatataggcgtcggccgaatccggc

SEQ ID NO: 78775 - DNA, 229 bp, Zea Mays
gtcttcggcacgaatgctgaaggttatcgggggtcgatggccaatgaacgtttcgattccccacgcggccggtgaggacatatttacgtctcgtatggctcgtgagttgaagatttttccttacagatggaatattgctgctgttgttcgacaaagatggacaaggatcatcaagatgcggcgcgaaagcgccgggcaatcacaagggtctgggaccctatgcgcgaag

SEQ ID NO: 78776 - DNA, 694 bp, Zea Mays
gtgatctggtcagcacgctgcccgaggcatcgggggtggagctggcgccgccatctgatgcagacgagggcccctcggcgacccccacgccgactggagctggcgaggaccccgcgccagccgctgtgctgacgggtgcggacgccccgaaggtggtggctgaaccggctgtcgaagactcagggccttcgcaggtggcagaataggggcttggatttaagtgtaaacttttgtttctgtgatactgaacctcggttgctgcgcaggttccgatgtttgggcctacgcaagcaaccgctgctgtcgatactgattttgtggtggcctcaaccgtagtgcctgccgatgataatttgtttggctctgtgtctgagtgttttgagcctgatggtgaatcagggagttcgatttcatggatggaggagtcctcagatgaaggcttggattattttgctacgttagatgtggctgcagcggagacttctccacgtgtggaggcttccgggggtcttcctagtgcgagtactaggtataggaggcgaagggcggtggcgaaacacagtgagagtgaattttcgcgaagtggtaggtgccgtcgtatggggatggagcgtggccgtcttcgcgtggaccggactggtaaacgagaattgttgtcctcggcaattggggcgagcataggtgaaggggagct

SEQ ID NO: 78777 - DNA, 986 bp, Zea Mays
cttcacttccttcagatacaatacaaacctcaaataatactttatttaccttcagatacaataccaacctcaaataatacttcatttaccttcaggggtgtgaattaatctcatgaatcatactcaaatcataatcatcatcaatatatgattgagcatcagtataatgcaagcaagtaaagcatcaccatagagtccaattatgaaagaatccaatacttctgaatattagagtgtaggcaatagaaataacaggtcagaacggaagcaaccaccgctacattcacttgccttcatcgaagaagaaatgtactagacatgatctggagtgtagccacctgctagcgggcataaaacttagtacaaatatttcacaaacatttgccatcaatcaacaaaactctcctacacttgaaaccaagacccagtggaaagactcccaccctgaaccacatgccatacagcagcagcgctgtttgttaattttgtatctttaaaattaaaacagcggtgatatcaaacaaatactctaggagtatctacacaaaatactctacaacttcagtattcaatggataattaaattctgccatctacaatttctaaaacatctcacaagataactgactgaatctgttttagacagcagtatggttcactttaaaattcgatatctcccaaactactgaaccaaaaattatgaaattctgctggaagtaagaacttttatccctctacaaaagtctccatagttggtagagccaattcggcaatttactagatgaaacccaccagtgaacagacctactcatttttgtcaggcaaacaggaacagccacagtaaaacaaacataactggagtttcacaaatcatatgaatgcactatttaacaatctggaaagcttatgaagttatctacaacttcttttaccaacccacagtttaattctattgataaaattgcctaactcttaagagaacagat

SEQ ID NO: 78778 - DNA, 1504 bp, Zea Mays
aaaagcacataattacagggaggaacaaaggatcccattcatacctagggtttccccaagaaaatatgcaagaagagatggggaagaacacctccttgatcctcccttcctcttcaattcaacgtgctcctcctcttctcgatccttgctgcgtagggggagatcttgggggaggaagcaatggaggatggctgccatagggggagggggcggccagccaagggggagaaagggggtggcggccaagagggggggtgaagggaaaaaaagggtggccacctagggtttttgtgggagaaagaaacgacgcctcagatgacttctatctttgcatccaatggcccacaaccctttacctcatccacgcaccaaagattaacttttggtcaacatttttttgggatattacactctaccccccttaaaaagaattcgacctcgaattcggccactccaagcaaaacacccaaggtaccccatatagcaccaccattcaaaacatgggtccattattggtcttaattaacagaagaacttctaccttggactaattgtctaaggaaactacacgacctgacatcaagcatgaaacaacatgcaatgaagctcaaagcaattcatagttgcaatcaacactacaatttcacaccatcaaatttggatgcagctatacatcaacatcaatgtcttaagacaacactcttttatgaaggggtaatatgcaccaagcacaatccttaccaacttcaacaattaattttaattaaatggtgaaacatctacacccgacgaatgtataagaagatcaaacacctcaccttaaagcaccatgaaacaagtagttctattgaaacaaaaatcctaatcttcctaaaccttattcttgccatcatgaaaagataatcatgtaatctaacattctttgcaccccacaaaagggagaaaatccacagaactaatggagcaataaagccaacaagaagccaataatattctgcgtggcacatttcatcgaagaaatgccaaaagctccacaaagagcactgacagcacaacaacacaatacttggttaaccaatgtcactatacttcatccaacaactcaactaagaaaaatatccgaactagtaaggttaacctacacataatataagtcttcatctactgtagttcataaacttacatttcattctatcatacgatgcactcaaagtaccagacatacaaggtcaataataaccccgtaatccttcacacatttgacaaacatctcaagctgatgtaaaaaccacatcatttacgaataggtgactaaccacacacaacaaactctaggctaggcactggcttcattcaaaccaatagataggtggtccaacaatggctccacaagcatgcatcggagagagaaccatctgatcctccatatattaatacataatcaatggatccagaaaatcaaaggtttattctacaactagcatgactaacatgcaaccacttt

SEQ ID NO: 78779 - DNA, 2975 bp, Zea Mays
cttaaattcaaattgatggttaccttgtaacccaaaacacgcaattcacactcctcttagaaacatcctcaatcaagcatatataacaatattattgtaataaaactcaaccatggaaaacatggtgtaaacaacatagacatacttgtatatcacaagcataataacaacttcaatctctcaaaagaccagcgatatcaatcgcattaataaaacaatataaagatttagagataaattattaggcattaagtcataaacgacttaccacatcaccgtaaaggaatagggaggggtgaaattattgtcatctgcactccaaagacattaatatatatcaaagatatttgaacccatacccttcctatatgtgcaagtgtgtcaaatttatcttcaaattgccaagaatctaaagcctatgctttgataccaactgtaacaccccgggatccacaaacaccccagaatgctactaaactacacatctaacattcatatataaaattttgacatcatctcctttgaaaattgcataaacggggatgcaacaaagtataaatagatatcatgataagaaaacataaaagacattaataatctgctagcaatgggaagacaaccataacaacatgaactgaattaatcagtgtgcacgactagttaaaaacaaacatcctttgacaagaagtttctaattaaatcatgactgtgtctgggcagcattattatgagagtgaaggtggatgtgctgctacttcccactccccttgatgagcaacaagcacctacattgagtaatgcaagagtgagatgaaacatctcagcaagctaattgttctgacgagatatttaaaccacaaattgaattaatcaacattttaaaagaatcacaatcaagatcagaaatacttgtagatatagaacttagtagtcccaatataaccaatatcatctcatttcctcgaacaaccacaataggttctataacacctcctcgcgtcaacaatacctgcaaatatcacttcaatgtatgcataggaatgcaatgtgtaggtactctatcttcatatctctgagagtataaaaccacatcatctgcaaatatcacttcaatgaatgcatatgaatgcaatgcatatgtcctctgccttcatacctctaagggtatgaagccgcatcgtacccctcctcgggcaacgtacgatgctaaattgtaccggtacggtcggaccataggtcacgacaaaacttcagatgcaaatgagtcatgcaatgtatatggcatgctgcatttatcaataaccttcacttccttcagatacaatacaaacctcaaataatactttatttaccttcagatacaataccaacctcaaataatacttcatttaccttcaggggtgtgaattaatctcatgaatcatactcaaatcataatcatcatcaatatatgattgagcatcagtataatgcaagcaagtaaagcatcaccatagagtccaattatgaaagaatctaatgcttctgaatgttagagtgtaggcaatagaaataacaggtcagaacggaagcaaccaccgctacattcacttgccttcatcgaagaagaagaaatgtactagacatgatctggagtgtagccacctgctagcgggcataaaacttagtacaaatatttcacaaacatttgccatcaatcaacaaaactctcctacacttgaaaccaagacccagtggaaagactcccaccctgaaccacatgccatacagcagcagcgctgtttgttaattttgtatctttaaaattaaaacagcggtgatatcaaacaaatactctaggagtatctacacaaaatactctacaacttcagtattcaatggataattaaattctgccatctacaatttctaaaacatctcacaagataactgactgaatctgttttagacagcagtatggttcactttaaaattcgatatctcccaaactactgaaccaaaaattatgaaattctgctggaagtaagaacttttatccctctacaaaagtctccatagttggtagagccaattcggcaatttactagatgaaacccaccagtgaacagacctactcatttttgtcagacaaacaggaacagccacagtaaaacaaacataactggagtttcacaaatcatatgaatgcactatttaacaatctggaaagcttatgaagttatctacaacttcttttaccaacccacagtttaattctgttgataaaattgcctaactcttaagagaacagattctgcacagaattatgagactgaaaaactgctataatcaaactgtcataactttctgttctgatgtccgattgaggtgttcttcgcggccacggaaagatctacaaattatctacgactcatatatagactttttatttttttgaggccactaagatcacggaaaactggtatgaacagaaactgtcgaatctgccatgctgcagaaaactaaattcgagatcaaaacctaaccccacatctaatacaacctctaatcctttaatccccatgatccaccacctccaaaagcacataattacagggaggaacaaggatcccatccatacctagggtttccccaagaaaatatgcaagaagagatggggaagaacacctccttgatcctcccttcctcttcaattcaacgtgctcctcctcttctcgatccttgctgtgtagggggagatcttgggggaggaagcaatggaggatggctgccataaggggagggggcggccagccaagggggagaaagggggtggcggccaagaggggggtgaagggaaaaaaagggtggccacctagggtttttgtgggagaaagaaacgacgcctcagatgacttctatctttgcatccaatggcccacaaccctttacctcatccacgcaccaaagattaacttttggtcaacatttttttg

SEQ ID NO: 78780 - DNA, 464 bp, Zea Mays
cttcgtagtggtttcttccccgccaaaacgaatcatcttcttctcggcttccccgaagtatcctagctttaacatcatgggcatatcagcctcggagacagtagactttccaaagtccaagtggatgggtttggatggcatgacggtgttataatctatctcttcttcatcagcattaccctctttaatgtcagtctgttcagctttggcagcaggtgcaccttcctaagaagcaccttctgtcacaaccagtcccgattgcctcattacttcggagattggggcagtctcagcagcttcggcctcctctccgtcgcgcgtaattctagctgttgaacgcactctggccatttgatactgaatttctcacggttttgacgaagttgatgactttttgcaattttgccgaagctccctcttatgacgaagctaaaacaagacgatgctttgattgagaatacgat

SEQ ID NO: 78781 - DNA, 719 bp, Zea Mays
cgaatctttaccactcaggctaagtccactagggccacaactgatgaagcttttatagaaggaggagcctgtggcaatcaagaagcctgctgaaaaaaggtaaaggattattactgttattgatgctattgaagaaacgccatcattggcttcggcgtcaaaaacaccagctgccgaagttgctcccaccgaaactacaactgccgaagctgcggcggccgaagccataaatcttgaaggcgtattttctgatattgataagatgattttggatatggccactgaagaaactgttgcaactgccgaggcaaccgtggccacagtgcctggaaaagggaagaaggtatttaacaaagagaagaagattaccgaaaaaatttcggaggaaggggacttcaattttcgaaacatgattggtcaggagttatcgaaggctgaaaaagaagaactaagagattatgttatatcttgcggctaccagccaggagcattgctcttcggtggcgttgacgaagagagcttaggatgcctccgagaccgtagtggagcgaaggttgtcagcactctatcgaagagtgttggctttccgaagcttgaggccgacctcagcagataccggcgacaacatatcgctggtagcttgttttattctaattttaaggtaaagttcttaccttaactttttgttgttttcgagatgaaggttacttctaatgaag

SEQ ID NO: 78782 - DNA, 358 bp, Zea Mays
ttgatgcaagcttgaagctgaagttgcaaagagttccaagttgcaaaagtcattgaaggaacttcaagataaatgtctgaacttcagcaaccgttgcgcgcaatgactgaagcaggtcttcaactcagttggagctagttctgaatagtttaaaccttcagctgaagacctgccaggcatcttcgatcatattaaaggcgaagtcgatgctcttgatgaagtcatagctgggcatggtgacttctgcgctctgctagcttctcgtggcacgactgttgcttttatgaaggctggttgcacacacggcaatattgtaaacagaccgaacttcagcttatcactagcggacttgaatgac

SEQ ID NO: 78783 - DNA, 268 bp, Zea Mays
agttcacctatttataggcacgggacgcagtccaagtaaaaatgcatttatgaccttaacatgtactgataatcgtaacataaatcatcagggattaactagtcttttcctcttcgactcagcatcatacttaaccttcgtcgccaccttaggtcgaagctgtcgctctcggttgtagcttcgacattcgttgttgtcgctttcagacaatgtcttcgtctcgcggaccttcggcggagaagaagatcctcaacatcgcttacaaacg

SEQ ID NO: 78784 - DNA, 199 bp, Zea Mays
gcgggcggatcgaagcaagcagcgacataagaaactgttggagagctcgacgatcaggcgaagatggtgcgagagcgcagctagcggctggaacagagcggggacgtgacctgcatcgcgcggagcagcatgacacagagtttgacaacgacggccacatggaccatggcggagcaaagatcatcacaggcgcatggcg

SEQ ID NO: 78785 - DNA, 245 bp, Zea Mays
caaagatcaagataatctagacataatagttctcttttaatttaaaagtatccgtaaatggttatttaaaattcttaataaaaaagaaacctagcaaaccttaaaacaactccaacaacaaccaaaaaaagcttattcccaattctattttagaagaaaaaaaaagaaaaaaaactatccaacaactccctatgtcatcttgctatctacctcgacgggtaaaatgaatcagtcctggtggaaat

SEQ ID NO: 78786 - DNA, 1072 bp, Zea Mays
gtaccacttgatcgccatccaccgggaccctaggcacgtccacccggtggtgactcaccgtgcaagccagcattctccgccctgttgaccggttgatcctgacggctgacgctcctccggatgcctcctcggtcccctccattcgcgccaccctcgccgacccccactggcgtcgcgctatggaggagtacgcagccctgctggccaaccacacctgggacctggtgccgcgtccacccaacgtggtcacctacaagtggttttttcgccacaagctgacctcagatggctctctcgaccgctacaaggcccgttgggtccttcgggcttcacctagcgtcccagagtcgactacgacgagaccttcaaccccatcatcaagttcgccaccgttcgggttgttctcacccttgccctctcccgggactgggcgattcattggttcgatgtcaaaaatgccttcctccacgacactctgacggagactgtctactgtagcctgcccactagcttcgtcgacttcactcgtctggatctggtcttccggctgaaccgctcctgtacggcctcaagcaggcgctgcgaccctggtacagtcgcttcgcctcctacttggcctccatcgacttcattgaggccaagtcagacacatccctgttcatctaccggcgcgacagcgacatcgtctacctcctgctctacgtcgacaatattgtgctcacgacatccactgcggaccttctacaacgcacgattggcgcctttcaacgggagttcgcgatggacctggggcttcttcgccacttcctcggcatcaccggcgagtgccggcctcaggatctcttcttccaccagcgctagtacgccattgacatcttggagcgggctggcatgtccgactgcaagcactgctccacgcctgtcgacactcagacgaagctctctgaggacgacgtcctaccggagcctgatcaacgccctccagtatttgtccttctccaggcccgacatcgcctactccgtccagcaggtgtgcctgcacatgcacaccccgagggagccctatctcacc

SEQ ID NO: 78787 - DNA, 256 bp, Zea Mays
gggacccactatcctacggagggacgggtggatggtccactgagatgggccagccaaagcgttcgtgacttttttgtttttttaattcaaatttcgttttttctttttctttacttttttattttcttacataagttattcaaaaatatataaaaccatatgtttttaaatattccaaaaaatataataataaaatattcaataaataaaatttaggcaaaatttctattataaaataaattaggcttcgcaaaag

SEQ ID NO: 78788 - DNA, 874 bp, Zea Mays
cggcggctgggcagggagaagcccctggcggcggctgggggccggcggcggctgggcagggagaagcccctggcggctgtagctgataagacctaaacctaaacctaatttgataccatgttggaatacgaaccccttgccctaaccagggatggggagtggtattaatagacttggtaactgggccaggcccattacagtgaggggtgagacggtaattacatggggaacaccccaaaccctagaatcctagacgggtagtctaacattgacacctctttcctggttggggatccaacaatttttgctgatttgggatgctgttagcaatattgtgttaactctggagacagatattcacacctggatgcatacttcctctggtcagttttcttctaggtcttgttacagggctttatttatgggagctattatgtttgaaccttggaagaggctttggaaatcttgggctccccctaagtgcaagtttttcttatggctggccattcggaacaaatgttggacttcagatagattggagaagagaggtctggaccacccagtgtcttgcctactctgtgatcaagagcaggaaaccatacaacatattttgtgtacatgtgtctttgcaagacagttctggcattccattctgtttggattgaatgttggtaatctctctccatttggggatgagagctcctttgctgattggtggcgaaaaacaagtaagaagatacataaaagcaagagaaagggcatgaacaacatcattattctaggggcctggtgtttatggatccaccgcaacaaagttgtctttgatggggagaccccttcgctaagctctatcagatgcgtctttcttgatgag

SEQ ID NO: 78789 - DNA, 751 bp, Zea Mays
ctccctacgagccgaatcagggtgcattaggtgattggcccaaataagtgcgaacataccttacggtataaaatactatagtattattgaaaaccatagtattatttagaaactataaaaataatttacttctaaataggccctaagtgaaccgacctttcatggcagtttcacatttgttggctaggcacctccacaaggtctacgtggacaaccaaacaaaggcatgttacacttgacttgccatcgatgacggtgtaatggtagctcgctgatggaagacaactcgtattagggtgtggccagtagatcgtgtataagacagtgcaaaacattgtttatacagttttacattgtatactgtattgtttatagaatggaatttaaaatagaagacgagatggataagacggctggagataaccttaatcctaacaaatggcgacatagattacgcaatgacactgggcgcttgcagtgattccaaacagatccttatgttgttacatttgttgaatgcattattctactactgcgaataattgattgttcagataattctatcacttttatgtgtatgcatccatatatattgcttgctcctatatgtataaaagtaacgcttctttaactatgtaaacacattagttagagactcccgcgggatgtgagcaatcactactggacacagctcctttgccgagtgccttaggcactcggcaaaacctagaaaacactcggcaaacacttt

SEQ ID NO: 78790 - DNA, 415 bp, Zea Mays
caccgctagtccctgtgccgagagctctcgtaggcactcggcaaaggaggcttctttgccgagtgtctaatggactggctctcggcaaagagtcctccagtgggcccctttgccagtccctttgccgagtgcgctgggcagcactcggcaaaggtagcttctttgccgagtgtgttgaccacagcactcggcaaagaaggctttaccggttcccaggtttccttctttgccgagtgccatggtcataacactcggcaaagtgaccaggaagtccttttttatttgtttttgctattccatccaaacaagcaaaagatatatatcattcacatcacattatatatcattcgcatcacagaatcaacacatttatcatcaacaccatatatatcacaaatatcaccacataaatcag

SEQ ID NO: 78791 - DNA, 376 bp, Zea Mays
cctgaaagtagcataacgagaggaacataaagtttatacataatgtaaaaaaaaatccacgtagtttaaacagaatacagagatagtaatgaataatcatgaccaaataaaaagagagggaatctggccaacccaaaagaaaattcgactatcatgaagactagaacatattaatatcctagacttgaacccctgtttaacatcattactaagcagtggtacatttatttaaatgtgtagtggtcgtgctgttacttccctcctttcccaaaatcaaggatcaagtgcctgcatcaaacattgcaagagtgagatgacacatctcagcaagtaaaaagatcaacaacgactagacaatgtaaataagtcgtgctta

SEQ ID NO: 78792 - DNA, 346 bp, Zea Mays
ctgctgtttgcccacccacaaaaattctggacagcacctctaccaattcgcatagataaacatataatcaattgaattttagcgcaaaaatatagataacttcaagatcaccttgagttacacctttttcctccttccttcctcccaccaattctccaattgaaaattgcacccacacgaagaagatccgacgaggaagaacgacacttggagaagaggagatggggggggtggcggctagggttgaggagatggctgctgcaagaaacttgagaatggagggggggcggatgcagaacttggggaagagagaagagggaagatggggggagggtggcggccaaag

SEQ ID NO: 78793 - DNA, 938 bp, Zea Mays
atttggatcacttgaaagggttgagtttaaccctcgtccgttgggacgtcacaacgtggatgtatgcaagtattctacttggccgaaccacaggataaaatcgctgtgtcacttgtcttcattcttgtgcgattctctctaactctattcacttcacttacataattgctctaagtttaatacttactttgtgaagagcaattaagtgaagaagtttactccgctagcacttctctctcgaacttggttttcactaatccaatagtagtccaagtttgttttgttaagctatttttacaggatcatctattcacccccctctaggtgctctcattaataactgtgatctcttatctatttgggttgatatctacttatacttagaaactactaataaaactttgaccacctttagaagtaatgcacaactttaaccatctcctttagtaagccttacacttcacatgagccccactgtaagtgagctcatgcacattattccccacaacttgttgatcgatgaacgtatgtgagctaactcttactgtactcatatcccacaggtcaagtacagataccgcaagataaggagcatgatggatgctgcgatgagttcgtgatctaggctgttgtctcccagtcagctatggtaactggattgtcgtctacgtatgatttaattatttagttattttgtacagaactcctattttatagtaaagacgtggcattcgtttctgtaccatgagtcatcatatgtgtgagacttgatcctagcacacatttgattcgcgtccgggtttgccccttaaatctgagtgtgacacaatgtttttgatggccatatgggtgcaatgttttagatgaccatatatgtgcaatgtacaatagttcacacatatgataataaaaaaatgttttacactgttttgcattat

SEQ ID NO: 78794 - DNA, 658 bp, Zea Mays
gaaaaaaacttctacttttttcgatattgacaacagatatggatgttgccttttcttattactggtatcgctgtagaaaatctactcctttttagtttatatcatctgattagctttgagaactggtttctgacaaatgatagatttgtgtctgttaagatggtagtttgttggtgcctccttcgtaagtgaggttatttttgctgtatttaaatattgttctctccgtttttttatttgtcacgttttagttaaaaatgagccagcggacgataaatatttaagaacggaagttagtacaaaatacctttttatttgttatgtatgcctgccatgctctttgctgttggctcttccaaaaataaatcctagacttcatggagtttttcaagtttattatctatcaaattcgttttccgcaggactcgtgttcacggatgccagaagccatcaagagaatcatggattccatggagttttctcgagatgattatctctttaatttcggttttccatgattcatgttaacggatgtcacaactcacaagccatcaagtgtttatctttccctgcgtgtactagctagtactgtttgtttattggagttattagaaacgtacttatccgatgaggtggattctactcgtcgtcttccttt

SEQ ID NO: 78795 - DNA, 821 bp, Zea Mays
cccgtttcctacagatctatatcaaatgtttgaacaaaatctatatccacgataaagttgattcgtggtacatctaggtggatttaattggatttggagctgatggatctctattaaggtagtgtttgggaatgctccactccaaaaaatctagcttcaatataactccttccaaccaaacacctcctgttcaatcaactccggctccataaaaaattcggatctaggcccccaactccaagttttttgtgaagcttcaaataggtgcttcggaaatcattgttttgtacctcctcatagaattgtgggggtaattactcgtattgccacccaagacctcgtggatagtcgggtggttctcctcgtcgtgcctcctcttccgcgccgatgagcgactcccccggcatgcctcctccacatcggcaggtggcttgccaacatcgctcctcctcaacgtcggccgatgggctcaccgcaactgcacatcggtttgcgtcaacgtttggggttgcaccagcgaggatggagacagtcgcctcatgcctcacatcattccatcaagagaggtgaccgagttagtggggatgggagcgagaaacagtggagttggatcacctacatgtggatcgtttaaaacaaggatataatagacatttaccctaaaatctatcattcactgaactagaataagatgttaagccaaacattttttctattccaactccatggtggagctgctaaaagatagagttcgtagagtagagtggagctgaatttcttggagttgagtagtccaaaacgccttttacatagatccttag

SEQ ID NO: 78796 - DNA, 460 bp, Zea Mays
aataaattgttgggctccgggcaacctaacttgttgggcctcgaccaaccccacctgggctgggtgtatcatctggtatcagagctagggcccattttaagaaggtggaaatgatgaggacatcctccactattacccattggcaaagacgcaattggcctagttggcccaattgtagtcggacagcgattgtgtgagcctcagaattatcccacctcgcttaacttgggaggaggaagccactttaaaagggagagccacccttcccccattggactagtcttttggggcgattgggcctttccttgagttgggtgtgcttaatgaactgttgggctccgggcaaccctaacttgttggaccttggccaaccccacctgggctgggtgtatcacctatcatctgtgaaattgacattgtggaacatgccctgatgtgaagtttggttgatattatggcc

SEQ ID NO: 78797 - DNA, 178 bp, Zea Mays
ctattttttcctttttttcaaacatgatgcttagctgtaaaaaaagggtaacaatccatcactcacactatgtacatgtccacttatgcttatgcgtaaacaattttatatgcgcatagccatttatctaaattcaaagtattgcagacatatactccatggagacactgaagctgga

SEQ ID NO: 78798 - DNA, 427 bp, Zea Mays
cctcatctagagtaattgtgcacaacaatgccctgcagcaatatactcggcttcggtggtggatagagctactgagttttgtttctttgaagctcaagacaccagagatcttcccagaaactaacaaatccctgatgtgctcttcctgtcaattttacattcggcataatcgacatcagaatacctaattaaatcaaaggtagattccttgggggtaacaaagcccaaacttagaagtgtaaactaaatatctcatgattcttttcatggccctaagatgaacttccttaggatttgcctggaaccttgcacacatgcatatgaaaagcataatattcggtcgtgaagcacataaatagagtaaggatcctatcatcgaccgatgtaccttttgatctacggatttaccacctgtgtcgaggtcgag

SEQ ID NO: 78799 - DNA, 125 bp, Zea Mays
cgtcgcccgccctcctgactacacctcactacggcacacctccgtatggtgttcccgtcgtgcccccggcttcgcccgcgctcctgcccccggggacccccacctcgacgacttggtccccgccg

SEQ ID NO: 78800 - DNA, 1081 bp, Zea Mays
cccatcctcgatcgtcgttggaaacggttccactctgccagtcacctcagtaggtgcctcggttctccctgggccgttttacctcaacgatgttctcgtagccccccacatcacccacaatcttctttctgttcgtcgattcaccactgacaactcctgttccattgagtttgacccctctggtttttctgtgaaggatctggccaccaggacccttctcgcccgctgtgacagctcggggcctctctacacgctccagccctccaccgccggcgtgtctccacctcctgccctggtctccaccacctcctccaccacatggcaccgacgtctcggccatcctggacccgacgtcatgaccaagattaccagtagtctcgatccttcctgtagtaggggacattttgagggtctctgtcatgcttgtcagttaggccgacatactcgtctcccatttactacttcttctcgggctgagcaggcttttgatctggttcattgtgacctttggacctcccctgtactcagtctttctggttataaatactatctggtgattttggatgatttttcccattttctctggaccttcccgcttcggttgaagtcggacacattcaccaccctcacacacttcttcacctgggtatccactcagtttcgtcgcccggtccgtgctctgcagtgtgacaatggccgcgagttcgataacaacgcctctcgctccttcttcctcactcatggcgtccagttgcgtctctcgtgcccctacacttctgcccagaacggccgtgccgaacgcatgatccgcaccatcactaatatgctccgctgtctcctcttccaggcgtctctccctgccagctactgggcagaggccctgcatactgccacccacctcctcaaccgtcttccctcgaaggcggtgagccaccctactcctcactttgccctgtacggcacagccccttcctacgaccacctgcgcgtgttcggctgtgcctgctaccccaacacttccgctaccgcccctaacaagctttctccacgctccactcgatgcctcttcctcggctactcc

SEQ ID NO: 78801 - DNA, 401 bp, Zea Mays
atttgtttgatatcaccactgttataattctaaagatacaaaattaacaaacaacattgctgttgtatggcatgtggttcagagtgggaggttttccaccaggtcttggtttcaggtgtaggatcgatttgttgattgttggcaaatgtttgtgaaacatttgtactaagttttatgcccgctagcaggtggctacactccagatcatgcctagtacatttttcttcttcgatgaaggcaagtgaatgtagcggtggttgcttccgttctgacctgttatttctattgcctacactctaatattcagaagtattggattctttcatagttggactctatggtgatgctttacttgcttgcattatactgatgctcaatcctatattgatgatgattatgat

SEQ ID NO: 78802 - DNA, 458 bp, Zea Mays
gccgggttgtcaggcacggcgcgggcgcgcgcagctgggccgcttgggtcggggaggagaggggggagaagtgggcgcggcgcggtttgggccaaaaacggcccagccgaggggggagggtttttcctttttctttttttgttttctatttcacttccattttctatttttgtttctttttatttcctttacttttgaaccaacaattagctaaataatcttaagtgttgaaaataacctatgtgaggtgttcctaacaatccaagtgtatgcatatgatgagatgaccttaggatggagtttaaggagaaaatagaaataagggggggtttaggagattagggttccacaccttgggttgagattttgtgatgttacaaacctaccccacttaaaggaatctcgccctcgagatttagactggatttgagaaaagataagggtattccctcctcaag

SEQ ID NO: 78803 - DNA, 3925 bp, Zea Mays
gtggcattggggtttggagtttcaggaggcattcctcagaaaacagtagatcttttggcattttttcgctggggtcgggagctcaaaggaaagagcgagtttgggccattgatctcgatccggtggatgggagcccccccctctcctccccaaccctagccgccccctccccttctccccaatggattgcagccgccccccctggtagagtgtaatatcccaaaaaaatgttgccaatggttgatcttcggtgcgtggatataggaaaagggttgtgggccgttggatgctaagtcggagtcatctgtggcgtcgcttcttttctcccgcaaagaaaaccctagtggtggtcttttcccccttttgcccctacttggccgccacccctttccccccctcccacacttggccgcccctctcttcttttcccttgggctggctgtcctctcctcccatggcagcccctctccacggcttcctcctccctctagatctccccccgcgcagcaaggatcgagaagaggaggagcacaaatattgagttgaaggggaagagaggatcaaggagatgttcttccccatctcttcttgaaaaatttcttggggaaaccctaggtatggatgagatccttgttcctccctgtaattatgtgcttttggaggttgtggatcatgggaattaaaggattagaggttggattagatgtggggttatgttttgatctcgaatttagttttctgcagaatggcagattcgacagtttctgttaatcccagttttccgtggtcttagaggcctcaaaaaaataaaaagtctatatataagtcgtagataatttgtagatctttccgtggccgcgaagaacacctcaatcggacatcagatcagagagttattgcagtttgattatagcagtttttcagtctcttaattctgtgcagaatctgttctcttaagatttaggcaattttatcaacagaattaaaccttgggtttgtaagaaaagatgtagataatttcataagctttccagattgttaaagagtgcattcatatgaattatgaaacttcagttatgtttgttttactgtggctgtttctgttagcctgccagaaatgagcgggtctgttcactggtaggtttcatcaagtaaatggccgaattggctctcccagctatggagacttttgtagaggcataaaagttcttactttcagcagaatttcatgatttttggttgagtagtttgtgagatatcgaattttgaaagttaactatgctgctgtctaaaacagattcagtcagttatcttgttagatgttttagaacttatagatggcataatttaattatccatcgaataccgaagttgtagaatattttgtgtagatactcatggagtatttgtttgatatcaccactgttataattctaaagatacaaaattaacaaacaacattgctgttgtatggcatgtggttcagagtgggaggttttccaccaggtcttggtttcaggtgtaggatcgatttgttgattgttggcaaatgtttgtgaaatatttgtactaagttttatgcccgctagcaggtggctacactccagatcatgcctagtacatttttcttctttgatgaaggcaagtgaatgtagcggtggttgcttccgttctgacctgttatttctattgcctacactctaatattcagaagtattggattctttcatagttggactctatggtgatgctttacttgcttgcattatactgatgctcaatcatatattgatgatgattatgattcgagtatgactcatgagattaattcacacccctgaaggtaaatgaagtattatttgaggttggtattgtatttgaaggtaaatgaagtattatttgaggttggtattgtatctgaaggtaaatgaagtattatttgaggttgtattgtatgtgaaggaagtgaagtatattgataaatgcagcatgccatatacattgcatgattcacttgcatctgaagttgggtcgtgacctatggtccgaccgtaccggtacaacttagcatcgtacgttgcccgaggaggggtacgatgcggcttcatacccttagaggtatgaaggtagaggacatatgcattgcatttcatatgcattcattgaagtgatatttgcatatgatgtggttttataccctcagaggtatgaagacagagtacctacactttgtgttcctatgcatatattgaagggatatttgcaggtattgttgacgcagggaagagttatacaaactattgtggttgtttaaggaaatgagatggtattggttatattgagactactgagttctatatctacaggaatttcttatcttaattgtgattcttttaaaatgttgattaattcaatttgtggtttaaatatcttgtcaaaacaattcgcttgctgagatgtttcatctcactcttgcattactcaatgcaggtgcttgttgctcatcaagggaactgggaagtagcagcacatccaccttcactctcataataacgctgcttaggtgcagtcatgatttaattagaaacttcttgtcaaaggatgttgtttctaactagttgtgcgcactggttgatttagttcatgccgttatgtttgtctttccattgctagcagattattaatgtctattatgttctcatatcatgatatctatttgtattttgttgcttccccgtttatgtaatttacaaaggggatgctgtcgaaattttatatatgaatgttagatgtgtagtttagtagcattctgggtgtttgaggatcccggggtgttacagttggtatcagaagataggctttagattcttggcaatttgaagataaatttgacacactcgcacatataggaagggtatgggtttaaatatctttgatatatgttagtgtctttgaagtgcagatgacaataacctcacccctccctattcctttacggtgatgtggtaagttgtttatggcttaatgcttgatataatttatttctgaaattttaatattgtttgtttaatgctgtagatatcgctggtcatttgtgagaattaagttgttattatgcttgtaatatacaagtatgcctatcttgttttcaccatgtttttcatggttgagttttattacaataatattgttatatatgccttattgaggatgtttctaagaggagtgtgaattgcgtgttttggggtacaaggtaatcatcaatttgaatttaagttgttgagcgattggtggatagctccaactatctttgcaaagaatgattgtttatgttgagaaaccagttctcaaagaaatgaatattggtacttttatatggatttttgggggaagtctttacatagccagaatggcttacatgtctctctcttctatcgtgtgttttagtagccacaaagcctagatgtggtttaaagtggttgcatgttagtcatgctaattgtagaataaatctttgatttttcttgatccattgattatgtattaatacgttgaggatttgatggttctcttcccgatgcatgtttgtggagccattgtcggaccacttatctattggtttgaatgaagtcattgcctagcctagagttggttgtgtgtggttagtcacctattcctagatgatgtggttttaacatcagcttgggatgttttccaaatgtgtgaaggattacggggctagtattgaccttttatgtctggtactcggagtgcatcatatgatagaatgaaatgtaagtttctgaactacagtagatgaagacttatattatgtgtaggttaaccttactagtttggatatttttcttagttgagttgttggatgaagtatagtgacatgggttaagcaagtattgtgttgtcg

SEQ ID NO: 78804 - DNA, 482 bp, Zea Mays
gaaataacgaagccgaaatccatttaattcgttctgattgcatctcgccccgatccaaaactttggataaataacgggtgcaaattcatttgatttcaaagtattcgctaaatcaaaaccgtgacagtgcgtccgagaattataatggagcttcgattctctggtaaatttatcagatttttgaatcgaatcaactgtcgcaattaccgtcgactcttttgctaccgctaaaaatctcgatccaaaaatatatgtggttttcggtaaaaaaaaagagagagaaaataaaaaaaaactaaaaaaaaccttgccagccgttcctatcttcttgccgatccctctctctgattttttttcttttctctttccaccatcgacgacagcttttgtgggcttatctctctgcttccctcgccgtctcctcccttgatcttttctcttgctgccgctcaccgctctgctctgaggaaaaaaaatctttc

SEQ ID NO: 78805 - DNA, 740 bp, Zea Mays
cgcggtcatcagtagggtaaaactaacctgtctcacgacggtctaaacccagctcacgttccctattggtgggtgaacaatccaacacttggtgaattctgcttcacaatgataggaagagccgacatcgaaggatcaaaaagcaacgtcgctatgaacgcttggctgccacaagccagttatccctgtggtaacttttctgacacctctagcttcaaactccgaaggtctaaaggatcgataggccacgctttcacggttcgtattcgtactggaaatcagaatcaaacgagcttttacccttttgttccacacgagatttctgttctcgttgagctcatcttaggacacctgcgttatcttttaacagatgtgccgccccagccaaactccccacctgacaatgtcttccgcccggatcggcccggcgaggccgggccttggagccaaaaggaggggcggtgccccgcttccgacccacggaataagtaaaataacgttaaaagtagtggtatttcacttgcgcccggaggctcccacttatcctacacctctcaagtcatttcacaaagtcggactagagtcaagctcaacagggtcttctttccccgctgattccgccaagcccgttcccttggctgtggtttcgctggatagtagacagggacagtgggaatctcgttaatccattcatgcgcgtcactaattagatgacgaggcatttggctaccttaagagag

SEQ ID NO: 78806 - DNA, 1250 bp, Zea Mays
cttgttacgacttctccttcctctaaatgataaggttcaatggacttctcgcgacgtcgggggcggcgaaccgcccccgtcgccgcgatccgaacacttcaccggaccattcaatcggtaggagcgacgggcggtgtgtacaaagggcagggacgtagtcaacgcgagctgatgactcgcgcttactaggcattcctcgttgaagaccaacaattgcaatgatctatccccatcacgatgaaatttcccaagattacccgggcctgtcggccaaggctatatactcgttggatacatcagtgtagcgcgcgtgcggcccagaacatctaagggcatcacagacctgttattgcctcaaacttccgtggcctaaacggccatagtccctctaagaagctaactacggagggatggctccgcatagctagttagcaggctgaggtctcgttcgttaacggaattaaccagacaaatcgctccaccaactaagaacggccatgcaccaccacccatagaatcaagaaagagctctcagtctgtcaatccttgctatgtctggacctggtaagtttccccgtgttgagtcaaattaagccgcaggctccacgcctggtggtgcccttccgtcaattcctttaagtttcagccttgcgaccatactccccccggaacccaaagactttgatttctcataaggtgccagcggggtcctattagtaacacccgctgatccctggtcggcatcgtttatggttgagactaggacggtatctgatcgtcttcgagcccccaactttcgttcttgattaatgaaaacatccttggcaaatgctttcgcagttgttcgtctttcataaatccaagaatttcacctctgactatgaaatacgaatgcccccgactgtccctattaatcattactccgatcccgaaggccaacacaataggaccggaatcctatgatgttatcccatgctaatgtatccagagcgatggcttgctttgagcactctaatttcttcaaagtaacggcgccggaggcacgacccggccagttaaggccaggagcgcatcgccggcagaagggtcgagccggtcggttctcgccgtgaggcggaccggccggcccggcccaaggtccaactacgagctttttaactgcaacaacttaaatatacgctattggagctggaattaccgcggctgctggcaccagacttgccctccaatggatcctcgttaagggattt

SEQ ID NO: 78807 - DNA, 813 bp, Zea Mays
tttaacgcctcgctgctaggtgttttattcgctatcgcgtagcattatttaggtttgtaatatttccgtcgatatgcattcatgtgcataatgcatttcattcaggaacgttaattaatcgcgcgatgcggaagacaagccaagtcgaccccaagcgcggactgattcgcgaggtgatgcggatgatgaacctgaagatggataatttgaacgagtaccaagacaaaggatgatcgtcaagtgatcgtcgtctaacaaacactaacgtagtgtttattccaggcaagccccggtgcatgcaacccttttccttgtgtttttaaatatttttcgcacacttaagtctagtgaaatgtgcattaggttcataggagttacttgaaaccctttgatgcattgctttccttgatatccatacctttatagatacttctgtgaagtatcaaaattatgatttacaaaaatgcttagctttgcttagatcttgtggatagaggttgtccttaatttaactcgagaaaggatggcttctacctacaagaatattttcatttggagcaatggtgggatcttactgcaaagttccctgtgatgctctttcatcctaaggaacagacacaatcctaaggatggtaatacgtaaattgagacttgggggtaggaacaggtgatgttctacccaggttggttaaggattaacgcgtatgtaggcgtgctgaccgaggaccctttaactggtcacatgcctcgtcatgggtaagccttgcctcgggcagactaaggccagaataagataacacgaaatgggagtgg

SEQ ID NO: 78808 - DNA, 4481 bp, Zea Mays
cccatcagcataaagctgcaaaggcctgatgggtgcgattaagtcagggatcagtccattcgagggactcgatcacgccttgtactactaatacctcttttcaaagtgcttttcgactagttttaaaaggaaaagagataacaagctaaagaaggaagtctccacgaatgaagacaagaagaatacttagatgacaccatctcatatagcaagatctttcaaattggtataacaaatggtacattctatatggtggtaagtattcttaggcataagttaattcattgcaaatttgtcatgccttgaccatgatgtgtaatatactcctcatgagactcttaactgaattgaaagtgcatgtggcaagtcattcaaatacttgatgcacatatctagtgggagaacattatatatcttgtgtcatagagaataagtttcacttgagtaagctatactaagacaatccaaaatggtaaatttgtatctcattcatatggattgtaatctttgttttctaaatagctactcctgaggcagtttaaaattcccttaggccctatttgtttcgttggaattgaattccattttaataattataatttagacaaaactaattaagtttatatatttatatatgtaatatattcgtatattatcttaaatcatacgagagagatagttatatattacattcatgttataacgaagcaagtagaagagtgtgctataagttgtacatcgaaaaaataacatgtaaatctatacaatcagtttccacctctcaccccataaatttaagatagacttatatgataactttggaaagtggtggaatgtcacattcttaaaaaatagtctattccaatagtaagtttccaattcctcaaaatgaaaggaaacaaacggggccttatagttaaatctaaaagtgcataagaatcctttttgttgatatttatgacatacatatgcactaacatggatatgaattttaaactgtaaaaggtacaactagtgatccatactctctaaattttggaaaaccccttattttgatatcttagaaatctaattcagtcggtatccatatgcttcacattgaattggatcactaagttgtaaactccatgcataacttgtctttatgatatgaatgcttgtgcgactaaccttaataagctaggtgcacccaaggtcaagctaggttcatcatcaagaaggcaacacaatgatgtatcaagaaaaggagaaaaggctcctattcttaactctagcttttatctgtgtgattaaatattgacttgaaaccatgtatgatggttgtcaagtatatgtgggtgcctacacaaagagaaaggtcacaataaggattgtgtgggtactcaaggctcttcctactaatctcaaaggacccaattcaaattgggtaccaagatatgaagcttaaacttgttttgcagaatcacgccttcaatggatcaagttgggtgctcgataatgaatgtataaatcatatttggagatagtagcaagggtgataacaactgaatctcaaatgcatattattttcaaatcttatctttttgtgacttgtgtagccactaaggaaaaagaagcatttgaggatatacattagttgttgattatgaaataaaggtctaattggaagttgaatgaatattatcatatggtgaacaatccaaaattatgtgacatattctctatctagttaatttggatttgattcttctatattagacactcaccataatatggattaagtcatccctttagactttattgattaaccatgcatattatccatgtcattcaaaattctgtgcatgagggttcaaggaaatttagtccatattatgatgtttctctattttagcaactcgtttgcccttcacatataaagggttgctaaataagaaactagtgcttgtgctaccaatgccatctcttgtgttgagtttatccatagaaaatctatgttaagagatggtacttgttttaaattgtatagatcacaagcttaaaggattctattcaactaaagtaagaagaagttgataagaggccaagaatgattattcattttccatccacatattccaagtgctttcaagatggaatcaaaatctacggatataagagtcttggttctttcaatcattgagtttcaatgggtctcatatcaagtatgatcgaaccaagcaaagatgaataaagttcaagatcacttggttggatgaaatcataaaagaaaagaaagcacattcattcaagaagggagttacactttttgtcaaccaaataatgaagatgtagtgacatatttatatgatatccttcattatgaggtttgaggttcatcttagcatgctttaccctttaggatttcaattgatatacttttagttcttaaactttcaattggtttgattttcatcatctatgtaaagcatgttatgttaaaccaagatatagcgcaaactttcacctttaacctcgtattgttgatgtgcatgagtgtactttgtgtactcttgcatgcacaaattgaggaagagtttagcctatatcttgtgaggctaatgatttcttcaagttcatgttttgtagtctcacaccttagagaacatcaaatgaggatgagtggttccaaggaaatgatcaaatatttaccacatgtcaccccatggattagttctattagggaacaatatgtgttctctagcataaattcaattgtttcaaatatattatgccttgaccaagatatattatgaactcctctaagaatcttaattgattcaagtgcatgttacaagtaattcgagtacttgatgtatacatttagggggagctcactctatatcttgtgtccttaaagactaacattttcttttagtgaatttgtgtagttttttgaagagaatgggtttctcttgatcatttaaagaggataagtttctctttgaaatgtcaagcctatcaaaagctaagatagaaattcatgattataatgaagaccatatggcatagaacaaaggtgtgtcactccataaactattgtattacatttgtgtatctaggatcttacaagttagtgtatgcatgtatatgcaatatcttaagtcacatcataaggttgcacttgaatcttggcttaaaatattgcataacatatctattagtataccttttgattatgagtaattccttcaattggtacaatttcacattttcatactttatttgtatcaaggttcaaattgtagaacttaatcccctggcctcacaagtccaagttcataaggtaaaacaagtattcatcacttgtatgcacacatttagggggagaatggtctataatttgaatctttgagactaacctcattttaaagtctattatgtgtgtagtctcaaattagaaaggaatcttcaagcaaagacaatcgcttccactgaaaattttgatgggtatcaaagattctttgctccaataaatgtatcttctatacatttcataagagaatgagtttctcttgtatatgctactccaaaatcatctaaaactggtaaacatgtatcatattcttttggattgcaaatgtctaaagtagcatagcttataaattcttctgtctagaacttaattgattaaatagtgcacatgtttcttatgttgcatgattatgttcaattgatactccttttatgccaatggtactttaagttgcaaataagtactctcaacaaatatcaattgaattcatatatatgtgtgcactaaaacttgaggagaacttagtgtaatatgctattagtgatctgcttatctatcaaattgtatcaattggtgtttttcaattgatatttttcgtacatgatcactagttgcataattcatacttgtgcaattttcatgctgcctcttgttatgataagaaaatgccaggtgacatctagactacaggtatcaagatttatctttcaattagtatgacaatattcatttgatatcttggacctatgtcaaaattataccaacaagagcttgcaaaagaattgtaaatccaacacaagtttggaactccccttgaaaaggtaaaatgcaaaggtacatcacttcatgtcacttatccattgcctttgtgccatctaaggaccctcttcatgatagtgtgttcaaatcttgcttaatcacaatttctaccctttatattctttgtatcctttttggagatttatgacaaagggggagaaattttgcattaaagcttacctttagtcttatgtaactaagtgttagaagactttaaaaaggggagaaataattaaaaaaaggaagtcataagaaaaataagatgtggaaatttgatgagtgcatactatgtcatgagcatcacgtttattttatgacacactgcaccctatgaatagtatgatataagttgtctccatactttgac

SEQ ID NO: 78809 - DNA, 1696 bp, Zea Mays
aatggatataatatggtctctatattggtttggatatatggacaagtcctgataaatcactatgcataaatatgatcataatagaggttgaagtgattaagaggattggtcaagacaaagtgaataagatatgaggaatcgtgaattggcttgaccatattactattagtccatatatgaatatatgagaatcaaactagagcttgattgatctaagcagttatatctagatgacattcaagcaaggttcacaatattgaagaaatgattatctcaatggatgctcaataggatgtgactcaagaatggcttgatagggtgaagatagcaaggaaagggcttcgaggaactaagcgaaggtgaaggccaagcgacggcttgtagaccgaggtaccatggctaaggtgaagaagagagtacttgcactaagtcgatgaactaatcagctatgaagagttacaacatgttgatgcatcagtaaggtgacttgaagctatgatttgaactcatatatggtgaaatggcataagtcacaggctcgatttgtgtttgcttcaaaaggtgagacaaagatgtttgtgatccttatgaagcaacatcatggagaaatcacacatgagacaccaattactcaaggagtttacttaattatattttatttaacttgagtataggaatcgtcgtactatcaagggggatccaaaaagaaggttggtgttggtactaaagctcaaaatccttgatctaaaacttccattttaccctggtttcacttcggttttctcaaaatctgtgcaacagttcaaaaaccggttcaaccggacctaaaaccggttcaaccggtttctgcactgttcccctctgtcactgccagttagtcctgtcagaaaaagtcgcgtgcagatttttggaaaaccggttcaaccgaattttgaatccggttcaaccgaatttgaaaccggttcaaccaaattttgaatccggttcaaccgaatttgaaatcggttgaaccgaatttgaaaccggttgaaccgaatttgagtccggtccagtctccggctgagtccgccagtgaaccaaaaaccgactggtggaatccggttcaaccgaatttgaaaccggttcaaccgaatttcagtcagatttccctaacggccaccagcttttggggcacctttatatacacctcccacactcttccccacagcagagcacgcacaaaacttcattcccaacctgagaaacacctcccactctctctcacacacctctggcctctctcatttcaaatctttggagagaaatctttgagtgagtttgagagctgcggtttttgtgcttcatctctaaatctctcttgctcttcttcattcgagctttggtactacatcgagttctttgtggattcattactcttggagcttctagctcctagacgactaggtgtctcttgtgagtctccaaatcttgtggaagaccacaagaaagtttgtattacccgctcgtttgagcaaagattattgtgtgggcttgacctttgtggtcggcaaagggaggattagggttgaaagagacccggctctttgtgggcgcctcaacgaggaagtagggcaccttggtggtgtcgccgaacctcgggataaatcttgtgtctcttgtgttcttgctcattgtgtttgtttgtgttcttcgttct

SEQ ID NO: 78810 - DNA, 827 bp, Zea Mays
tattacgcttagtcgtacgttgataactagtgtttctgtataagatagtttaacgcctcgctgctaggtgttttattcgctatcgcgtagcattatttaggtttgtaatatttccgtcgatatgcattcatgtgcataatgcatttcattcaggaacgttaattaatcgcgcgatgcggaagacaagccaagtcgaccccaagcgcggactgattcgcgaggtgatgcggatgatgaacctgaagatggataatttgaacgaggaccaagacaaaggatgatcgtcaagtgatcgtcgtctaacaaacactaacgtagtgtttattccaggcaagccccggtgcatgcaacccttttccttgtgtttttaaatatttttcgcacacttaagtctagtgaaatgtgcattaggttcataggagttacttgaaaccctttgatgcattgctttccttgatatccatacctttatagatacttctgtgaagtatcaaaattatgatttacaaaaatgcttagctttgcttagatcttgtggatagaggttgtccttaatttaactcgagaaaggatggcttctacctacaagaatattttcatttggagcaatggtgggatcttactgcaaagttccctgtgatgctctttcatcctaaggaacagacacaatcctaagaatggtaatacgtaaattgagacttgggggtaggaacaggtgatgttctacccaggttggttaaggattaacgcgtatgtaggcgtgctgaccgaggaccctttaactggtcacatgcctcgtcatgggtaagccttgcctcgggcagact

SEQ ID NO: 78811 - DNA, 3890 bp, Zea Mays
gtcacttttctacaacctaaagtcaggatgtgaacactatggataaaaatgatgttgtattgatgagatgttgaaattagactagatgcaaatagagtctattaatacttaatatggcgttaaaagattgaaagtaaggactcactttagtaagctacttctgcaaaaatataagttgatttttgctaaagcctctccttgactcctatttatccagcatacccttgagagtcttttctttagtcgggtaagacttgctgagtaattccatactcagggttttattccctgttgtttttcaggttctaactttgtgctgttgttgatggtgttaagtgccggtgggctcggccttcttataagtctaagtaacccttctatacttcttattgaggatggtcacttaagctagcatatatttcaaacttatacttttgtaatcactccgataaaataatataaaatttttgtaacttgtaaaatttggtagtaagatttccgctgcaataatattggtgtgtgtgatttgtgttacttaatcccgcggttctggttgaaagtggtttatccgatgtccttggggcaatcggacagatcctgttaagttatctggtgcacatgcatagctgtctgaggtctttgggacaaggacaggtgcatgtgggcccaataacttggaggttctgccacaggctggtatcggagctggattaagtatatacggtcacatacgtattttcaaaacaaaagttttggttttagaaaacctattttcaactaaacacgttatttggctttgaaaacagttttaaaaaaactataatgctagcgacatcctctattaagccctatactaaggactattaggtggcttatttaaaaaccaataacccacaaccgggggtattgcatacatgtgtattgttatttttaaggccattcagtcttgaatggatcgacgctcaaggtaaggtgagatgtgagagcatgaccgaacaaccgtcggtctaggggagtgcttaaatgtggcgcctgactatatacatgttctacatatgtatatatgaaggctgcgatgtggagtaattattttttcgggaattcagtaccccatggatgtgtatgggtatacagacatgggaatactgagaaatgtaatgtacttgtaacgacgcacctacgctcaggtaagaaggtgagttaccataatgagttgccctatggttaaagtgtggcaacgggcgcctatgcgtggctcggcgcttaatgatgagctggcctccatatagcaatatatggagtataaactgtgataaactgtcatgtgtgacttgcatcattgggaaatgggctgtgatggatttttctgcaggtacactaacctcgaaaacgtatgtgtagctgacgactagcaaaataccgtgagagttgtaagtatgccaccgatatagaacgttattgccacattatgttggcaaaaactcagtaaggacgaataagacgagcatgcatcttgattgttgcattatgtttgtcacctatacacccaaaatgcttctctcatctttattccagtaaccattgattgtagataatatggtgtaatgctgaattatgaacttcgatgaaatagttgtcctccgttccttaggtaatatgtttaggtgttataggtgttgctcttgtgcttgatgtgccaatagactgttggtgacttgtttgcctaaacccaaaactaggccatgttcttatttagtgaaccatgacccaaaacttaaatttttccgttatcactccatgaccaaacacattcaaataaatgcttagataatttcttcgttagacaaaaagggtacataagcttaaaataagaatctggactcatatttccatcttagaccatgcccttgacaattggtacaagctgatgtaccttatccagtttgcctgtttttaaggatcgtcatgtcgcttatcaacctaacttaggaaagtcatacctaatcattttccttcgtttgatgcctttagtttccccatctttctcgaaggcatatcaatttaattttatgattgttttccctctgtgtctaatcagatactaatccttggcttgtaatctctgtgatgggcatagaaatatgcttggggctgaattaacagtctcccatcgtacttgttcatcagtttaggttatggccataccttgttcgtttcatcgggccatgatctatttggtctctacttgtaaccatttttacaggtggagtatttctttgtatatttgcacccttgcccaattcatttgtgtcgtgtgagatttcctattggttgtggttggtaatggcgttatgactaaaaccgatggtgccgtgacgaaaccgagggcctcctgtgaatgtacacacatggttgcgctacttggcacgcgctggtatcacggttagtagttgtaatccattatgagactatgtcaatatgttatcttggcacaatctgtttttgctacgtgagattcattattagtgccagttcggtaatggtgtcacgattaacgacttatggtgccgcagcgaaactgagagccccttgtgaacgtacacgcaaggttatgctgcttggcgcatgctggtatcgaggtctctagtcatgatccattgtggaactacgctgatatgtgatcttccgtggacttctcccttgaaacgatttcaatattgtttgacgaagtgatcaagcaacatctatcatctcaattggatcaaacgggcataccactttcatgtgtggtcttatttcttttgatcttggtagtgactactcatacaagttccctttatgtcctttgtgtaaaggtgaagccttggaactttttagtgttggaaaacagctatttagctctcaaaatggagattgattttccttgctactgaaatacaggagtttgttcattcgctctttcatttaatccatgtattccctaaccaagtctgttcatctcgcatgaagaaacggatgaacaacctgaccaaatggatttctacccaaatgcatgaccttttgctagcaaatgtgaactctcgaccctcgacttaccgatggtattgagaggacttgctcgatgtcaaaagtagtttatcgagttggttttactaacttgtaactgcattgtgaacaaaggttgagcttagagatcgatttgtcgagttatctaaactcactttggttcaaaccattctaagacaagtacttacacagatcaagttgagtcgactaataaccacctaattatcgctctaatcgtgcatcgatcgcctcacgtgtgcttttccagcatgtgcgatcaagtcgaatcatgcctagtgcttgataaaaatggactggttgcaaagtccgcatctacaggtccctttgccaatgatttttcgagtctttatcattttcttagactcggattctctggctaacacgggtcaactgtgatgttgttcgacatccacacccgtcccctgtgctatgaatttcctgtaaccacttgttggtagacctcttctatgtgttttacccaagatggtgcctctgattctggttgggtaaaaactgcacacatggaacattatgtgttcttttggcagatatcgcctctattgtggacatctctaaattggcctaaggcgatacatgatatgtccaataaagaaacaacatcctaagacacttgcctttgcttgaaactgtcttagggttatcgctgatatggatatggggtacatgcttctctacccttagaagtctttcgctccgaatctcgggacgagattcttttaaggggggagggctgtaacaccccaggtgtttatattccgctcgacaacgagtatggacttacg

SEQ ID NO: 78812 - DNA, 121 bp, Zea Mays
gaggatttgatcttttgtattgtgtcttggagtgaatgctagagctcttgtattgaatgtgatgttcagaaaacttggatgcttgaagttgtggtggttgggggtatttatagccctcaac

SEQ ID NO: 78813 - DNA, 259 bp, Zea Mays
agcacacgtacgtatagctgctaaaatcttgctctggatcggagagctttcgctcgagaatgtataactgtatacaccattgacggcaccggtacgtcaacctgtcaataatcactaccggaatcgcgttctttgccgagtgtctaagacactaggcaaagactaatttacactcgggcaaatattttatcggcaaagggttatttgccgaatacttttccggacactcggtaaattaagaatcaaaaaaataaaaaaa

SEQ ID NO: 78814 - DNA, 139 bp, Zea Mays
agaaacgaatgtcacatatttactatataaaaggagttctgtacaaaataaataaatatttatattacatgaagacaacgatccagtaacccaaagctgactgggagacgacgacctagacctctcacgaactcatcac

SEQ ID NO: 78815 - DNA, 199 bp, Zea Mays
atacacttgaaataattagagcacctcacatagactatatttctcactaaagatcacatagaaaatatttttggtctccaaagaaaaaagaaacaaaatagaaaaaaagaaaagaaaggaattagaattagaaaaagaaaaagaaaaactcccccctccctcggctgggccgaattcggcccaaccaaccccgcgcgcc

SEQ ID NO: 78816 - DNA, 973 bp, Zea Mays
ccgcctttatcttcttattgaggatggtcacttgagctagcatatatttcaaaactataaataatttataaccgttcaaagtttctttctttgaatcaatgtagtaatcactctgatcatgtacgaagtaaaatttttgtaacttgtaaaatttggtaataagatttccgctgcaaaatattggtgtgtgtgatttgtattacttaatcccgcggttctggtttgtaagtggtttatccgatgtccttgggcaatcggactgatcctgttaagttatctggtgcacatgcatagctgtctgaggtctttgagacaaggacaggtgcatgtgggcccaataacttgggaggttctgccacagatttggatcatcaccgtcacgagctgcaagtgtcccaggatgaggtcctttgtcttaggcagttggtgtcgagcaaagacttcgtcatcaaggatctgcgtgcctccaaaagatcggtcgtccaggagctagaagctgctcgactgtctaccaaggttgccggagacaattccaccattctgaaggctcagcacgacaaggctatggataaagccattcgcgcggggcagatcttgatgagaagaccgagcgtgattgttcctgatgatatagttgccgatgtcaaagctgctcctgactcctcaagtcgcccttcttcatcggttactcctgagaaaaacattgccaagtagaaatattgaatacattcatgaaccatatgtgtatgtgatcgatgtgcccaaatactctgttagagagtgttcttggtgctgaatgctattcttgtttttctgttgtttgaattcaacagttgttacgattgcagaagtaaaagcagtgtgctggtttcgaaacttcttcctattttgtgaggcatagagatcgccctaagatgagtgatcgtaagcatgtttatactagatcgagtagacgtgagcatgttgcaccgcc

SEQ ID NO: 78817 - DNA, 446 bp, Zea Mays
atcaaactaaggtcggccggtctcgatagagaatttcatgacacagttgctaagattaacacatcaatttttttataattgacaagataaacaagaggcctgcggtaggggaaatgatcccgggatccgggactaccggaatcgcttttttgccgagtgtcattttacactcggcaaacattttatcgataaaggattctttgccgagtattttttttggatactcgacaaatactttgtcgagtgtcgaaaagcactcggcaaattaagaattgaaaaaaaaacaaaaaaaacagcaaaacatttttaaaattatagaaacaactctctccaaaaccactatctatttaccatacccatcgccctaatcatttttcactattattttgaatcaaatttacatattttgtaaatggtgagattcgaactcgtaacctctctctgac

SEQ ID NO: 78818 - DNA, 415 bp, Zea Mays
ctggttgcgatggcgcccgccggcaagccttctgcgcgggccggccgacagcaccagaaacctcagctgggccttgatggactgttgttggttcgacgtgacccgtggcccagagcagtggtttattgtgggcgacgaggttgagattggcccagtactctctccctcagttctgaggccccgagtggatggagttgttaatgttagtagtccgccccgcaaagacaaaaaaaaaaaaaaaaaaaaaaacgaagcatgcgcatttggagcagagtctcaagattacggtgagaagaacgatcaaagattcagtctgcaaccgggcatgcagtcaaagtcatacagatatgtgcattcatgtggtctccagcggtccaggcttgtgcctgcaaccagaaatctggttgcacctacc

SEQ ID NO: 78819 - DNA, 1402 bp, Zea Mays
aaaatatttgcccaagctatttattaatctaacaagcattaacacacttttagctcaccataattaatttggaggtaaaccaaatagaatataaacgacgagtccttaccgcaatcaaataaactcgaaaatccccacaatcgacaacgattatcagattagacgttctatcgaacatttggtgagcaccgacctagaacttcactgccttcaccatcaagtgatttgcattccgaaaaagcgacgcagctgaatccccacgctacgatggttgttgcgcgccgaggcgataaggccgaagttcgacaaaggggccgggagtggatggttttgcagagatcgctgaagtgatgtccagtccatccacgagcaacagcctagcgaaggaggacactgataccgatcgaacagcagggcgtggggcacacgacatgctgttagcttgccgcacgaccgagctataacgacgggtctgagccgcgacaacatgaaccaatggacaacagaggcactggacgagacgagtgcgaccagcgaacaagtaggtacattgatgggctgaacaggtgctgtaggaaaccgagcagcacggcgtggcgaggggtgagctgaggcattggacgagacgagcgcgagatagaaagacgcgcggccagagactcaagcatacgcggtggcgatttggacgaaagcgagctagtagcgagaactcccgaccaggcgacgatgtagacgacgatcgacatgagcaggccccagctgctgcgtgacgagaccgcggtcgcgcccacaagaacaacgatgaatgcaaaacaagcgtgacggaggtccgatgacttggcaattttggaccaagcgagcagagggggagcacatgcttggataggttcgacggtaggcacacgacgaatgagtgggccggtggccagaggaacacgcgccagagatcaagatgatggccggcactgtagatgccatggagttgaccgtcgagcgtaggggaaaggaaactggaggggcagcgttgccagcatccatggccggcctattgaaggagcagaggagagttccatcttccatggcggacgtgcgtggaccttgaacggaggagcagatttggcggccatggagatgaggagtgggaggagatggggctgggcgcgagctgggcgagcaccgctagggagatgggcgcactgtcatgggcgagctggagggagctccggccgggcgctcggccatgaacgggagcaggagagagcgccggcagaggagggagatgagggagagaggggagcacgcgtgagggagccgctcggctgggcacgcgcagggagctccaagacacgtggctggggaagaagccaggtcttcggcggtgggatttttccagggagctgag

SEQ ID NO: 78820 - DNA, 194 bp, Zea Mays
attattttgtgttgggcaattcaatcaccaaaatcatttaggaaaaggtttgaccctatttccctttcagatggtgacaagtcaaaaccgctatctcgtttcgacgtttcattcctcgaaagtcgaaacaaattgtcttcatgaaaaaaaggaaggaaaaaaaccagacaaacggattgctcggttaggttcgg

SEQ ID NO: 78821 - DNA, 1322 bp, Zea Mays
cggaactccatctgcgcgcgtcatccactgctccctggtgccgcgtgcgtgccctggctcggcacccagccgttcttccctgtgcgtgcgagtctccctgcgcgcagctcgcctcagctccctgttcgtccacggcgtgccccgtttcctttgtcttgtcgtcgtcgttcagtcgcctcgccctcgcgttcattatagatgtcgtgacgtcggtcgtcaagatctgctcagccgtcgttctctattgtgctagctatccatcgcgacatcccaaatctgtcacgccatactcgaatctcgccaatcgcatcttggccggtcatcgatttcttatacgccatggtgcaacaccgttgttaaacccggtctccaccccgccatggcgttcatcgtcctctagtcctagttcgacccatccgtgtgttcgctcctcatccatcgggtttcgcgcgtgctcgcgtttgccatcgagtcatcgaacccatcatcccctgctcagccccacctcaccagctcgctccagacataatcttgtcgtccttccgcgagtcatcaagaaatcccaagaatcaggtgaagacgaagcccacagtgtggtgttcaccaagtgcgcgaacaagtcgtcgagcgtcatcctcgtctacgccaagtccccaagccgtgaaaacactctggtgttggccacgcgtcaccagctcgacaaaataaatcccatgggtatctgatcgagaagtgaagttgtgtacatcactcgccagacatgtgtgatcaaagacgtcaaccggaaaccatcgtcgtgcttgcgactatcacgtcaaattagtcaaggtaagttgatccgtattcctgttaactaggtctataaatagagtaaatagaattattggtctcaataaatgttattaatttagcatgcgtatattgtgatgatcgatttagataaatcagtaaatcaagtaattaagatacatagtttaaagagttaataaaaaggtaggaataaaaatagatgttttagtgttattatatcaatttggttaatggatgcagtcgatgccctgctgtgatatccataatgcttactgcttggttttaagtgttttgtcctttttagcgtagattatttgtctcgtactatgtatactcgtgctcatacatgtgcatcgtgcatctcatgaggtacggtaaataatcacgtgatgcggaagacgagccaagtcgaccccaagcgcgggctaacccacaggatgatgctgatggacaaacctgaagataatcgtcaagcggacgtcgtctaacaacactaacctagtgttattcag

SEQ ID NO: 78822 - DNA, 480 bp, Zea Mays
ctcgacgacttgttcgcgcacttggtgaacaccacactgtgggcttcgtcttcacctgattcttgggatttcttgatgactcgcggaacgataacaagattgtgtctagagcgagctggtgaggtgggattgagcaagggatgacgggttcgacgactcgatggcaaacgcaagcacgcgcgaaactcgatggatgaggagcgaacgcatggatgggtcgaactgggactagaggacgacgaacgccatggcggggtggagaccgggtttaacaacggtgttgcaccatgacgtacaataaatcgatgaccgaccaagatgtgattggcgagattcgagtatgccgcgacagatttgggatgtcgcgatggatagctagcacaatagagaatgatggctgagcagaccttgacgaccgacgtcacgacatctataatgaacgcgagggcgaggcgactgaacgacgatgacaagacaaag

SEQ ID NO: 78823 - DNA, 1165 bp, Zea Mays
  misc_feature (1164)..(1165): n is a, c, g, or t
gtttttttgtatttagtttttaacataaaaaaacaaagttgactaattaaagatgacatattgggagcaggcgttagtatcgatctataccgaccgatccaggtcaataccaaccttctgttgcaccagtcgatatctatcgaccaattccggttgtaatgcaaacactaccgaccaataaggatggtcgatttagcaccgatcggtgaggcgaacctacgcgtgcccgaaccatgagagttgatatcacctttgcatagtcgacatggtctcccaccaacaacagtctaagtggagtgtttatggattaggaccttaatttttggaggctcggtgtgcccaatatatgagcgacaattctagagcaacaattgattaccccataaacacaaaatctcaccatcttcaccggtatctagggatggcaaccgggtggggttgtgaggccgcctagttccccgaaacttattttctgtccccgtcccatttagtttaacgggacaaactcatccctatcctcatccccacgaatctcagttccccatttgagaccgtggagaaatactataacacaaaaaaaaatttattgtgtgataacaattataaatatatcaatttttagaagataataagacaaataaatctgaaatagatccttataatacaagttataactcacaagtcacaattattttaacttagtaatagtctcctactcttacaaaccacaatacataaatacacaaagtttttttatcaagttcctgatattaaagcccaatggggtagtttctttctcgtgccccgccccattagctccacggaggaaacgattaaaggggttaaatattttttatttggttttaactaataaaggatttagggcatgtttggtttgtggctaaatgtgtcacactttgcctaaggttagtcgttcgaattgaataactaaccttaggcaaaaaaagttagacaaagtgtggcaattgaggtaggcaaccaaacatgtctttaatttcctcaaatcctcttattccacttctaatccaaccctatgtccgaaggccggaccagtttccacgtggaagttgggctcggactgggccatcatcccacacggagccgatttacaaacaagacagagcggtagtccgtgaaagcttnn

SEQ ID NO: 78824 - DNA, 620 bp, Zea Mays
caacagtttttttaaataaaacaatttctattctcagttttagaaactggattataaaaacaggttgggtggaggtgtttggaactcaatttataataagccagtttctagttttttatacacaattactaacatatatttcctctaattaaaaaaatggtggcaatagatgtaaattctatgaattcgacaaggacatgatgaaattaaacaaacaaaagctggttttagctagagggagtagcttcttggtttttaagaaactgggaataccgtttctataaactgggatatatactgaaatgtttggaaccactctaatttctacaaaccagtttcataaaaaatgaatgcatccaaacaagcccttagaagatgaagatgctacaaaaaaatctcctatctcctcttctataactgtaatttgtaaaagatctcttttagatattagaaacttttggcttagatgtggtttaaagttactcaaatgtacctactttaaatgtttacaacagtctcacaatattattacaaacgaaaaataataaggtcatccataagatgtgaaggactcaatgacataggattttatgactgacacacatgaaacatccatgttt

SEQ ID NO: 78825 - DNA, 580 bp, Zea Mays
cggcatctttttaaggggaaaatgttattagtatgattcttagcatgatgcatgtataattacagaatcaaccttagtcgattcaaccttctatacattgcactcttcctatctggtctttaagatagactcctcagaatacttgggtaagaaaagaatttttaggtaagacttttgaaaattcttttgaagatgcctcataatatctgcaaagaagggctacgctccgataccagctgtgacggaacctcccaagtaactaggcccacctacagttgtccttgtctaacagacatcagacaccctatagatgttcctaagtcacttgacaagctcggtatctttccttacctcaccaggaacgtttcacccgtcttgcagacattacagaacatcggagataaagaaatgcggaagcaattacataatcttacatttatttcaaaagcaagcttgagttattttattacagaccagaactaaaagtgagtgcagagtagtaatattatacaaaccaagggaggcacagactcttcccgataagttataagcaaaagatcctaagtggaggaccgagtcc

SEQ ID NO: 78826 - DNA, 530 bp, Zea Mays
atcaggtggtggtaaaacaatgttcttatgtggttgaatagtttgataatattttacttgctgagatatgtcatctcactcttgcattactcaatgcaggtacttgatacatgttgggaatgaggggagtagcagcacgtccacttacactctcacaataacgctgcccaggcgcagccatgatttaattagaaacttattgtcaaaggaagtttgttttttatatagtcgtgcacactgattaattcagttcaggtcgtacgtttatcttcccttgctagccgattaataatacttagtatgtttttggtcatgatatatgtttataacctgttgcccccttatttatgcaatcttgcaaaggggatgctgccgaaattttatatatggacgtcagaagtgtagttcagtagcattctgggttgtttgtggaacctggggtgttacagttatggttagcactctgctattgccttaacttaatcaatgaacatgatgtaactatttgtgatactgttatcctgatgatg

SEQ ID NO: 78827 - DNA, 333 bp, Zea Mays
gtaagtctaatcagtacgcatcatctgatttggcttttatttcagttcttctgatttggtcatgatttatattcggaatttaatttggaatttgtctaattattcaacaatccaaaaaccttattgtagacaatttcctagtttttcaatggctgcttttgccgacgcgctgaagccagaaaagtttaatggtatgcactttaagagatggcaagtcaaggccacgctctggcttactgctatgaatgtcttccatgttagtaaaggcagacctgagggtccactgactcctgaacaggagaaagagtacgaccatgccaatactatgttcac

SEQ ID NO: 78828 - DNA, 171 bp, Zea Mays
gaaccataaaaaacaagtatattacatttagagttacaagatattacacatattacatttcagaagtttttacaataacacttagtcttccctaagtacaacttacgcagcttcgttcaggagttgattaacaacttgatccatgatagcttcagccatctttttaatttc

SEQ ID NO: 78829 - DNA, 356 bp, Zea Mays
cttctctcctcccttggccgccgcccccctgcccatctcctcctctctccattcttgcagccaccaaaccctagccccccccccaatcccctcctcccaaggtgacaatccttgccgctcggattatcgtcgtcgtggtgcgagtcttcaatcgttttggtggagggaagaagggaggaaggaaagggggagaatccaaggtgatttttgtgttcatcccttgttcatttgcgctgcaatttaattgattagaggttgcgtttgcgattgggtagaggggggctgtccagaattttaggtggtgggtgaacagcagtagtctagcagtttctgtgtttttttcgtgaggaattaag

SEQ ID NO: 78830 - DNA, 220 bp, Zea Mays
cgacgacgaacggcaacggcactagctatgagcgtggagtgctagagagagaggcaaattcgagtaggcaggaatggggaggctctgctgccttttatagagagcaggagggagaagaaaggtcactggcgtcattcaagaggctgtcaatggtgctgctgttactgcacgtaatggagaggaggaatgagggaagttagaaacggtagaaattaatctc

SEQ ID NO: 78831 - DNA, 182 bp, Zea Mays
agataagccatgatgatccagaaggactaaaatcatcaaaatgcaatctaacattgttgtggatactattaacaccacccacatgaactttaaacttttcaaccgcatctttctaattattgtacccaactttggtgaaagattcatatttatcaccctttactagtttcttaaaaagaaag

SEQ ID NO: 78832 - DNA, 430 bp, Zea Mays
cggcactcggctggagccgctgcaggcgcgaggcagggaagagagcaggggaggcgagagaaacgggagaggagagggagagagaagcagaggcgacgacataggagcgtcggcggcggccatgaaagcctggggcgcgcggctggctcctagggttagggagttgggccttatgggcaaaaagcgattaggttagtttttttcttttttttctttttttcttttttttctaaattcgaattatacttttaaataaccctaaaatttatagtaattaaaccaaaagtatttataaataatatagttatttttggactgattatattatttatttactagaatttttatttaagaagagttgttattcaataaccaaaaatcaaacatgcgcgataaaaaaaattattttaaatgcaaatacataacaaac

SEQ ID NO: 78833 - DNA, 199 bp, Zea Mays
cttatataagtatatcccatctttagcttctttattgaggattgtcacttaagctagcatgtattttaaaaacttataaatactttatacattttaaagtgtaattctgttgaatcattttcttttgtaatcactccaataattgtataatgtaaacttattgtaacatgtaattattttgcaataaagaatttatttc

SEQ ID NO: 78834 - DNA, 2496 bp, Zea Mays
atatgtcacaacccaaccaagttatcgggcccacgtacactaatccttgccctcaaggcctcggatagatatgtaagtggatcagataacttactcgaggtgccgagtttcgatgaactcgttcatttccaaggaccattcacgcaaagttgcaaatattacaataaccaatccagaacatagactttaaaaaaaacaggagttgagcggaagtctttacaataagataatatacattaacaagctaataagtttacaaaccacgaagtatttattattacatgcctgaggtagagttaaagtgctaacttattacatcaactgggaagaaaccatcttctcgcagcacacacataatgcacataagtaaaaatcacctttatgagtttaacaaaactcatacgtgttgatagtttctcctgcagcaacaatgggataaaccctgagtatggaaatactcagcaagactgacccgactaaagaaaaagactctcaaggatatgctagttgttgggaatcaaggtaaggcttaccaaatttcaaagactcagttttgcagaaaagcttactagtagtggatccttaagctaaacttttacttcacaagttaagtactttttctgaatctagatttgcctaatctagagcattcacttgtcctatactagcttcattttaacagctttagtttcacttgttatctacgctgaaggtcgaagatccagtcttcatatccgagaagttcggcgatccgaatcgattaatacccagctggggatctccaaccacacgacatatgtagcacttaacccttgcatatgtcaactcacccacgggtttctcaagaccagaacgggttcacgcgacccgagagcacagtaccccaccatccagccacttgccatgtggacacacgttactctcgccatctctccactcccaatgcgtgcgagctgttctggtattggtccggccgaggctaagcttacccatgatgaggcatgtggccagttaaagggtcctagatcagcaggccaacaatcagaacggtccttaatcgacacagacaggcgacctttcctgctcaatgtctggtctcacattacattatttctaaaaacccggtacctgtcagaggtaccctactgaaatgatgaagtcatcaaggcctttaataccttcatcactccagcctccttttctttgtaaaaacatgattcatagatcaaaacattttgttcttaagctatgagcatactaagcacatctagctttttaaaacaggtatcaaggatggtaatcaatagttcaaggaagttatgcaacaaaggtttaatcatttaactcctaccacctaatgcagcatataagtgataatagtttaaaaacagcaaggaggtggcaaatgtaccggggcttgccttggtgaggaggagagtcgggttcttctaccaggatattacagttagcagcaaatccaaatggggcaccttctagaggaccttcactgacaacctcagttggagaaggttccgatggaggaatagactccccttccacttccacttcaaattcttcttcaaggtgctctacaagtcaattcgaagtacatgaatgcttatgtaatgatatgctatgcaaactctcgcttggggagaggtagaaaagtttaaatacttttaactaagcatacagtaattatacacatgattctaggtttcttaatagtggcccaaaattatcaaattaaacttacttcaaacaattagagaactaaatagattaaagtttactaagctagtttctggttctctaagtaaatcaaacctaaacatactcaaatttctaccaggaactaccctaagggtatataacttttctgcaaattttcacaatttttggtgcgctagttttatttctaaaattcatttatacattccagaggcactttcaattacccaaaaatttaattattgctgcaaaaatcctaaaacttggtacgactgatgcctgcaaaacaacagccagggggtctaagttaaaccagtcgacacggacgccatgcttggtggaacggcctacgacaaacccttttgtttctgacccataggaatggtagagcctaaaccgagggcttcacgagcatcacgagtacagatcaaaacaggaatacaatcgaagtgggtataaaatacctgctgggtttctgaccacgacgagagggaatggaagaacacggtggtgaccacagtgagcaatgaactaccagcaacttcaactagaactaaactctgggcagggataatttaggtgccagttgataacggacctgggagtgcaaaaggatatagacgaaaaggacaggggcacggtttctataactaggctcaagagcaccacagttgtatcctcagtataaaagtcatcgtcccacaacaggtctcaagaggtttgtccaaaagagaacgcgaatgtatccaatggtattagtgctcc

SEQ ID NO: 78835 - DNA, 706 bp, Zea Mays
acaacgcctccctcgccgcagccttcagcaccatggcgatgaccccccttcctccgactgggtgatcgactctggtgcctcctaccacaccactcccactgtaggcacactctctcgctcacatccccttcgtccttctcatccctgctcgatcgtcgttggaaacggttccactctgccagtcacctcagtaggtgcctcggttctccctggaccgttctacttcaatgacgttctcgtagcccctcacatcactcataatcttctttctgttcgtcggttcaccaccgacaactcctgttccgttgagtttgacccctctggtttttctgtgaaggatctggtcactaggactccactcgcccgctatgacagctcggagcccctctacacgcttcggtcttccaccaccggagcgtctctgcctcctgtcctggtctccaccacctcctccagcacttggcatcgtcgtctcggacatccaggacctgacgtcatgaccaagattaccagtagcctagatctttcatgtagtaggggacattttgagggcctctgtcatgcttgtcagttaggccgacatattcgtctcccatttactacttcttcttctcgggctgagcaggcttttgacctggttcattgtgatctctggacctcccctgtactcagtcgttctggttataaatactatttggtgattttg

SEQ ID NO: 78836 - DNA, 1175 bp, Zea Mays
ctcctccacgagctccacagtccccttcagcgcgccaccctcgtctactgcgacaacgtcagcgcggtctacctctccaccaaccccgtgtaacatcagcacgaagcacgtggagatcgacctgcacttcgtccgcgagcgtgtcgctgcaggtgacgttcaggttctcagcgtccccaccacgctgcagttcgctgacatcttcaccaagggattaccgtcgagtgtatttttagactttcgatccagtctcaacatctgtacatgatagagttgtaactgcggggggtgttagattgtctgccttgggtttggggtcttccctatgtaattacccttttacccctctgtaatgggataggcccagttactcaagtctattaatacatcacccaaccctgattagaattaaggttttcccacacttaatacaggatgcttatagggacaattatctgtctgagaccagatcctacccaaacaatatgcaacctcaccgtatcatattttttatgatatcataaaaacacatttgacatggcatgagctgtatatgttcctactcaatacatggcattggatctagaacatgttttcaaaattagattttcaatatcccccatgaaccaacacacggcctatatgtacatgtctgctacactaaccagcaaacatatacaaagttgcagtctgcctgtaggctgtagcattttcaattggcctcataacctaggtattcaaacacttagagtgtgtttggttgaatgtacaaggagggatggaatgaggcggtcacgttttctatagtgtttggttgagagtcaaacgggggcgaagtgaacaccggagtgatttttgggggcggcgtgatccaaaaaaaatcgagagaacagtgtcgcccctgactcatccaacttggacctcaaaccaaacagacctgaagccgcatgtaaacacccaaacaacaccccgtgaatttatccactactgactgttgcttcccaccgttctcatgctgcatcgagacatggatgctaatgattaaaccctcatcatcaagcaatcatcccatccagcatctaagcgaaggtcactttccccttccatctcgcccctacctgccatggctcacgagacggaactcacaccatcaagctaggctttgcaccgttgtt

SEQ ID NO: 78837 - DNA, 290 bp, Zea Mays
gaaaattgttttctagaatagtattttgtgtataagagtttcatattaaaaaaacatgtgattaatggataaaataagataataaataaaattgaattatgaatttcatgttatatctttgggtgttgcatataatttaaaatttgagattcagatcaaatttgaatttggaattcaaaactgaaattgaaaggaatcgggaaattagaaaaaagaaaaaagaaaaaagagagtttgttttgcgctaggccgaaagcacctcctcggcccatctgactcacctaccgccg

SEQ ID NO: 78838 - DNA, 457 bp, Zea Mays
tatgtttctaaatgtcacaggtaccctcgtccgaagtacctttggatggattagtcataggcacggaagcatgcttcggaatataactgacaaggagcgtggttctcagttatccgtccgtacaaatatttttttctactggtccctagcgctgacggttctgaaaaacgacagtacaaatgtgttcacaaccacctatatagagcttctctatactaatataaattatccttcggcgtgatttagaggagaaggtttctgttctctaaattaaccaagagaccaacagggctggatcttgtggttcgagctgtttgacatggtcagcagcaatcaccgatatccatgttgttgcgggtcctacaggcaccaaagagtgtcttccagaccaatgcgtctgcttgacaaggcatttcgttgatgaaatctagtgcttcttctacaaggcctgatcgcc

SEQ ID NO: 78839 - DNA, 180 bp, Zea Mays
ggcggcggccagcagggagcgaatgggaggcggcgcggttagggcagggagaggagcacgaccaacttaatgggccttggtggaccgacttagtttagggtttgttttttttctttttttatttctttttttcaatttctttctaatttcaaaatataattttaaataaccctaaaattt

SEQ ID NO: 78840 - DNA, 325 bp, Zea Mays
gaatgggaggcggcgcggttagggcagggagaggagcacggccagcttaatgggccttggtgggccgacttagtttagagtttgttttttttctttttttctttttttcaatttctttctaatttcaaaatataattttaaataaccctaaaatttataataattaaaccaaaattatttttaagtaaaatattaatttttggactaattattatattatttatttggtttttcatttaaggaaaaaatgatattcaatatccaaaatctattatgagtaatcaaaaatcattccaaatgcaaacaaataacaaacacttaaaat

SEQ ID NO: 78841 - DNA, 715 bp, Zea Mays
ataaagtcaatcggagtgcgggagaggtgttctcttgccaagagttgcactaatgattgcaaaattacttgggtgcaactcgaattgatatgagatcaaatgcaagcaagagaacaagagagaggggagaggaagaaccaaatcgcaaagcaaagattaacacaatgaacacgagcgatttgtttcttgaggtttggttccgaagaacctactccccgttgagtccacataggacgggtctctttcaacccttttcttctctcaaacggtcacttagaccaattgagtgtttcttcttaatcacgagggttacttggaccctgcaaggatcaccacacacttagttgtctcttgctagctttagaagtcaatgagaattagacgggagaggaagaaagcacgatcaagaaaaccaagcaagaagagcaataagaaaacagaagatcacactctctctagagtctctccaagacgctaattactgaagattacaaattacaattatgacacttggagtagttttgaggcttttgagtgtggcttgaatgaaagttgtggaagtttggattcccttgaagggggggtggtatttatagccctcaaccaccacctaaccgttgccacctttctgccacacgcggacagtccgcgggcctggtttggacggtccgcccttgcaagatcaacggttggatcgcaacagtcagttacaatg

SEQ ID NO: 78842 - DNA, 737 bp, Zea Mays
ggtcatcagtagggtaaaactaacctgtctcacgacggtctaaacccagctcacgttccctattggtgggtgaacaatccaacacttggtgaattctgcttcacaatgataggaagagccgacatcgaaggatcaaaaagcaacgtcgctatgaacgcttggctgccacaagccagttatccctgtggtaacttttctgacacctctagcttcaaactccgaaggtctaaaggatcgataggccacgctttcacggttcgtattcgtactggaaatcagaatcaaacgagcttttacccttttgttccacacgagatttctgttctcgttgagctcatcttaggacacctgcgttatcttttaacagatgtgccgccccagccaaactccccacctgacaatgtcttccgcccggatcggcccggcgaggccgggccttggagccaaaaggaggggcggtgccccgcttccgacccacggaataagtaaaataacgttaaaagtagtggtatttcacttgcgcccggaggctcccacttatcctacacctctcaagtcatttcacaaagtcggactagagtcaagctcaacagggtcttctttccccgctgattccgccaagcccgttcccttggctgtggtttcgctggatagtagacagggacagtgggaatctcgttaatccattcatgcgcgtcactaattagatgacgaggcatttggctaccttaagagag

SEQ ID NO: 78843 - DNA, 268 bp, Zea Mays
atcatgacaaaaaacatactaattattattaaacggctagcaaagggaagttaaacatacgacatgaactgaattaaccagcgcgcacgactagtaaaaaaacaaacatcctttgatatcaagtttctaattaaatcatggctgcgcctgggcagcgttaatatgagagtgaaagtggacgtgctgctactcccctcattcccaacatatatcaagtacctgcattgagtaatgcaagagtgagatgacacatctcagcaagtaaaat

SEQ ID NO: 78844 - DNA, 116 bp, Zea Mays
ccttgggttcctcctttcctccttccttcctcccgccaattctccaatcggaacttgcacccacacgaagaagatccggcgaggaaggacatcacttggagaggaggagatgggag

SEQ ID NO: 78845 - DNA, 796 bp, Zea Mays
cagcgggtgcgcatgagcagagcgacggcgcggtggcgtcgactccggcgaggttccggcgaggagggagtgagagagggagatcgggcagggagagggagaaggctcagcttccaatttatagagaaaggggagggagagagagagccagggagagggaagaaacagccaacattatcaagcaccattaatgacattcatcaacgaaaggattaatgggagaggagtaacgactccattgaagtgtcttgaacgcagaggaaacggtcggggctgctcggcttctgctgtgctcgcggtcgtcgcgcggtcgggttggggcgctcgctgtgtggtgcaggggctcggtcggcggcttcgcgtcgtggatgcagggcgcgggtggccttgggcgctagtcgctcggcgggtcgagctcggctgctcgaccgcagggcagggcgctgagcagccggttcggcgagcggctgggcgcgcggtgcacggtcccggcgctggacgtcgcacggtcgctggcgcgcggctgcagggcgggtccgagtggcgaggcctggcgcgcgggctcctgggcgagcagctgggcgcgtcggctgcaggggcgcctggcgtccagcggctcggtgacgtcggacgcgcatggaagaagcaggggaggggagagagaatcgagaggagggcgcgggtgacatgcagaggaagaaggccaggggacggccgctggtggggcccgctcggcaggacagggaggaaatccctcccctggcggcggcggctgggagatagagcagggggcggc

SEQ ID NO: 78846 - DNA, 2196 bp, Zea Mays
cgagcccagagcgcgtcgaacacgtggccgttgctttctgcccttgttcttgcgcctgctgagcagccaaacgtgcgaatctcgccctatggcttgtgtaagatttcttccctgcacctagggctacctagttcatgtaagttccaagggaagattgggtctggtttagaagatatggtggcgccaagtcttgtctgtctgcactgttcaacccgagacaaaacaggtgccaactcgtgtcaaacggtcttggcttgggttcaaactcttccagggggttctttagataatttggctcctttttgttatttagaccctggggttttggtgccattagctaggtgaacacccctgatctctagattagggctgattttggacttagagggaatgggggtgatttcataatgttctccacctggggctgatttaggggtcttataggggtctttttgtaaagttcctttactgtcttttgtaaacattttggtactcttaaactttgattaaggtttaatttatgaaatgtgcatttgcctaatctttctctcaactaaaggcttcaagagaggggggtccaaggttcaatcctcccttgccctaggtggtcattgcctaaaagcttgggtaacactttggtcctaggcattacttaactcactcatgcttccaaggtcttaagtactccctctcctccaaattttaaccacatgtgataataggtatgtgtgccatcaggaagccaacaccttggtaacacctggggtgttacataaataaccccacaaacccagggcaacgaaaggctatcttagatacatcctctccggccataaaaatctggttataccctgcattaccatccaaaaaactaataattttattccccgaagcctgattaacaagttcatccgctataggcatcggatattcatctttcggggtggctctgttcaaatctctaaaatccacacaaatcctgatcttccccgtgttcttcttctcaattggcactatattggagacccactccgcatacctgcatggccttatgaaatttgctttcaacagcctatcaacttcttccttaactctgtcatggatgtcgtggttaaatcgtctaggtggctgcttgtgtggcctaaacccatgcttaattggtagcctatgctcaaccaactccctactcagccctggcatctcagtataatcccatgcaaaacagtctctaaattctctaagtaaatcacataccttttgcctctgaccggctattaatttagcacttacaaatgttggtcttggcacctttccgtctccaatgtccacttcctctagttcatcaacagatgagaacccctgtcctaactttccaagatcatcaaaatcatccaccacctctcccatatcgtttttgtttaaacgatattcatctgtcctctcctgtaaccattttaaactatcgtgttcattcatttataatgttgagtcattgagccgtgctatgtcagccggtgttgggggccttcggcttccgaaggtcctcaaaaacatgatttgacaatgttttccaagagaaatatgtaaacaggtaccttcgaagttagattgcgagtatacaaaagcacggttaaagacgaagcttgaccgggacgaaaggcgatcacgacgaaggaaaagatgatcacgaagctatgtgcagaaaagcttcggcataaaggcagaaaaggggaaccgacctaaagatgaaaagtcaaattagacctcgaagaattactatagagttattgttaaatgtaatgggtattaatgtaattttgcatgggctgcgacccgtgcctataaatatgtgaacagtattcccgtactgttcacgctgacttggcactttgcttttgcatcacacctgtattcacattccttcaagccgaaggtatatttgtaatttaccattatttacatgagtaatataagtagaaaataaattaataataatgtttacagagattatgttatttcttatattctttgtttaaatattctttatcttttgttatgttcatgaaggtttgtccttcatgaccttcgtccgaaatccattatatccgaaggataataatgattcaaaggacgaagggttttgatatttaacatcttgtgttgccttgttcttgattcatagcatttgagaacgag

SEQ ID NO: 78847 - DNA, 50 bp, Zea Mays
aaaaaaaaaaaaaaaaaaaaaaaaaaaaaaaaaaaaaaaaaaaatcgcca

SEQ ID NO: 78848 - DNA, 159 bp, Zea Mays
gcctgtctctcattcggggattctagtgccggctactctcatcggggccacttggagcaggcggcattcgctccgtactgctgctgatttggtgagcgcggggagccgcgggatgggagatctggtggaggtggcggctgtggcatgatggtgagcccg

SEQ ID NO: 78849 - DNA, 381 bp, Zea Mays
ctgaatctgatactgatgcaaccatagaaattgaagatgtccccacggcgggtgcgtggaggatggtggcgtggtgattgtatcgcatatggtacccctttctctttctttaatagtagtcgtggcgtggtggcaaggatggaaggtagatcccgggcgcggggaagagaatggaaggggaatatagatggaatgcgaggaccggcatttggaacgcgggttgggggcgcaaattttggggggatcctgtggaaggcgagatcggcgtggtggcgaggattgaaggtagcgcggggtcaagggtggggccgaaccgatggcgaggaagtagcgattgccatctgaagatccactggtccaaggatggaaggtcgtgcattc

SEQ ID NO: 78850 - DNA, 1609 bp, Zea Mays
ttccaaatgtttttacaatagcatttaatcttccctaagaactacttctgcagcttcgttcagtagctgatcgacaactttgtccatgatggctttgaccatttttctaatttcgtagccccccttcgggtgggggcccggagatgcctcagcaggttctgagggaggagaagatacgactatattactattacaaaccgcgaacaaagtttgaaataaaaaattacaacagaataaaaaccactagttaatacctatttgcccttcgagctctgcgcttttctcagcagcctctgttaccttcctagcatcatggatgcctttttcgcttttctgaatgatttcttgagccatttctcggccgccattgtcccagatgtcggtgaaaaactttccaccaaccaggcttgcttcggccgaggggtcctttatatcttcggaagacaaggcagtttcggattgcgctaaagatttcacatgatcacaaccttttctttccaaaacagtagcaatccccctggcgcctgaaaaagcacatatgtctccgcggctattcaagatttccttgaaggcctcagcttcgtgactgatccattcaatcgggccttctggattcccccttgtgaaattttcttcgctagagaatgcgccaacgctagcgaagctggattttatcttcgtaacacactctatggatttatcatagcaccttttcttggaagcacgaagctcttcaacatttatttccaaatgacttgcccattgttcactaagttctcgttttgtttcttcaagtatgcgttcttctttagctctggccagctgtttccgaagatcctgaatttcgcgtttttgggcttcagcttgagccttagaggtagcttcgtcttcctttattttgtccaccagtgtaagcagaaatttatctttttccaaagcttcgtttctcagcttaataacctctgttcgtaggttgttgaaagcaatattatagctctcgtcttcggcattcttttgcgctctcaaagccttgctcagtattaaaccctatatgaaaaaaagaattagtataagaataaaagaatgattcaaaaattgcaaatttccaaatatacaattctcataccttcagactattatatgcaaggctatccgcaagatcatccttcgacatagcgcagagcccagctccaagcttcgggaaccccatacttctagccatctcccggcagacagataattctttgttgtctgggaggcagtataagaagtcatcttcatctgtgccgttgaatactaaggccccttttggatacttcagttctcgggcatagtgattagcttcaaaaatttcttcttcagataatttcttccccgaagcatgtcgtacaatataatcatgtattttggaagatgcttcgggggtagcagtgccagtttcttcgctaaaaatttgttctgctatttctgttttttcggtttccaaggatttcatcttggcgagctctgaaggcccggcttcagtgtaacgccccgaattttgcagttgaattttttttcttttctttactcgccaaattcgggcgttaccttttctttttctttttcc

SEQ ID NO: 78851 - DNA, 257 bp, Zea Mays
atcaaagtcgtgctgactgtaggaccgctaacctagagtagaatggtcgctctaaggactacagacctctgtctctgccttgactttgatatcccttcaaaagttggtcctaccgaccaaacctatgttctactatacattataccttgatgaaaatcatgttttattctaatccttcattcactcatgattcattatttgccggtcctattaattctgttctcacccttttgcttgcgatgtcttttgtagatggc

SEQ ID NO: 78852 - DNA, 562 bp, Zea Mays
atattatgtaactactgtgtacgtgaataactgatcctggcacgtacatggttcgcattcggtttgccttctaaaaccgggggtgacattcagtttcagactgtggctttgaagcttcggcgtcaaaggtttcagtgtgcacttcggaagttttagcaattttctttggagttgtgcttgaagatttaattgtctctaaaacatctagcacattaaccatcctttttcttttaggggtcactgctagactgtaacgctctgaatttgggggtagaattttttcttcttttctctcaccaaattcaggcgttactctttcctttttcccttttcttctcgctaagccttgatcttttccaaaagttatagcgaggattagctcgacatcttgtgtaagcaaaacctagaactatttttggttgttgcatcatgccaaataatgcactcttttgtttgtggctgagtgaattgaagaattagacatataagaaaaaatatggaaattagaaaaagaaaagccttttctttctctctccccccctccttctcccttttggcccag

SEQ ID NO: 78853 - DNA, 574 bp, Zea Mays
cggcaacccccagttggctgcctgtgaaggccgcgtttatctacgtttcttttccgcactttgatttattgtaaggactatatggacgtctcagacgtatgatgtaatcgactattatttccctttttaatactattttgagcactgtgtgatgatgtccatgttatgtaactgctgtgtacgtgaattactgatcctggcacgtacatggtttgcatgcggtttgccttctaaaaccgggtgtgacataagtggtatcaaagccatgctgactgtaggaccgctaacctagaatagaatggtcgttttaaggattatagacctctgtccctgccttgactctgatatcccttcaaaagttggtcataccgaccaaacctatgttctactatatgttataccttgctgaaaattatgtttatttctaatccttcatttatttatggttcattacttgctagtcatattaattctgttctcactcttttgcttgcggtgtcttttgtagatggctcgtcttagacacaccgcacgaaagttcgtcatccccttcttaccctcccgccttgctgag

SEQ ID NO: 78854 - DNA, 2085 bp, Zea Mays
agctgtgaagcagacccaattgagagtatcaaggttgtgtccgagttcccagatgtgtttccaaaggacttaccgggtatgccaccagagcggaaagttgagtttgccatagagcttcttcctggaaccgcccctatctttaagagagcttatagaatatccggaccagagttggttgaacttaagaagcagattgatgagctgtcagagaaaggttacatccggccaagcacctcgccttgggtcgctgttgtcttgtttgtggagaagaaagatggcaccaaaaggatgtgtatcgattatcgagctttgaatgaagtcacgatcaagaacaagtaccctttgcccaggatagaagatctgttcgaccagttgagaggagccagtgtgttctccaagattgatctgaggtcaggttatcatcagctcaggatccgaccttcggacattccgaagacggcattcattaccatgtatgggttgtatgagttcacagtgatgtcttttggtttgaccaatgcaccagccttcttcatgaacttgatgaacagtgtattcatggattacctcgacaagtttgtggtggtattcattgatgacattctggtttattctcaaagcgaagaagagcatgcagatcatttgaggatggtattgcagagattgcgagagcaccaattgtatgcaaagttgagcaagtgtgaattctggatcaatgaagtcatgttcttgggtcacataatcaacaaagaaggattggctgtggatccgaagaaagtggcagacattctgaactggaaagcgccaacagatgctcgaggaatcaagagtttcattggaatggccagatattatcggcgattcattgaagggttttcgaagattgcgaaaccaatgacagcgttgctaggcaacaaagttgagttcaagtggacctagaaatgtcaagaggccttcgaagcgctaaaacagaagttgaaacagcgcctgtcctagtcttgcctgatgtgcacaagcccttctcggtgtattgtgatgcttgttacactggtttgggatgtgtgctgatgcaagagggaagagttgtggcttactcgtcccgacagctgaaggttcatgagaagaattacccaatccatgacctagagttggcagcagtggttcatgcactgaagacatggaggcactacctgtatggacagaaatgcgacatttacacagaccacaagagtctgaagtacatattcactcagtcagagttgaacatgaggcagcgaatgtggcagaacctccaagttattgggcccacatgcacttgtccttgtcccaaagacctcagacggccatgcatgtgcaccagataacttaacaggatctgtccgattgccccaaggacatcggataaaccacttacaaccagaaccgcgggattaagtaacaccaatcacacacacaccatttttgcagcggaaaacttattaccaaattttacaggttacaaaaattttacaatattttatcggagtgattacaagagtataagtttgaaatatatgctagctcaaatgaccatcctcagtaagaagataaagacggggtatgtttatataagaaggccgagcccaccggcacttaacaccatcacaacaacacaaagttatatcctgaaaaacaatagggaataaaaccctgagtatggaattactcagcaagtcttacccgactaaggaaaagactctcaagggtatgctggatttgggaatcaaggagaggctttagcaaaaatcaacttagatacttttgcagaaatagcttactaaagtgagtccttactttcaacattttaatgccagattaagtattaatagactctgtttgcatatggtctactttcaccatctcatcaatacaacatcatttttattcataatgttcacatcctgacttaggttgcaggtcagtgaccaagtcttcataaccgcgaaggtacggcgatccgaatcgattattgtcggggaccataattaggggtaccctcaagacgcctaattctcagctggtaacccccatcagcataaagctgca

SEQ ID NO: 78855 - DNA, 316 bp, Zea Mays
ctgatggacatcgccaccaagttcgcctccggccaggaggcggacgaggctatcttccgaaaggacaagcagccccagggccgcccgtcggaagaagctcccgagacgtctgctccgcgcggtgccaagaagaaaggcaagaagaagtcgcaatcgaaacgcgacgccgcagatgcggaccttgtcgccaccgccgagtataagaaccctcggaagccccccggaggtgcaaacctcttcgacaagatgctcaaggagccgtgcccctaccatcaggggcccgtcaagcacaccctcgaggagtgtgttatgcttc

SEQ ID NO: 78856 - DNA, 88 bp, Zea Mays
ctgctacgtcaccatgccgttcggcctgaggaatgcaggcgcgatgtaccagcggtgcatgaaccatgtgttcggcgaacacatcggt

SEQ ID NO: 78857 - DNA, 202 bp, Zea Mays
cacaagttcaaaagctgctgtatgctgtgatcctgacgaggcggaagctacgacactacttcgagtcccatcccgtgactgtggtgtcatccttccccctgggggagatcatccagtgccgagaggcctcgggcaggatcgcaaagtggggcagtggagatcatgggcgaaacgatctcgttcgcccctcggaaggccatca

SEQ ID NO: 78858 - DNA, 590 bp, Zea Mays
ccttcaagctttctcgactaaatcggggacagggcctcatggacgggtgaaagtacgcgtaagcggcaaggccgaccgagccgagggattcccacgcctctgggatacggctacctcactcgtcccttccgcgaaaagcaactctcgctcacacaaacatccctattaccgacagagtctagatgctcgaaacaagaggaaaaaaggacgcagcttcgcaagcgcggcgagggcgtgttcttctggcctcggcggccgcagaaagcgcacgctacaagatgatctgatcctgcaggctcgggtcttcacgccgaagggagccgtagcaccctcggcatcgacgacgtctacagcaaagcccgacccagcctcgggcggcggcgaggtccaggggctcctccaggaatccggcccgagcaggcggctcaaccggttacccctgggggcctcgggcaaccggcttccaagggcgctagcccgatccgaggcctcgactgaccgacttgggcgtcggcaccgctgacgggcgacacggctaggctccggccaaccaggttccccattctcgagccaactccgcctctgttcat

SEQ ID NO: 78859 - DNA, 328 bp, Zea Mays
tgcgaagcctatgccacgactcgaggcgacccaacagcgccagactggcacgtcggtcaaagcgaccgaaagtgggctggcagtaataacggctcgcacacgcgtagcggccgccccgccaaccactcgccccgtcgcattaactccgcggcgggacacgcggcgcttctggcaggaggagcgcgcgacgcttcaccttcgccttaataaccgcgtcagaaaaggtacgccacgtcgtctgatttcgtatccttttccgttttcctctttctctatctctcgcaacagggaccggggaagggggataccccgagagggatccttctcc

SEQ ID NO: 78860 - DNA, 365 bp, Zea Mays
ggcaatgatggcgctccacgagctctatgacgacggcggcccccagctctcttacggcagcaggacaacgtcagcagggactcgaccgctccaatagctgtccctccatcaggctccgccgcacctccgatagccacgacatcacgccagcaggatgcccagatctctccggctgccacatcggcatgtacctagggcactagctctccctccgctagacacatagcactctgctacatccccattgtacacctgggtcctctccttacgactataaaaggaaggaccagggccttctcagagaaggttggccgcgcgggaccgaggacaggacaggcgctctcttggggccgctcgcttccctc

SEQ ID NO: 78861 - DNA, 599 bp, Zea Mays
gcacgacccgccaggagccgccagccgcgacgccgcgatgccacggcgtgacgcgagcccgaccgccgcgacgactcgagcgagcagtgcgttgtccacccgcgtgacgcgtccgtttcttgcgttatggacttcattccctccgtttctcctccccattcctcacaccgttaatgccttgaagaaactgacgtagtgatggccatgaaggcagcagcgccccattcaagctccctggcagactctcccctccctctctctataaaagggaacagcagagcctctccattcctgcctactcgaatttgcctctctctctctagcactcctcgctcatcgctagtgtgttgccgttcgtcgccggagtgtgccgttcgtcgccggagttcaccggagccgcgtactagctgcccgtagtcgagcctcgctctccgtccggccgaaacccgtcgatccgtccccgtcacacacacgaacccgaggttgttggcgacccaaatttattttatgtattttataaagtgctttcgattcgattcatgtgttgtatagttcgtttgttgtaatatgaacacatgtgattccaatttatgtatttg

SEQ ID NO: 78862 - DNA, 497 bp, Zea Mays
atagagttcaacatcgagtaaaaaactacctcaacgacctcaacggtgaactgttttgcctactctaaacgtagggagagagctgggaacgtcatttccaaagtgcatacacactgtcgcccgtggccccggcccgcccagattagaggagagaaagtcattgggtaggaaaagaaataataaaatatatggttgtttgtgtagagttgagatatagagtaaataagactgcagatgattgtggtatagagtaaagaattttactggtagggataaaatattttctttttgtggtagaaatttagagtagtataagtgcggatagcctgaaagcaaattcagaactgcagtagaaaagataggttgcacgtgcagcataagtcccaaaatctagtcacttatgtttattatgttctttccttaaaaaataaagaagtgtgttctcaagtttttgaagaagtgatgcatcattcttttagggcatgtttgtttgcagg

SEQ ID NO: 78863 - DNA, 916 bp, Zea Mays
caggccccgccctgcgcgagcagcgcgctgccgcgccagcccaccgcgatgccgagcgcgcccgacgaccaaacgccgcgaaccgtcgtccgtttcttgcttcatggcgatttatttcatccgtttcttattcctattatttctccattagtaactgacgtattgacggcatttgaagcctgcggcaccccatgacctccctggcagactcttcttctcccctccttctctctataaatggggacagcagagctctctcttctctcctgcctacccaagcgccccatctctctagctcaccattgcactgttcgacgccgccgttcgacgccgccgttcgtcgccggagttcgctgctcgttgccggagcccgtggagttcgccggagtgtgccgtcgtcgccggagttcaccggagccgcgtactagttgtccgtagtcgagccccgctctccgtcgatccgtccccgtcacacgcacgaacccgaggttgatgacgacccaagtttattttatgtattttataaagcgcttttgattcgattcatgtgttgtatagtttgtttgttgtaatatgaacacatgtgattccgatttatgtatttgtgtgcgctacggaatttgttagaaatatgcgtgcatcgtgttatttcatgtaatcgacgcgttgaattttggtttagagaaatatgacgtagatttaatagtcacacgtcggtgataaaaatactagataagaatttatagttaaaattggtcgcgataaatttttgaaactaattggagaattataggtgcattttttatggattagaaaaatggtatagaattcatgtcatatgaataaaataggattgttagatgatttatccgattatttaattaatatcttcttttggaaagaaaagagaaaatat

SEQ ID NO: 78864 - DNA, 1345 bp, Zea Mays
atttcttatcggatgtttaaatatcaacccatttttaaaaaaaaaagtactagtaattaaataataattaagtattatagtaattattagtctaaaaataagtacttcatttataaatatttttggtaattttttatgatttttagagttctttaaaaatgaatttcggaatttaaaaaaaaaagaaaaaaaaaacctaaaactactccaaaccggccggcccactaggggcccatgatctaaccctaaaatccctgtgcgcgcgccctggctggcttcacagccgccgccgccaggctactactccctctcctatctctcttctctctctccctcacgtctctctccctcacgtctctctctcccttcattttctctctcccttgcttctctcacgcacgtgccctggccaacgcacgcgacgccccaccgcgacgccgcacaggccccgccctgcgcgagcagcgcgctgccgcgccagcccaccgcgatgccgagcgcgcccgacgaccaaacgccgcgaaccatcgtccgtttcttgcttcatggcgatttatttcatccgtttcttattcctattatttctccattagtaaccgacgtattgacggcatttgaagcctgcggcaccccatgacctccctggcagactcttcttctcccctccttctctctataaatggggacagcagagctctctcttctctcctgcctacccaagcgccccatctctctagctcaccattgcactgttcgacgccgccgttcgtcgccggagttcgctgctcgttgccggagcccgtggagttcgccggagtgtgccgtcgtcgccggagttcaccggagccgcgtactagctgtccgtagtcgagccccgctctccgtcgatccgtccccgtcacacgcacgaacccgaggttgatgacgacccaagtttattttatgtattttataaagcgcttttaattcgattcatgtgttgtatagtttgtttgttgtaatatgaacacatgtgattccgatttatgtatttgtgtgcgctacggaatttgttagaaatatgcgtgcatcgtgttatttcatataatcgacgcgttgaattttggtttagagaaatatgacgtagatttaatagtcacacgtcggtgataaaaatactagataagaatttatagttaaaattggtcgcgataaatttttgaaactaattggagaattataggtgcattttttatggattagaaaaatggtatagaattcatgtcatatgaataaaataggattgttagatgatttatccgattatttaattaatatcttcttttggaaagaaaagagaaaatat

SEQ ID NO: 78865 - DNA, 420 bp, Zea Mays
cgatgatgtacgtcgtctacaacaacattggcacagctaagctagcttggtggcgctacaactgtagcggtacggtaggccgttgttgacaccactgacatgccatgccatgcatcctgtcgtccccggcgcactgacgcgacccgtcaggtcatacatacatacatcggaatggcgggctacttcaacttcaacggtgccatgatcgtgcagcagtggtcgcacgtacgcgatcttttcctttttttttttttttgctttatggttttggccaaaactctaatcaaatcccaaaagatcctcagtgtaatctggtcgtacccgtccatttgatttgttgccttggcgctcattcgctgctgccactttgcaatttggccgtccgctcaagtacggaggcttgctggttactactggctg

SEQ ID NO: 78866 - DNA, 499 bp, Zea Mays
agtctttgctttatatagtagagagaaccattgctatggagtaaatattcatattcattgttattaagattggagtttctactgaatttgcatggcagattgtctcactgttggcgtccagatatatcaaagtggtctgtattttttgtgttgactgtgcaagatatgtgctactttgcgtagacgggactggtggtgggcagtcgcattgcatctgttcggactgttgcaatccatactccatatagacaaaatactgtagaggtcgtagcaagctgcagcgaacatgctctttctaactgtattctgttatgttctgaaaatcatactacctctgcaagtaatgtaattaatctggggcacattgatagacctgatttgcttaatatttgatgaaagatgcaaattggcacaggtttgcagcaggacttgctttcttgcaatattgtgctttgctaggttttggttacgctgggattggacagcatctgaattggag

SEQ ID NO: 78867 - DNA, 292 bp, Zea Mays
gacgggaataataaattaacttaccataattaactcgagctgaagttgtgaggtcaacgacgattctatggacgagcactcgaatttgaagggcaatacgacaaaattattggaacggcggagtcgacgacgtgattagaatcaaggccaagcgaagaaaattcgcgcgcgcgacagagacgaagggagaaccgccgcgagctggagagccagcgagctgctcggcatgggaaataagggcgcgcgcggcaccggagagaggaacgcatgtcggcgagcagagcagacgcgc

SEQ ID NO: 78868 - DNA, 548 bp, Zea Mays
ggcatggccccgtccggccgtgggcgtccccggcgtgggcacgggcccagcagcctcggtggcaccggcgtgtccctgtcagccccagcggtgcgggcgcgaggcttctctggcgggcagcgctaccatcgtctgtccgttagattgcagcacacatgtgtgcaagaacagcgccatcaccgatgagaaccgatagatacaagatgattttgttgccaccaaatataacaaaacgagtaagcataaatcggtaccatttttaatctttgttgtgtccaacgcaagtgagtgtcagagcaatgcattcatgcatgatttaggccatgctcttctgacttggggacagtatccaatgcggttggccattgttgatgcgacgcgaggcaatcatccatcatcatgattaaggctagaaaattacctctgcagcatcatgtcgctgagaactgctctagcgactgcgtagtttcgttctcttctgccgattaactcagtggagaatctcgtgctgataacgtgttgaagtatactcagtggtaacgagattg

SEQ ID NO: 78869 - DNA, 281 bp, Zea Mays
gctcaagcccgtcttcgaagcgtgctagcccgacccaagcccgctttcaggccgtgctagcccgacccatattatttcatgccggaccgtgctttgagttcttatttttggaccgtgctcgtgctggtccgaaaaacccgacccatattcccagactagtccggaccttcgagcaccacaactgcacaagcgccgcgcctcctccgatccttcctccccgtggtcccgccgcgcgtccctcctcctccacctcgcggtcgcgatcgcggggccggttattt

SEQ ID NO: 78870 - DNA, 500 bp, Zea Mays
catgcttgatcccctcatcctcaagaaatccttctatttgagagttcttgaactccgtcccattatcgcttcttatcttttttatccttaatccaaacttattttgagctcgtctcaagaatccttttaggatatcttgggtctgagattttcctacaagaataacacccaagtgaagagagaataatcatccataataactagacagtacttactcccgccgatggttatgtaagcgatcaggccgaatagatccatgtggagtagctcgagcggcctgtcagtagtcatgatgttcttgtgtggatggtggactccaacttgcttccctgcttgacatgcgctacaaatcctgtctttctcaaaatgaacatttgttagtcctaaaatttgttctccctttagaatcttgtgaagattcttcattccaacatgggctagtcggcgatgccagagccaacccatattagtattagcaattaagcaagtgttaagttcag

SEQ ID NO: 78871 - DNA, 403 bp, Zea Mays
agacaagggtgtgagagaaaggatgaagtcatagaagagccagtggcatgattacaatgaagaatggagttatgtcaaggcttacatggggtaaagaagaggatattgccaagggtaggataagtaagacaccgccctcaaactgggataggatattggagattttagagaacggacatagtgtaattaccaaggtaaggtcgagagatgagaaaagtaaagataatacccaaccagagtacaaggatggagttgaaagctcgcaagcgacaaggaagaggatacaaccaagggaaaactaggtaaagtacaatgctcagattgagatagtaaagaggatattttaaagactggtataagataaacatcaaggtaagatatagaggtgataaggatgaaggtg

SEQ ID NO: 78872 - DNA, 266 bp, Zea Mays
cgctgggctgcagcgccgcctggggcaggagccaggtggacacggggcagttctggctaatcgacgcctgcaaccaacgggagaaaaagatgtgggagagaaatatggactgtataggagaagataggaaaggtgcaggtcgacgggcggttggacgaggaagagaaacagtagctgataatgttgactggcaagtgggacccggtgcaggcgcgcatccgcgcggtttgcaggacgtgggcgtggcttgaagcggggcatgcgca

SEQ ID NO: 78873 - DNA, 358 bp, Zea Mays
caagaatggagactgtcagggtactattggcagtcgtagcacatcatgggtggccaatccatcacatggatgtgaaatcagtgttcttgaatggtgatttggctgaggaggtatatgtcacacaacctcctgggttcactgcaaaaggggaggaaggcaaggttctaaaattgcacaaagctctgtacggactgcgacaggctcctcgagcttggaatgtgaagctagacaaaagtttaggcaaacttggtttcacaagatgcaagactgatcatgcactatatactagaaagaaaggtggtcagagagttgttgttggagtatatgtagatgatttgttaattataggggaatcaga

SEQ ID NO: 78874 - DNA, 803 bp, Zea Mays
ccttgcaatatgtggatgtggcagccttgattattatcgaaagtgagaagcaaacattcagacttaaacatattatccagttgaaagcatgaacaatatgaacgaaagaacaggtaaaatgataaatgatgtcgtttactgtgtgctaaatttactctaaatgtactcagtgttcagttgctgtcttgccaaatatctgatgagtcagattttgctattttggtcagcacctcctttggaaaatcggacagaatgttgctcaacatattgaagcctttactttaaataatatatcctaatattttcatgtaaggcagcaaaaaactagtggttcaaattaagtctcataagaacatttcaacatgagtttcagacagcaccaaatgtccaaccaagctaataaaaacatatataggtctatgtaaacttgttaaatttactacttgagatcagtttcattatggtaacttaataaataatcaatattatttagccatgctaaatgtttaagtcctagttttggaattttacgtgtgacagtaagaaaacatcaagtaacctgacggaaaaaaaacttcaggtgagtttgtacaagaattcacatgacttctaatactagcgcatatatggcaactttaggcccaggtcccagctatcaagatttcaaaagtaaaactatgaaccaaggaatgcatcgttgaagcccaggtccagttttttttaaagactcaatttcaaaaataaaaatatctatatagtatcggctatagctattaatttttatgtctatgtccatatttaaa

SEQ ID NO: 78875 - DNA, 73 bp, Zea Mays
tctattgatgacacgaaggatccctcggccgaagcaagcttagttggcgaaaaattctttactgacgtttggg

SEQ ID NO: 78876 - DNA, 310 bp, Zea Mays
atctctactacttattaaggctgtaagggtagcctgccgttctgccactgcctccctcccgcgcggcaaaaatatgtggcaagcaggaattgaactgtgaccgattcgctagaggagcccacgcttaaccaacccaactacggttgttttgtgttacatgtggtcgtttatttgttttatagccgaacgttgtttctctcccaagtctccttttgactctcacgcgcacaacaacgactccaaagaaaccgcacagcgacgacgaagcctctactacttgtctattacttgtctcactaccatctcagta

SEQ ID NO: 78877 - DNA, 492 bp, Zea Mays
cccacttctctccccccttggccgccgcccccctgcccatctcctcctctctccattcttgcagccaccaaaccctagccccccccccaatcccctcctcccaaggtgacaatccttgccgctcggatcatcgtcgtcgtggtgcgagtcttcaatcgttttggtggagggaagaagggaggaaggaaagggggagaatccaaggtgatttttgtgttcatcccttgttcatttgcgctgcaatttaattgattagaggttgcgtttgcgattgggtagaggggggctgtccagaattttaggtggtgggtgaacagcagtagtctagcagtttctgtgtttttttcgtgaggaattaagggaaatcagtttggggatcatgtagaactttaccttacctttccaacgagtatttatgcgctcaatttggagttataaattgaaagttatcaccgtttgaatccgggtatgtggctgtccaaagaaacagat

SEQ ID NO: 78878 - DNA, 921 bp, Zea Mays
ggaaaacattcacaactagggcagtagaatttatttgatttgacgcttgcgttgcggtcgggagctgtcgcgtgggttagttgggccgtaattggagtttcggcccattaaccctcccaaaccctagccgcctccctcctaaccccctccccccatgtgcagccgccccccacttctctccccccttggccgccgccccctgcccatctcctcctctctccattcttgcagccaccaaaccctagccccccccaatcccctcctcccaaggtgacaatccttgccgctcggatcatcgtcgtcgtggtgcgagtcttcaatcgttttggtggagggaagaagggaggaaggaaagggggagaatccaaggtgatttttgtgttcatcccttgttcatttgcgctgcaatttaattgattagaggttgcgtttgcgattgggtagaggggggctgtccagaattttaggtggtgggtgaacagcagtagtctagcagtttctgtgtttttttcgtgaggaattaagggaaatcagtttggggatcatgtagaactttaccttacctttccaacgagtatttatgcgctcaatttggagttataaattgaaagttatcaccgtttgaatccgggtatgtggctgtccaaagaaacagattttcagggggatgaacagcagcagtattagcagtttctggggatttttcgggagtaattagtgttaatcagtatgagaatcatgtagggctttatgttatctttccaacaagtacttatgcgctcgattcggagttataattcaggagatatcgttgtttgaatccggttatgttgctgtccaaaaaaaacagatttttcaggtgggtgaacagcagtggtattagcagtttctgggaatttttcgtgggtaattagtgttaac

SEQ ID NO: 78879 - DNA, 1596 bp, Zea Mays
tggaattatattttaaaagatatcgctgtttgaatctgggtatgtcgctgtctaaaagacaaagaaaaacagattacagggttcatcttgtggactgttttgggctaattagatattggaatttaattataaattgtatacaacacttgtggggaattttatgtagatgcctctggagtttttgtttgttaccactgctgtcataattttaaagttatgaaattattaagcagcgccgctgcagtttggtgggtgtagggagagatgtaacccgcggcggggtttgagttgtgcgtaggtgcggcgtcgcttatgggcctgattatgtgaaattggtgtactaagctgggtgtgaaaagcaggtggtggacttccggatcgtacttagggatttgcccgaacttccggtaaaggcaagtaaatacagtggtggttgctaccgtttggtttgcatcctattccctgtcattgagtatgcataagttttaattatgttaatcattgaattctatgatgaagtttatttgtttggaagtattaattctcaattgtctaatattgtggatgatcataatttggtaatgatatatgtggttgattcccatctggatgaagttgaagtgtctttttgaatcatgttatatgaagtgttgtaggcatgacatgcacatcgcatcatccatcttgcattttgaagttatgtcgtgatcttatggtccgaccgtaccggtacatttttagcatcgtacgttgcccgaggaggggtacgatgcggcttcatatccttagaggtatgaaggcagaagtcatccttgcatttgcagacatttgcactcatgaggaaatatatgaagtgtgacattactatgttactattgtggtttctacctgcgaggtgtggtaactaggtgcgttgtacgttgtatacgtgctgcaccttcgtaataagaaggttgtggaatcaagtggtggtaaaacaatgttcttatgtggttaaactgtttgatattattttacttgctgagatgtgtcatctcactcttgcattactcaatgcaggtacttgatacatgttgggaatgaggggagtagcagcacgtccactttcactctcacaataacactgcccaggcgcagccatgatttaattagaaactttttgtcaaaggaagtttgtttatttttttatatggtcgtgcgcactggttaattcagttcaggtcgtatgtttatctttccttgctggccgagtaataatacttagtatgttttagtcatgatatatgtttatactctgttgctccctcttttatgcaatcttgcaaaggggatgctgccgaaattttatatatggacgtcggaagtgtagtacagtagcattccgggttgtttgtggaaccatggagtgttacagtacaaatagaaatgcagaaggagaatccacttgtcatgctcaaacgtgtcctgctggttgtcttcgaacatattcagttcttctaccacacagtcagcttctaatatagattcgtatatcatacatacaaaagaaatcattcaccaaataaatagacatacacctttatatgaataacattc

SEQ ID NO: 78880 - DNA, 1035 bp, Zea Mays
gacgacgatgcaacccatgggacacggcggctccatggtgaccggagtgctcgggtgagccgtcccatattctatggtcctcatgcaaacaccgagacgccttgaacactcttcttgtaccgcggtgaagtctccaacgtggattccgatggtcaagcgccggtgtaggggaaccctgatgcggcggccaccatgactcccaatcgtggaggcgaacctcagacccacggttggtcatcccccgcaccggagcaatggcaacccataccgcgccatggcgaagttcccaggacggttctcagaaactggacgacgcacgcggcttctatggcagcgagctccgtcactctattatctccctctctcggtagctcgggttggcggcgtagccctcgacggcggctcgtacaacacggatctagggggtgccgtaatgggcgaagggaagggttctccttatatggacaggcaccggccgaataaacggccatggccgagtttggcggaaatcaagcgagctcgttcggattctgttgcgcttcggtcggagaaggtgaacctgatagaggggctccacgtgacggcggcacccgggttggagcatgaggtgaggcgccaagtgggccccgcatggcggtgttaggagatgaaggtgggctagctgggagcatgggaaacagggaatgggccgacatgttagggttccagcccacgtaggttttctgtttttttgtttttttatttctttttttctatttcccaatttcaaactaaattttaaattctagttttgaacttcaaatttctaagtggcagaattaatccaaatgtgaatatacactatactgtttacaatttattattcattctcctcctcgctatttatttatggaataaatagtttcattgaaattccctttcttatttacaatttccacacttgaattttgagtttaaatcattaccttgaattttcaggcttccaaatgtccaataccatcctaattgtggatataaactctacaaatttttaat

SEQ ID NO: 78881 - DNA, 1386 bp, Zea Mays
gagataaatgtcacaaatattattacataacgagaatgtcttacaaaatacagataataaataaagcgaactaatattatttccttgacgccagaccttgttaaactcctcgtagtagtcctcctcctgggctacatgttcttcacatgtggggggagggttttatcgcaaaagtgagctcacaaaagtttatcgctcaacaagtgtgaagaataatgtgcatgagctcacaaaagtgggggctcatgtatagtgttaggctgatcaacaaataatggttaaggcaaagcattgcttttaaaaagttggtaaaattttattagcagttactaagtataagtaaataccaacccaaataaaatgagagatcataattaataataaaaccacaatgcgatgcaaatgaccaattaagtttaattccataagttactcatgtgagggttcgagtcactcataaccatgagcatggctgatataccagttttacactctgcagaggttgcacaacttcacccacaagtcgtgttacccatatgtcatggggttgtatggaccccatacccctctaccgaggaggcgaggcagggtagcactacaaggcctttacaaagtttcactagcttcagaaaacccgatacgatttctgaggagagcggtataggaatcccccgtctgaaaagccatctcagcaagatcaacccgagaacctccctacatcgacactcccctactgcccttgcctcttacgggtaaggtagtcctccactagctttcctaattagttagctaagggcatccccataccacccttttggtagcactatttttctggatgggtctcccatattccaattagcataatgatcttgtcataaatagtaattaactcattgtcaataacaagcatgcatgtgtattttaatacccaaaaccacataaagcaatagcatatactacccaaaagttcagcggtaagcaagttataaagatgaccaaactagggtgccctattgggtccgatcaaaattaactgatgcagatcataatgattaacaggaacattattgagtaaagaaaagtgatcaagggcacaacttgccttcaacgagctcctattcagtattttctacctgttgagtaccgagatcctcgggtgcttgctcgtctactcgcaataatacaaacatacatggtataggagaaattagcattacagcaaacataagaacatactgcacaataatgttctatgtatcgtaacgagatcgtaggttcgagaaccactaaattcgtagttacggttaaagagttatgagtttctgaaggtttaggtgttggacatgaacaaactaagtgcataatttaaacaatatgtttcataac

SEQ ID NO: 78882 - DNA, 293 bp, Zea Mays
ataaaaactagcttcgccagcgttggcgcattttcgcaagaagaaaactttataagaggtaaccccgaaggtcccctggaatggatcaatcatgagtcggaggccttcgaggaaatcctgagtagccgcggtgacatctgcgctttttctggtgccagagggattgccactattttggaggggaaaggatgtgaacatgtaaagattttatcgcagtccgaagccaccttgtccactgaagatataaaagatccttcagccgaagctagcgcggttgggggaaaatttttcac

SEQ ID NO: 78883 - DNA, 539 bp, Zea Mays
cgatcgactgctgaacgaagctgcagagatagtacttagggaagactaagtgctattgcaaaaaacatttgatatatgatttgtgtaatattctgtaatcctgtatgtaatatacttgttttatgattcaattctttacgatgcatgaaactttaaacacgtaccatttttgagtcttcgacgaaaaaacaccttcccttcttttcatgcttcgtgaagaagaatttatcatttatcacgacaatatccataatgttctgataagaaatatccaagcttcgtaaaaataatctccgaagctatacctcgaaaatcaatattgtttctccctgtaacttggcatgatttgccctttttcaaagcattttccgaagatcgataacatgcccccttcttgtgccacatgcagcatgatgtatgatgattatgctatgcaaaatgatgtgatgatgttatgttatgcaaaatgatattttgtgccgaagatacgcacattcctgcaatggggcacaatcttttgtatcaatactgactttttc

SEQ ID NO: 78884 - DNA, 197 bp, Zea Mays
tggcacggtgctgttgaccgtgcgagcttcggactgttctctgaagtccctttgatgtggagcatattggctcccttctggttgctggccttgttgcaacggaggtggaggcgggggctgttgccaggaagctgaaggctgacttgccgaagcagcagagagtgcaggatggttgcccacatattctgggatgtagg

SEQ ID NO: 78885 - DNA, 432 bp, Zea Mays
ctggaacaaggcttgagcagtgaccggcttcgtctgaaatccttgaaagctggtcaataacatatccttcagcttctgccatgaagtgatcgttcctggccgaagggaggaataccaggtctgagcaacactcctgacggccataacgaaagactttgccattactgcagcattgccaccatacgaagacactgttgcttcgtaactcatcaagaactgcttcgggtccgaatggccatcgaacatgggaagctggggtggcttataggacgaaggccaaggtgtagcctacagctcagcggacagaggagaagcatcgtcgaaaacaaaatttccatgatgaaaattatcataccagtcatcttcattgaagaagccctcctgatgaaggtctttttgttgaggccttcggttctgctcatcgtgggtaag

SEQ ID NO: 78886 - DNA, 192 bp, Zea Mays
ccagttttcgattcaggttggaatcagctggtgtctctgtcagggcccaagagggtccgctatggttagataaagataacgctagtttgggataagatgagaattagagataagattagatctagtgtttagaggtcaaataaccctctctgtataaggagaaggattgtatcaattgaagggaagcaagag

SEQ ID NO: 78887 - DNA, 2413 bp, Zea Mays
cgaagttcggcttcagcactagaacgagatatggctgcttgcttcttggatttccaggcaacggggagatgatccaaggagaaaacagtaacctgtagtagaacaatggtcaacaggatcacttgcccaagtggcatcagaatacgcatgaagctgaagtgggctatcaaagcataaagtaaacatctggatcttgtcccgcgtaaatatcgaagcacacgaagcaaatgaccataatgaactgaagtaggtgttgatataaattggctcaacatatgaacagcatgagcaatatcaggtctggtgatggtgagataaacaagactaaccacaatatgacgataccgagttgggtctgctagtggtgccccatccttcggacaaagttttaaatgaatatcgattggtgttgcaacggtgtgtgtatcagtaagtcaagagcgatcaagaagatcttgtatatatttggactgagacagataaaagcctttttgagtctgttgaacatcaatgcccaagaaatagctaagcggtcccaaatcagacatctaaaattccttactaagatgttacttgacatgagaaatatgttctaagttgtcacctgtaatcagcatatcatccacatataatagaagtaaagtgcgaccttttggagagacatgaacaaacaatgcaggatcatgttcactagaagaaaaaccagcagttgtgatgacagagatgaatcgctcaaaccaagcatgaggagcttgtttcagcccatacaatgtgcgacggagacaacaaacatgccctgagggagtatcaaccccggaaggaggatgcatataaacttcttcttgtagatcaccattaagaaaagcattcttgacatccatctaggagatagtccaagaagatgagactgcaactgcgatcaaggttcgaacagtagtcatatgcgcaacaggtgcaaaagtctcatcgtaatcaagtccttgagtctgttgaaaatcatgagccactagacgagctttatacctctcaatggaaccatctgattttgtcttaactttgaagacccatttacatgtgataggaacaacatgcgagggtaaaggaacgatatcccatgtaccaatgcgttcaagagcagccaattcatcaatcatagctagctgccactcgagaatcccagaagcttcctaatatgtagtgggttcaacaattgccacatcagcccgtggaaaaccatagcgatctggaggttcaatggtaccacggtcacgaagacggtatccctgattaaaaacatcattagactcattattgtcagtacaagaatcaggtacatgatcagtaccaggactagccgtagaaatagagcgggaacaacgaatgtaggtttggatgacaggtggtttggaagagtaagaagaagatgatgtggaggtggaaggtggtgttatggtaatgagaacatcaaatgtggatgtagaagatgatggtgcagattaaggaatggaaggaagacacatgaaagaagtagattctatgggataatatgagaagtgagtagactggttgtgaaagaaggagcgattttcattgaaactcacatctctggaaattcgaatacgacgagtagaaggatcataacaacgatagcctttgtgttcaggattgtatccaaggaatacacattctacagattgagcagtcaatttggtctgctcacgtggtggtaacaagacataacatatacattcaaacacacgaagatgatcatatcgtggagcccagaaaggaacttcacccggggatttgccagaaagtttagatgatggttgtctattaatgagatacacagcagtggaaacagcttcactccaaaagtgtcaagaaacaaaagaagatatcaaaatagtacgagcactcgcaataatatgacggtgtttgcgttcagcaacaccattttaggcatgagcaccaggacaagaaagttgagaaagagtacgctctaaggtcaatagctggcggaaattgtcagataaaaattcaccaccagaatcggaacagaatattttaatagtagcagaaaactgggtgtgaaccatgcgagtgaaggacttataaatagaaggcaattccgagcggcgtttcataaagtaaatccaagtataacgataatgatcatcaataagaatgacataatatttatgaccgccttttgaaacaaacggagctggaccccaaacatcagagtgaattagatcaaaaggtttagcagaatgagattcactagtaaaatatggaagttgtatttgttttccaagatgacaacatttacaatgaaaactagactcaacatgtgtagggcctaaacatcctgactttattagagtggacagacgagatccacataagtgac

SEQ ID NO: 78888 - DNA, 358 bp, Zea Mays
aagagaatcaaattcaggtcgaactcccataacaaatcagtaggtaaaaacttctcaatgaacttatgggttgggcaaggcacagttgtacatgcgggcaacatggaggtcaatgcactcataagacgatcaaaggctggataatattcatcaatgaacatatcatgttgctcaatgacatgagtctgctgcataagagtatgtaaaagagcaccgctatcctgaacaaaccgatccttcagatgtgaccagatagccttagcagtggtgaatttggacagactcataatcatagttggtttagtgttgtttgcagccattaccttgccatcattgatctgccaagtcttgattgcag

SEQ ID NO: 78889 - DNA, 1097 bp, Zea Mays
cccaaccttctgttcccccagcgacgagccccatccctgtgacctctagggcagcagctgccacaagcacgtcgcccgctgcgcccgtgtcacaggactccttcattgtgttccagcagcaggtgttggactcccagacattgatcatcaaccacctgtcggcgttgaccgcccggttggggcaatcgaggtgcaatccgcgtcggcctcgtccatgattgatccttcatcatcgtcccacgtcttcccctcgactgcgcaagattaacctatggccctcccgactatgggggcatccaaaccgcacccgatgcgacgtcctccctgtcacttagaggtcaagtaaccctttctatataaggagaaggattatatcaattgaaggtaagcagaagattagaaagaaatcctttctctcttgccgacagtgggcaaagccctgcgaccgacctccccagcgccccatccttaatcgttgcgccacgtccccaataggatctgcaatcctatgaacccaccaaatccggatccctaacagtctcactggggcatgcccccaaaataaattttgttgcatcctcacgtgatgccacgatgggtcagaacaggatgcttgtcatctatggagccctgtgtgactaacaacctcactagggatgttgtcaagctgtgtgtagttgtaggtcttgatatgagtgtgtgtgcacatgttcagatactacaactgtacccaattagaaggtatcaaaaaatggttcactgcaacctcatctatagatagttcaattatagataactaaaattaaatatctctgatatttagtattatccctattcaaaattgtaagccatttaagctatgtcccaagtatatcattttgggatccttcaattttggctcatatattcaccaaaaagggggagattgaaagggaattaggcttacacctattttcctaattgattttggtggttgaattgcctaacacaaataattggactaactagtttgctctagtgtataagttatacaggtgccaaaggttcacactaagccaataaaaagaccaagaaatgggttcaacaaagagatcaag

SEQ ID NO: 78890 - DNA, 395 bp, Zea Mays
atcgaatatcatagctaaactgtaacttaaatccaaagtaattgaagcgaggtctctgaacggttacatattttgaaaggttccagagacaactatttatttgatgtgcaacaaattaagggagagcggtgtctccgaaccgataccgtcaattcgaggaatatcacacctagactacgtcattccagagtaatggctgccgatcgggattcgggaactcactggcgctccgtgctcggcagcagtacaactgggcagcagcagcactgcaacacggcagtagtagccagagaccgaatatttggcgacggcgaaacggattatttcgggggtacaaacccgcatgcagacctcatccatccgaaagaaagcggggggcccgggcccggccgagg

SEQ ID NO: 78891 - DNA, 331 bp, Zea Mays
ctcggatctagtccgataaagccacttatccaggatcgaataccactagctcactcgaaggtgaggcacagagaaatacaataaaacataataccaccaatttaataagtatcattagtgattacattatcggagtttcataaataataatcataaattttaatgcagcggaaataactaacggagaaaaacgagtaacatggcgaagcctggccacgctactcctcctggtcctctcctgcggaagcagtaacccactcgaccgtctatcccggtggcagggatgaaggccaagtcacaccatcaaccaaatcaaggaggtacctgcaaa

SEQ ID NO: 78892 - DNA, 545 bp, Zea Mays
aggcttcatacatcttttctgtgttgtcggcaagcgagatgtggaattggcttgaacttgccttgttttttcatgcctttgttcttttctgatttatattttacttatagacgttgccaatacattattgttttagaaatatccgattataatatgcacctcgggttaattgtcacttgcttcattttttcctatatctatatgtaagttctctagtaattagggaattgttttcgacgttgccaatacaattataaatgtatgacttgcgtgaatttttgaagtcaattgagggcacatggtacaacttttaccgatcgtattttagattccgatcataaccgatgtaattttcgtaccgaactttcgtttccgatgttttcgaattaccgatgtcattttcgtttccggagttaccgttttcgatctcgtttgcgagaaaaaaatgaaaacaaaaatgattttagtgtttaccgatcgtttccgaccgttttcacccctactagtaatacctttttaatcactatctttgttcagaacccagt

SEQ ID NO: 78893 - DNA, 778 bp, Zea Mays
cgacaagatggtgatagctttgggagcaatagaaaaggacaagattatggtagccagggcctacaacaagaaggtcagagcaaagtcatttcaagtaggagatctggtgtggaagaccatcttacctctaaggaataaagaccggaagtttggaaaatggtcgccaagctgggagggtccttataaagtaaaacaggtgatgtctggcaacgcttatttgctacaaacattacaaggcaaggatttgcctaaggctttgaatgggtgtttcctcaaacagtaccatcctagtatgtggcaagatgcctaagagaaccgatgtgagcacatcgagttagttgcttttggttcgcccagctccaccaaaagacaggggggcatatgtttgaatcatatttgagcctgcggacggtccggccctgaggccggacggtccgcggtccggacagtccgcgcctgtgggccggacggtccgcgcgtgcgcagaacagattagggttccgagttttgtgctatggttgttagctaaaatcatgggataagctcggaaattagtttgtaaagggtccagcccccctcctctataaatagagaggtatacggccgatttgtaataaacaatcgaatcaatacaacttctatttcgcattttatcctaggagtagttctagtctagtttaggttttagccttccaatccccaattcttcgtctctcttcgactctacgtcgattagaggagtctaggtcggccggcccgagcctagacaccacctagg

SEQ ID NO: 78894 - DNA, 553 bp, Zea Mays
caaaaaggcgtcaacatactttttggcgactccgctggggaacatatatctaagcttatcaaatcggccctcaatggccggttcaagggatagctctgatatttctccaagcaacatcatagagccaacttgggagaccttgccggctgacgagcagctccagtttgaggagcacaaggagcggatgatccaggaggcgaaagcaaagttcttggccaacttcaaagtggacaggaacaacaaggtcgtccgacatcgggcgacggatccggcttcgctccaacccacgccagatatccccaatgtaagtaataccaacgatctgcaatctcttagaaattatgtagaagatcagcgtgaacaaatgcagaacatcatagggggtatgcaaagcgatcttaagagactagtacgtgcattcgataaatctagtaccgcaaattttccttcgcacgaggttgagttaggagataacgcgcgtaacacatcggctacaggttgtcacgaccagtcacaacccctttatgggatgccgatggaaacataccctaag

SEQ ID NO: 78895 - DNA, 3132 bp, Zea Mays
agcaaaccagccgatctgcacatgcccggaccgtccgcacgtgagcgcggaccgtccgggccaacagcagttgggcctatttttaatgagttacctagatatgtgcccgagcctccacatatgacacagaacccaaattacccagtcggacggtccgcatacaatgacggacggtccgcatatgaccacggacggtccgggtacatatccggacagcccgcgcatgagtcttttgaggaggattattacctgaatcctcgcccgtcccagcaacacttcccatcacattatgcaatgcaccagcccattaattcaggatccagagcccaggaaagctttccggccccacctaaaaggccggaaagaaacgatcaaacctatgagccatatagggcaaatgggaatgcaccacgtagctcaaaccaatggggggaacgacaacatactaatatgcaaccaaccccacctatgtttgaccagagagccggtggtcttgcaccggctgccattgatatagtgagggaagaaatagccggggcgttccgagataagctcggagtaagcatggtccctggggggcaatcatatcggaaaccttatgacagccgatttgatcaccacccgttcccacagggaactagaatacccgaattcgcaaaattttcgggtgatcaagggaaaaatacgcgcgaacatataggccagttcttagcacaattgggagaattggcagacatagaggcatttcgcgtacgtttattttcattatcgctaacaggaaccgcgtttgcatggtatgccactttacctcctaattccatttcatcatggggggatctagaacaaaaatttcatgatcattttttctccggtgattatgaattggatttggtagatttagtgtcattgcgacagacaaaagacgaatcggttaatgattacatccggagattccgcgatacaagaaaccgatgctttcaaattcatttagcagaaaaacagctagtaggattagcctttaatggtctacgatattatttaaaagagagattagaaggcatccaattttttacactagcacagttacaccagagggctttggcttgcgaaagccggagcaaagaaactgctaaaacaatgcgtcacaacgtacatatagttgaatgcgaccaaagtagctcagatgacgaatcaacagaagtatatgctgctgaaatggtttggccaaaacaggccaaatcttcggcttgttcctccttgcagccggttcaaaagaaacggcaagaggaggttaagtttacatttaatgttggtaaatgtgataaaatatttgatgagttacttaaaaatggcaatattaaaataaatcacactgttccatccgccgacgagctaaaacgtcgtgcgtactgcaagtggcataactcattttctcatgccactaatgattgtaatgtatttcggcgacagattcaatcggccattaacgaaggacgattgaaatttcaggaaatgcaggtggatacggagccctttccgatgaacatgattgacttcgagggcaagaaagtcctggttcggccaaatacagccgataaaggcaaaggcaaggaaacaatcatcggcaatgctaaaaaggccgatggggattgtaaaatttcttgcaggaaagtggtgtccgagaagactcccgatggaggggagaccctgaaggtgaccatcacagcctccagtactggggggcaagcgcagacagggagacagatgcaggagcccgtgctgcgtatcccggacggtccgacacgtaggcgcggacggtccgggaccccaccggacggtccggagagctccagcagacggtccggccatgctcaggactcgcagcgaccacgtaccttcaaaccacgacgaccagagataggtacgtggaaaacaaatacatttaaagcagctggtcggctgatcaagcctggcccgactttcgatcaattgttgtctaaatatgtgaaaaagaaggctggccccagtgaccggccaccgaagcgaccccgctcacccattcatgagcaacgtcaggtcaggccgattggaccacatcaccaatcggaagaaatgaaaggtcctattgtacaattgagacctaacatgccgacatggacccctccacctccatatccacctatgccatatccgtacacatatttacctccgccatatgtcccaaatcaaatgtggggcatgccaccatatccatttgggatgccacagtaccccgcctggggggcaccccaaacatctgttttcaacaggttgacgccaccagtgcaagaccgattgagcgctgctcaatctggtcaccaggcacaaacccaacaggattgccggactactcggccttcaaggccgaccaatccggcaggggggcatatgcctgcagcaactcaaaaaacaacaaaaggggacatcatcaaaataggcaccgcagatgttgtcatacagggagacaataaagggccgatgattctcggcgaatcggccaacgcaaccgaaaaggatacggctaccatcaaaacagccgatccaaaatactccatgcctcgatggtgcccagcgggattgacacgatcccaaaagagaaaattacagcgcctaagagcaaaggagagccaggagaaggaggcggaaaagacatttaatgacacacatccattatacccgccaccgcaaaagaaatggagaccgaaggccgttgagaaaaaacaaacggtcacagaaatagaaagtcaatctgcaccaagcacggaccgtccggcccctacgcacggaccgtccgccgttcaccaggaagtctctggacaacctgcaccaggcgcggaccgttcggccaccgcacgcggaccgtccgccgttcaccaggaagcctccaacgatacgacaacatcaatggaagaggacgacctgctgggagaagacctggtcgactacgaggcttctccagaacacacaggtatggatgtaaatattattacattttctgtcgattgtactattatcggcgacgatgaacctgttgttgcccagtttgattttggtcctaaagaagccgcctttactaaaccaaaagaatcggta

SEQ ID NO: 78896 - DNA, 2260 bp, Zea Mays
gagaagaaggagtcaggtaagcttagagtatgcattgattttcgtaatttaaataaagcaactcctaaagatgaatatctcatgcccatagccgacacattaatcaataatgcatcaggaaatagaattattagcttccttgatggtaatgccggatataatcagattttcatggccgaagaagatgcgtctaaaacggcctttatatgtccagacttcattggtttatttgaatgggttgtcatgacattcggtcttaaaaatgctggtgctacttatcagagggctatgaatctgatcttccatgagttgttaggaaacactgtggaagtctacattgatgatattttagtcaaatcggctgagtttagttctcatatagctgatttgcgcaaagcctttgataaaatgcgtcggtatggtttgaaaatgaacccacgtaagtgtgcttttggagtgtcggctggtaagtttttaggatttgtcatccatgaacatggtatagaaatagatcctgaccgaatcaagtctattcggaatgtggggcctccaacttgtaaggtcgaagtgcagaggtttctcggcaaggtgaattatttacgaaggtttatttctaacctagctgggaagattgatgccttcacccctatccttcggcttaagaatgatactgaattcacttggggggcagagcagcaggaagcatttgatctcattaaaaaatacttgtcttcggctcccgtgttaaaagcaccacaagtaggagcgccattcagattatacattgcagctgaagacaaggttattggggctgttctgacacaagaaactgaggggaaggagcatgtggtgacatatctaagccgaaggttggtggatgctgaaacaaggtacacttttattgaaaagttatgcttatgcttgttttatgcatgcaccaaatgtagatgttatttactgtctagtcattgcactgtttctggtcaagccgatgtaatcaaatacatgttgcataacccaattatgagtggtagaattggtaagtgggcttatgcactcatagaatatgacttggcctatgaaccattgaaatctatgaaaggccaagtcgtagcggattttattgtagaacatcgggttaatgatattcatgaactagacatgtcatacctcactattactccttggactttatattttgatggatcggtttgcaatgaagggcaaggaattggcattgtgcttgtttcaccaagtaatgtctcctttgacttctctagccgattgaaaacttattgcactaataatcaagccgaatatgaggccctcctattcggcttagaacttttaaatggtatgagagtaaaacatgtgaaggtatttggtgattctcagctggttgtccaacaagtgttagaagaatatcaatgttttgatagtactctaaatagttaccttgagaaatgttggagcataatccattcttttgacgaattcagtattcgacatatctctagagttgagaatcatagagctaacgatttggcacaagatgcatcaggttatcggataaagagagggaaatttcacaaaactgaaattccgataaccagtgcagagccaaattcccaggtcgcggaccgtccgcgtgacaacgccggaccgtccggggtttccagaaatgttctcttaatcgattcggctgacaatgaagccgatgtaagtgattggaggacacctatacttaattatttacgaaatcccaatattaggacagataagaacattcggcgaacagctttcaagtatgttttgatgagtgatgaactttaccgccgaacagtcagtgacgtcctgctgaagtgcttgggcccagatgatgctatattagccatggccgaagtacatgaaggaatttgtggtactcatcaatcggctccaaagatgaagtggttgttgcgaaggtctggtttttattggcctagtatgatagctgattgtttcaagtactacaagggatgccaagtgtgtcaaaaattcggcgacctacagttggtccctgcagccgaattgcatcctatcatcaagccttggccgttcagagggtggggattagactttattggagaaattcatccttcatcatcaaaggggcatcggtttgtgttagttgccactgactatttcaccaaatggactgaagccgttgctctgaaaaacatgacgcacaaggaggtaattgagttcataactgagcata

SEQ ID NO: 78897 - DNA, 202 bp, Zea Mays
gacccgatgtgccatggacgcgacggcactcggcacagtgccacaggcggggagatgcgagggcacgaccacgaaccgctgcaaaaacaaatggtttccgcaccgaatttcgcacgttactcgctcgcgacgcgagatggacagatggtttttgcgttggtcaatccgtcaatggaccgacggagagaaagcgggcggggag

SEQ ID NO: 78898 - DNA, 366 bp, Zea Mays
cttggtcttgttgggatgctccttgcgaccccttaacgccgtcttgaagcgcttaatgatgagagccatttcttcatcattaagcccggccgcctcaatttgcgccaccttgcttggtagtgcctccttgcttctcgatgccttgagagcaagaggctcgtggattggaccgttcaacgcgtcatcgacgtaccttgcctccttgatcatcattcgcccgctcacgaattttccaagtacttcctcgggcgtcatcatcgtgtacctggaattctcacgaatattgttcacgagatgaggatcaagaacggtaaaggacctgagtagtaggcggacgacgtcgtggtccgtccaacgcgtgcttcc

SEQ ID NO: 78899 - DNA, 265 bp, Zea Mays
cttgtcttcttcttcttcccatctttgcgcctgtggcccgagcccgagtcgttggacttgtcatcccttggctcgttgacgaaggactccttctccttgtcgttgatcacaattcccttccccttaggatccatcttttcgggcggttagtccctttcttgaagagaacggctctgataccaattgagagcacctagaggggggggtgaataggtgatcctgaataacttcaaaacttaagccacaaaaacttgtaaagtgttag

SEQ ID NO: 78900 - DNA, 71 bp, Zea Mays
cctctacgggcagtgggtgtctttaagttgtgtcttaaagtatgtctagatgggtaaatgtaaaaaatttc

SEQ ID NO: 78901 - DNA, 237 bp, Zea Mays
aggtatgttgttgcgctagaactcttcaatgcagtttccggaagaacatagcctcattttccaatagggcaatgattaatgagtatgacgaactaatggacacatgtcattggattatggcattgctggttgcataacaaacaatacgggtaattcatattgtgttcgtcttgtctgattgcagaaactagattttctgcatctatttggtatcccgggggcatcattcaattacct

SEQ ID NO: 78902 - DNA, 379 bp, Zea Mays
cataattgattttggatattcaatagcatttcttcttaaatggaaattcaaataaataatataataattattagtccaaaaataaatattttatttataaatagttttgtgtaattattatgaattttagggttatttaaaaatatattttgaatttagaaaaggaaatagaaaaaaaaagaaaaaaacgaaaccctaacctaatcggcccattaggcccaacaagcaagcagtcgtgctccctaaccctagccgccactcccctacaggtcggccgccaccctacctcccttccctgatggccgtcgccgcccctggtctttccctcccttctctcccactcgcgcgcgggccccactcatccatctctcctctcttc

SEQ ID NO: 78903 - DNA, 102 bp, Zea Mays
cccttttgtgccttgccccaagagaggaagaaaaaagaagagaagagaggggagatgagggcataccgtcgcccatcatcgtcgttcctctccaagaattgg

SEQ ID NO: 78904 - DNA, 400 bp, Zea Mays
gggaatttaagatttgaaagaaattctagaatttagaagggaaaagaaaataagtattgtgtggataaaataagtaattaaaaatatattattccaagactagattttgaatttgtataatttaacccaaagctgaaatttatattcaaattcaaatctagaattcaaataattatgaatgaaaaaaaagaaagaaaaaaacagaaaataaaaagagaaaaggaaatggcgcgttgggccgaattctgttggccggccctgcacctcggccatccccctttgatcccacgcggtcgtctcctgcgcacgctccagaatgacaggtgggcccgctatcggggtcctgtagatcttccactccccgcatgctacaatggacctgcgtttttgccgcagattt

SEQ ID NO: 78905 - DNA, 144 bp, Zea Mays
tcggtttaccttcaaaaccgggtgtgacaagcggcagggacgagatgaaggcggtgggtgtaaacaagttggtgcagcgaaatgagttggcacaagaggataggtttgagggaatagaggtgtttagaggtgatgaggtgggcg

SEQ ID NO: 78906 - DNA, 211 bp, Zea Mays
gaaaagaaagagatctatttagaaaaaagaatagagtttgcaacttaagatttcacactcaacaaataacaagattaactatagtagagtacaagattaactattttagatccgagattattgtgatttgactaattaattcaactcgtttagctcgcgagtcagctcgcgaaccagctcgagctgactcgttatcataacgagttgaaat

SEQ ID NO: 78907 - DNA, 817 bp, Zea Mays
gtttttggtccagccctagatgtacatgaactactgtagtgttgtatgcctatacatgtcttgtagagggcaccacgtgaagaagaatcggtgcagcatagggaggagcttcgaactagagagtggagaatgaaggtgggcgagcagatggagaggtatgtaggtgatttaaggtcccaattttatatgtgggtagtgttttaggcttcttctttgcagctcaaatgtataattgtacgtttgagcctgaatttaaaattgatgaaaattttggaccgaagcccaccggtaaacatgaattttggtttcctcgaaattttttccctggttagtggtcatgtttagactaagtcttaattagatcctggtaagctaagatttaattaaacaaagtaagccaaacgcccaaattcatggaggcaatgaaagtttcgaaagttctagtcataagtccgatatgggttttaaaattgatgagatgataccacgggttttaaaattgctgggtaattgactaataagctatacctcagaagttacaagcaaaaaatgcgagcatccttttttgcttacgttttgaaattcctcttagatggaaaggcggtcatactgtatgttttctttttttacttgaaaacgtgttaaccatggttaggtaatttaattaataatccaaaacactagttaagagaaggcagcgtttttaccgcgaatgagatgccggcccgcccggccggtttgcgaaactggtggcgcggcggcggcgccatggagatggagatggagatgcgccgcagccgcaggcaggagaggagag

SEQ ID NO: 78908 - DNA, 722 bp, Zea Mays
gttgtgctctacgaccacctgtggacaacctagtgaaccccaactcgtgagtgattgatattcagttttacctatatcttgttcttgcttgtttcttcgattgctcgcagaaatagaacttcgtgttcaggttgattttgccagcagcatggtcaataaccatttggagttgattctgcgattgttaaggcgccacgacctgtccgtttgtagtcagatcgcgagagtcacctcctccaccaatcgaaattatccacctcactgaaaggtcgggcactccagctgtatcaagtggtatcaaatttttaggttgctcggtgagttttatcccttagtttgagagttattcattgtcccaatgtccatcagaaaagctacaaaaaatttaggctagaaccttgtcctagaaccatttggccttgcacttttctttcagtaatcttgtgttgttgaatttgtgtgcatttgcatcaagtgttgttagttgcctcgtagtttcgttgtcaccgccgtttctttcgttcgtacatcccacgtccgtcgttccccaccattcttctttcgttcatacgaccacgtcttattttcctccctcttgtttcgttagcacgttttcagccttgctgattggaacactttggggcgctggatctggttatcaaaaaaaggaaagaaacacaaaagacaacataaaggcatgatacaaaaaatatatcaaaaaa

SEQ ID NO: 78909 - DNA, 376 bp, Zea Mays
cttttttgtagcttcgtcgcgctctacatccccttagggacgtctttcgagcttctccgtgtttttttcattttctcgctgcactcgatggtgcatgccccaatttttacatttacatctttgggggatactgctcttgtagagctgatatgagaaaaagagaaattacatgttatggccccattaaaaacctttctccccctttggaaaggaaaagggtgccataggaaaaaataaaaataaaaaataaaaaagattacatcaggttacacataataccgttgaagctcatccgcattccaagatctaggaatgtcgttgccgtccatatcctttaacctgtaggaaccgggtcttgacgaagatactaccagaa

SEQ ID NO: 78910 - DNA, 1008 bp, Zea Mays
caatcgggtgcccctcctgaaccaggacggcgccgaagccgtaagtggaggtgtcgcactcgacggtgaacaccttggcgaagtccggcattgcgaggacgggtgccgaagtcaccgcatctttgagtgcgacaaacgcggcctcaaccgcttccgaccaggagaacccctctttcttgagaagggctagggatgaaaacgggacggatacagccggatacagggtcatcccgtatcctaccctaatgtatttctctcggatacgggaccggatacgggtagttaagattcgggacggatacaggacgggaccgggtaataatccggacgggtaagaaacggataacggatactattcgggtaggtaccgaataattgtcgggtagttcatccgatgatattaattgtccaaccatccataagttaagcaatacataatcatgtatatgatagatcagatgtaagaaaggaaactggtaaaattgacatcatgcagttcaaagttgcttatcacaaggacattgtagaaccaacaccgcaatatttaaaattcataaatattctagtttcactaaaaattgcaaataagttacaaaaactaataaacattttatatgaagataactcaagtcctcgtatgaaaatgataaagtgaagtactgattatgttgaaacttggatactacactaatttcacatgtaactcatacaaataagtgaaagtgaaaggaaagaaacgtgggcatcttatagatcttatgatccaaacattttttatggttacatatggatatatgttgtatctccgtaaaatttcacgattttctgaggctatttatgtattattaatttcttgtcatagaaaatcatcaaaatacaattaaatcattaaaatattgtttaaacaaaaaattgatgtatttcaaagtcatagatctcttcaagctctacaattttcatataaactttatcttcatccgatttcatatgtaaaagttatgattttat

SEQ ID NO: 78911 - DNA, 1118 bp, Zea Mays
aaacgacccacgcggggcagcagggtctggaagcgattgtcgtattcttccacagtcccggtgcgccggcattccgtcaattcgaacaagggtgctgctcgcaggggtgggccaaacctcagattgaggagctccctaaagcgcccccatggaggcgtgccctcgtcttcttggagctggatgtaccacagctatgcgacatcttccatgttgtacgacgccatccacacgcgttcctccgccatggtacgctgctgctggaaatacgactcacacttgttgatgaagagcatggcccggtcttgccgtcgtagcgggggaagtcgatcttgtggaacttgggcgggcgatcgaaatcacgatggccctcagtgcggtcgccgccatttgctgaggacgaggcggtcctctccttcatgccctccatgtctaccttcaaggccatcatctcggcggacatgtccaggagctttttcataacatccgcgatagtgggttggtctcccatggccgtcgaggctgtggaagagggcggtgaggatggggtggtggtgttgctggttgacacagatgacaaggatcgccgaactcgtgataccaagttgtcaaggacctccggtccgagggtaactggaccgcggctacagagatcgtagtcgcgttccgtggtcgccggcaaggttattcccccacgccgtcgcccgggttgatgcctgggttattccccctaggcgccgacttgagagagaggagagattagattggtagtaatttctgcttactttcctcatccaaccgaatacaatatataggcccaaatctgaaccgcaaggagctaatcactcctaaattctaggtaaccaacaaggtaactaatctggagctaatcactcctaaattctaggtaaccaaggcaactaatcccaactttctacttatccattgccttgctgttccagctcgcgcgcggtgcgttccgtggcgcggcaaacatcgcgcacacgcctgcagcgcgtatatgtgcgaccgcacatgacataaaccctagactaggagattacattaatcccctcgactattataccttaacaacaatgagctaggtctaccaagtgttg

SEQ ID NO: 78912 - DNA, 807 bp, Zea Mays
ccaacacttaccaaacttaaatgggtgcacttgtctatatccctaactatcaaatgacaattggtgtcatcatgtcttcgactcctcacggatgattacacaacaaatgaatttagttttgcatcaattcctcgccaaccattgcaaatgcatgtagaagaaattgaaccatcacgctatcttcgtgtttcaatagtgctatcaattatcatccccatattattacatcaatatacttgtctagtgacttccttacttcttctatcgtactcatcggtgccaccatcgacaaagatccaaaatttgtcacacgatgaagacttgttcaactctcagacactaagttgcttaacaaatgtactaaaggaccagtgaggtgaccagagagggttgaatgagagccactacaaaattctagaactgcgagaacagtacttgttacttgattccttgacccaatccaacctccagggacaacaaaaacacttcacaaaagaacagatcaaccatgaatcgattgactgctcctaccaagttccagaggacaatcagagctcaatagggacaaaaagacttgatttgaacccaaacttttacatgaaattcgaaagagaacccaaaggtccagtaaaagttctaggtcaaagtctgagaaaaacgtcgagcagtagtgccgctcgtaggtgcagcagtgccgaactacaaaatttttccagaacactctcaaattttgcaggcagcaagatacgagggagaaaaggtgaaccatgaagtttaagaagaaaaggataaaaaatctttgcccgg

SEQ ID NO: 78913 - DNA, 231 bp, Zea Mays
gttcagacatcatggttagtggtttgttagtagcccgcgatccatttgtcagcagtgcacgtccctaggctttcttggaacttcaagctaagcatcagtataaaactgctcttgtcaatggttgaatgatcaggactgtagtagagatttcaaagcgagagatctgtgtgctttagcttgccttgtttcaggttccatgctctcaaagaaagcgagaatcttccaagttcc

SEQ ID NO: 78914 - DNA, 671 bp, Zea Mays
cggaggcccgagaaggcgcgcgcgtccgcggacgcgcccgcggcgaggaggatgtgcgcggccgcgacggcggccggggcgccgccggccgcagcgaggtggagcggcgtggcgccgtccgtgggcgacgcgcgcgcggcctctgccggcgcggaggacagcacgtacgccagcaccgccgtgctgccgtagagcgcggcgaccatggtcggcgtgcgcgcctcgaggcgggggcggccggcggccgcgcccgcgcccgcggcggacgggccgtaccagtggcccacggcgtccaaggccggggctttgtcatcctccgcggcgcgcctgaacgccaccacgtcgtccgccgccgccagctcgagcaggagtgccgtcgccatcaccgaggagttcttggccgtcgccgtctccgccgggagaggaggggtggacggcttgcgaggtcctgagcacatgctggggtagtagtactcacagtcacagggtcggactcggaccacacggtggcgtgggtgggtgggtggtgcgttgaggaggaggtgagatgagatgagagtggggtatatgtagagggaggtggggtacgtggggaggggagaataatggaggatagaaaagccagggcgcggggtggggtgagatgagagtgtgatagggtcatagggaag

SEQ ID NO: 78915 - DNA, 516 bp, Zea Mays
ctgtgttcacctggagatttaagaccactaatatgttattttttcttcttctgttcttctggcttgggaggacacattcagcctttgggccatgtctgtcttcacagctcggccgacactactagctaggcccaagaacttgttgggccagaatcactgtttctatcttctaatcttaatacatcacacctgtattggtcttattagcctgcccagctcaccctctgcatccttttcccttccttcttctgtttcttttttttttctttttttcttttttttgtgaaacaactcttcatagtctcgtttcttacggaaagtgaaatgcatccgttttccttgatatacatgtacttatgtagtaggctattgcattgcatacatgtatgtagtacagctagtgagcaccatgaataatggatggaggaatcaagcatgcaggtgcagcacgtcagctcagctagtgctagtgctctgaattattattactgacgcccgcaaacaaagaagcaagcg

SEQ ID NO: 78916 - DNA, 407 bp, Zea Mays
aaaaaggggagaactttaattcaactacacactcaaaataataatatattgaaataatgaggtgtgtgtgtgtttcatgttgaaaacatcgcctaaataaaataataatagtaaataaaataactaaataaaatggttagtataaattatacctacaccatgttggatttttttgtatgtgcatatttgaatcgaggtatgaattttgaaactctggattgaattcaaatttagaatttggaaatttaaatagaaagaaaaacaaaaaaaaaataaaaagaaaaggagacctctaccactcttgggcccaaacctccctctcggcccagatcaccccagaaccgcagcccaccgtgcgccagaaaagtcaccctaacgcgcaggacccgcccggtcagccactctgc

SEQ ID NO: 78917 - DNA, 217 bp, Zea Mays
tgtcaggcaactttgcaagtacaacctccctccaagagaacaagagctagaagctttcctcccaagacacatactactctttcaacgctttctctttgcccttccaaactgtattgtacccaatagtgacattatgactgccctgttgtgtttcttgcaactctttagcacccatttggtgtttcttcatgagcaaagatagagcgtggaatgcaac

SEQ ID NO: 78918 - DNA, 173 bp, Zea Mays
ctcgtgcggcttgagtaagcgggatgcataggcaataactttctcattttgcattaagacacaccctaagccttgccttgaagcatcatagaagatgacgaaatcctggtgtatatctggtagtgtcaatacgggcgcggttgtaagcttctccttgatgatctggaaacttt

SEQ ID NO: 78919 - DNA, 287 bp, Zea Mays
tcaagggaaggatggacttgccttcgtcgaagctttcctggcacaaaagatctacttccgggagatcgggctccggcccttcttccggggctacgggttccggatcaacggtccccgcttcttctagtaacacagtcaataaaacaatacatcaacagtggtttaccaattgtagtgtgtcattttctaacattattattacatgtgactttaggaatcattttgataatttttggtgcataaaatattgagaaatactaattagaggagaaaaggctgaaaaagga

SEQ ID NO: 78920 - DNA, 308 bp, Zea Mays
tggcaaatgaatataagtcttaccatatttgaatttcactataactttcatgatgtctttccaccagaatggcccccttctttccattgttatgtatcaatgtgtcattgcagtggcattcccattggcccatggtatgtcttccttattcaagaacttatgtaggaacttcagtaacaatggctcatcgtgggttcttaaattcagaacttccgtgctctcttcagcttttggtttcctgacagttcatgtctacttttgaaggttttaaagggtgtacgtctactcccctctagatgcaatataat

SEQ ID NO: 78921 - DNA, 1228 bp, Zea Mays
ttagtaccaccttgctattccaggtgaagtgaggccaatttaaatagttgagttgtctccatgtagttgaagctattgagaagaggaaaggggagaacacacacgctcgctcattcacctctcgtctcctcgctgggtgggtggggtggtctggcgatttcttgcttctaaccttatggttacaggtgcgcgaatttcttttgctacttgatatttttgcatgcatggagaaaattttgctgacctgttttgataagaaattattctcgcattaattgtgattgattgcgagtaaatcacgttagtgttgtgactacacgactgtttacttgcctgttttgccgcgtcgtgtgtgtaaaatggggccgagacgtcgtcctcagaatagagtttttcagcccctcgttccatcgcgttgtgctgccctcgtcttccctatcctgccgtcgacgtgccatcgaagttgggagagcaggatctttgaagcctacgcctcctcgtgtccctgcacgtggtagaggccatatcaagtttttgggaagcgccgtcgcgaatgcttgctgttcgtctgctttctctacgtcgacatcgtggttctcgtcggatgcttcgtctactcttgtattgttctagctccgacaagctcataatgtctatcctttctttgttctgtattctcatattctttcaatcactagcactagattatgaactgctagtgagttattcgacactgttgttcttgttattattatcggaatcaatttgttcatcaataaattgcttttgtttcggaatcattgaagacttggcataatttactttcaagcctgtggatgccccaaaagtttgaaggaggcgcttcagtattagcagctgccttgttgatttacatactctcaagttgggtgctcccggcggataggatccactcttaggccttgtttgtttctaccggattggtgggtcggaacgattcctagccggattgcttctctaatttatataaactttgattagctggaacgattttgggtgcaatccgacgtaaacgaacaaggccttagtctgcagccgttagcttcagttgtacatccactgaagttagttatcagcttcactagtagttggagttagttaggcgttacctctagctaagatttttatatcgaatcaaaattcgaatttttagaggacttcgtggagtagtatgcttttcttatgaaaa

SEQ ID NO: 78922 - DNA, 526 bp, Zea Mays
atcgatcagctagctactggagtttatattagctagcttgcgtgcaatcgacgacgcctcacagcctcagacaagtgtattcatgggtggatagggtagaatatgtgtgtgtcaccgtggcggcggtagcgacgatgacgaggaccaagaccgaatgcgaataatattggggcgggccatcaagaccgaccagcaccagcaaactgatcgaatcacgccgtcgaggttgcaattattagttagttcattaattaatagtctaatctcaacgagtaaagatttcacctgcgtgcactatgagcttgctgttttcttacagatttggacgcctagctttgcaatatatataagggctagtttggatactttgggattagagtgtttcgaagggattggagagggtgcaaatccctaatacatcaaatactctcccaatacatcttaattcactctaatctcactcattactagagtatgcaaactagatttaagggatgggtagacaagcaagaacataatctcaaag

SEQ ID NO: 78923 - DNA, 427 bp, Zea Mays
ttttgaactcccacattcgcacagttctcctatctcgcgtatataagctccattcggtcgacgtcattggttctgggtaagatgtgaagctacggtttctactgttagccaagcactctgtttcacttcttgtgtgtataagcaccgaaagagcagacctccaaaatgagcgtggtttaaaaatttatccgctctggcgaaggacaacaatcacatttttgcggcgtgtctggaagtggcacaacagctcactttatcctctatttcccgttgatatggtggtgatcagtagttctgcacgaccatctaactgcattgcatcaatcaagacgactacatcgaccgacaatcagtggcggatctagaagggggccagccccctgcgccggcagctacaagtaggagggagtaagggagaggaagaaag

SEQ ID NO: 78924 - DNA, 325 bp, Zea Mays
ctttactcataggatgaaagtcttgttcctcactaatttatacatgttcagcatgctaataagatcacacgtgcatatttctgatgtcaccaaactacaatttctttctttctttttgattaaacggctaccgaaaatgcctaattttacaacagattctcatactgtttatcaacaatactccagctttgtagtggatgataataagatgctcgcacgaggggaggatggagagagtaagccgattttagctttaaccaatactgggtgtcagcgtcaatccacaacagcccgcccgcgcgcatcaatatttgcttgcttgcag

SEQ ID NO: 78925 - DNA, 519 bp, Zea Mays
gagagattgaattttactagaataaataaaataatactaaaataaaaaatgcatcatgacgagtctttgtactgtgcatttaaatctgaactatagtcatgaaactggatgttaaaacttgaaattaaaacaaaaaaataaatgagaaataaaaaacaaaaaaagaaaagagaaaaggaaagggaactcggattgggcctcaccagcccaacacacgacacccctacgcggcccgcgggggcgactggcgccgacaggcgggccccactatgcacgtcctctctgctcgcgcgcggccacctcgctagctctcgttggtaagcggaccccactcgctcatctagacaacgcgtgcgctgatgctcctggtcgccgccatgtgggtccctcgagtcggcactgtagatcctctccattcaaatccgtcccaacagaatcaccgcgagatcttctcacctaacaaacactcccgaatcctcacgttgccctcgcggtagatattgtaaagccctaaatttg

SEQ ID NO: 78926 - DNA, 292 bp, Zea Mays
gtgcttaatcgcgtgcgttgcttagttccgttttggattttacttcgcggattgatttctgatctgtggttgtgtgtgccacggggttttgacctgtggtgcggcccagcccggcctggcacgcccctggtgcccgtgccctcccccatgcgcgcgccccgatggtccctttctctcatttgatttctcccgcgcagcaacctctctctctcccacctctctctctctcccccgtggtgccctaggttttggagacggtgatcgccagatttggtccctgaggtgagctccc

SEQ ID NO: 78927 - DNA, 869 bp, Zea Mays
cttagccgtcgtgccgttaatgaggctcggtgtatgcggctcgctctgccaagttttgttcgccccttagggaggagtgcggtgcatttaggaaacctaacgggcggatacagccctggggaatctttgtaaaggctacatagtgataccctgttgggtcaccttggtagtgatcaatggagagtcatgatctccgggcagaaagggaatcacggcttgtggataaagtgcgcaacttctgcagagtgtttgaaaactgatatgtctgtcgtgctcgcggttatgagcggccaagggagctccattgattagtgacacttgatcagagatgtttgaattacaggtggcaacgagaatgatggttttggcattggctatggtaatggtaagtagtattcttttcgtttggaaagggtacatctgggttaataacttgggttaatgctaaaacctgctttctactagtaaataataacctgaccaactaaaagcaacggcttgacttaactccacataaagctagaccactacagccaaacgggacattttgctgagtatgttgatgtgtactcactcttgctttacacaccaaacccccctaggttgtcagcattgcaaccactgctcaggtgaagatgaagttgtggaggaggactttcaggagttccaagagtatgatgaattctaggcgtgggttagcggcaaacccggagtcggctgactgtgtaggccatgtgtatctacgtttcttttccgcactttgattattgttaaagactatgtggatgtttcggacatcatgatgtaatcgactattataccctcttttatgtcattatttgaggactgtgtgatgatgtccagttatg

SEQ ID NO: 78928 - DNA, 556 bp, Zea Mays
tagagctctgggaaggctgactaaatatatatatgtggcacacaagtcagtaacagataacaacgctgaataagtgttccaagtactcgtcctagttgctggcctagaaaatctaatagaacagttggaccaaggcacaagaaaggaggtacttgtatctaggtgcagcaagaaaataggcttggggcaaaataatcacacaggtgcgtagaacactagcgtttctgtttatgtgctactcttttctttttttctttttttgcgattttttttcaaatatttttttatatatttttctcttttgcagcagcacataagaagaaaacacaccaagatttttttgtgcaatgacgcgccctctggaatttctacaagtttgccctaaaatcggaataaatatttagaaaatgagaagtcctatttccaagccgaatttgggaattttacaaacagcgaatccggcgatgccagaaagaatcagatgcgaaatttaattttgtgcgatttgaaaaaaatgggcccgattcgagttctgaggcaaaatttacgaccattt

SEQ ID NO: 78929 - DNA, 999 bp, Zea Mays
tccctgcgggccgcggtttcctcccctgtgctttgctcgtcgcgccctgccccagcgtcgaccccagctcggttctgtcctcagctcggcctccatttctgcgtccagtcatcggacctccgcctccgcgctgagttcggcaagctcgccggggattcgaccgccgtggacaagatgttgtccccatagcgtgagtcccgtgctacaggctatcaggactctgccgataggcacctgttctggtcctgcgccggttgctgctcacctcgatccgtcctcgtcgcgataattgtagcctcacgcagaccgtccggtggtaaacgacttgcatgtgtgttgatgaggaaggaggagattagttgaagaaagaaaaggctagaattttgctcacctggtgctcggcgagaggcttgaaccaaagcatgtcggtggttcgtgtttatcgagtcccgatgtcgatctggtggtcgtcgatttgaagctctgaacggattcggccacgtccagcactatctgtgtccttgtcgttcgatgctgaccagcatcgtcgtttcccttcatgtgctcatccttcatctccgcctcgccatggcgcgtgtcatcatttttaatttcagcagctctttcgatacgcgcctcaccgtgcttcgcctcctcgtggtcagccttatctggatcacaggagcggaagatctcaacactgctttatatggctgttttagatgctgtttgcggggtagagagtgttgtgatggatggttttcgccctctcgtcgtgttcgcaatcatcgttgatcgttgtcggtttgagagaaatcaccagatggtgtggagaaggaagtgaagccgcacaacatccgtcagatgttcgacgacaagactgagccaggatttatcagcattcttacgagtattgagtaacgtttgacgctggtgagctgatttataattttttaagtttatttgatgattggattagctagacttattagtcgtaat

SEQ ID NO: 78930 - DNA, 439 bp, Zea Mays
cgcgctccgtctccctgacgctcgacgcccagtcgcccaacccaaccgtgctccctccagttctcagcgccgtcccgcccagttcagtagaagtggagccgacatctgttgtcccaatctgatcgctcgcccagcagcttcgccctgcgcgtggacattcgggctgcagctctcgacgctggtcctagccccttactccaacgctcgcccttggtgttggccacgtgctcctcgtccggcccgaccacgacctcgccgtcgttccccagctcgcgggtgtcgtcgttccgtgtgcttggccatcagcgttcgccggccgtcatgacatccccagtctatcgcgtcatgctctggtcgtcgatcggctgactgtcgtgttccctgcttccctcgtcggtcgatctcgccgctaaatccgtctgtcgtgctgtgtgcttcg

SEQ ID NO: 78931 - DNA, 519 bp, Zea Mays
gtttcttgtgacgtcgtgtttgatgagactaacggctctcaagtagagcaagttgatcttgatgagataggtgatgaagaggctccatgcatcgcgctaaggaacatgtccattggggatgtgtgtcctaaggaatccgaagagcctccaaatgcacaagatcaaccatcctcctccacgcaagcatctccaccaactcaaaatgaggatgaagctcaagttgatgaaggagaagatcaagcaaatgagccacctcaagatgacggaaatgatcaagggggagatgcaaatgagcaagataaggaggatgaagaaccaaggccgccacacccaagagtccaccaagcaatccaacgagatcaccccgtcgacaccatcctcggcgacatccaaaagggggtaaccactagatctcgtgttgcttatttttgtgaacattactcttttgtttcctctattgagccacacagggtagaggaagcactacaagaatcggattgggtggtggcgatgcaagag

SEQ ID NO: 78932 - DNA, 1016 bp, Zea Mays
caactactttggatgaggcaaacccttagggactacggttacaaattaaccaaagttcctcttctatgtgataatgagagtgcaattcgcatggcagataatcccgttgagtatagtcgcactaaacacatagccattcgatatcattttctaagggatcaccaacaaaagggagatatcgagatttcatacattaatactaaagatcaattagctgatatctttaccaagcctcttgatgaacaaacctttaacaaacttaggcatgagctaaatattcttgattctaggaacttcttttgttgatttgcacacatagctcttttatatacctttgatcatgtctctttcatatgctatgactaatgtgttttcaagtctatttcaaaccaagtcataggtgtattgaaaggaaattggagtcttcggcgaagacaaaggcttccactccgtaactcatccttcgccgtcgctccacgcaactctccatctttgggagagagagcatcgctcctactttggtataatcttcactcatattttattttaccaaaggggagaaagttacttcaagggctctaatgactccgcttttggcgattcatgccaaagggggagagagtattagcccaaagcaaaaggactgcaccaccacctaattttaaaactaaggtttttcaattggtatgatttttcaatttggtatctccttgtgttcaaaaagggagagagaatagtattttcaaaatcaatatcctaaaaccctcttgaacactaagaggaggatttcatttagggggagttttgtttagtcaaaggaaaagcatttgaaacagggggagaaaatttcaaatcttgaaaatgcttcacaaaatcttattcatctacctttgactatttgcaaaaagactttgaaaagaatttacaaaacaatttgcaaaaacaaaacatgtggtgcaagcgtggtccaaaatgttagaaatgaagaaacaatccatgcatatattataagtatt

SEQ ID NO: 78933 - DNA, 1013 bp, Zea Mays
cttggtttcaagtgtaggagtgttttgttgattgatggcaaatgtttgtgaaatatttgtactaagttttatgcccactagcaggtggctacactccagatcatgtctagtacatttcttcttcctcgatgaaggcaagtgaatgtagcggtggttgcttccgttctgacctgttatttctatcgcctacactctaatattcagaagtatcagattctttcataattggactctatggtgatgctttacttgcttgcattatactgatgctcaatcatatattgatgatgactatgatttgagtatgactcatgagattaattcacacccctgaaggtaaatgaagtattatttgaggttggtattgtatctgaaggtaaatgaagtattatttgaggtttgtgttgtatctgaaggaagtgaagtttattgataaatgtagcatgccatatacattgcatgactcatttgcatatgaagttttgtcgtgacctatggtccgaccgtaccggtacaacttagcatcgtacgttgcccgagaaggggtacgatgcggcttcatacccttagaggtatgaaggcagaggacatatgcattgcattcatatgcattcattgaagtgatatttgcagatgatgtggttttatacccccagaggtatgaagatagagtacctacacattgcattcctatgcatacattgaaatgatatttgcaggtattgttgacgcagggaagtgttatagaacctattgtggttgttcgaggaaatgagatggtattggttatagtgggactactgagttctatatctacaagcatttctgatttttaattgtgactcttttaaaatgttgatgaattcaatttgtggtttaaatatctcgtcagaacaattagcttgctgagatgtttcatctcactcttgcattactcaatgcaggtgcttgttgctcatcaaggggagtgggaagtagcagcacatccaccttcattctcataataatgctgc

SEQ ID NO: 78934 - DNA, 2689 bp, Zea Mays
atgtttagttcgccaatgtgtctttgtatatcttgtgctagtttcattatattcatccatatgcatcttgcatctcatttaggaccgagagatgatgatcgtgcaagtgatgtggtgccaaccacaaggtgcagtcggtggacgacccaaggaaggatgaacttaaccagtggatgctcgccgagcgagtacctcccccagcaaacactgtctaagtgttaaattaaaggcaagccccggttttatgcataaccgtttatatatgctattttactacacttaatgtttgtaggcttgtactgtgcacttaagtgtaggagttgcctgaaaccctagttgcatgaactcaggtttcctttgagatggatactagtatgctaggtcgagtagctgctttgctaattagggatcttggtagaagacgagtgatttttctagcactcgcgcgaggtcaggaattggttgtatccactttgataacagaatgatgatggtctgtggacacgggtccatggggacgcgtggtctacgagatgaaaattggaataaggattaacgtgtggatacctgtgtcaagcgtttgaacgtactaaacacataccgagaaatatggtaaatcggtaagcctagtacctgagtgaacctgcccgcagacatatcccctaacgcgacctgagacgtggtctcccattccggttatggtgggtacaagtgcggtcactgcacgacgacagtcggggtcagtgaggcattgtacgccaaggcggtgagccctgatctgttgccagggaatcgatggggacggttgatgtgtgtggggacggagtgcctcgccacgtcgtgtgtttaggtttaccttgcaaggataaaaacttgatttgaatcgtctgcttctcgcagctaatgagactgcttgatccattgtactgcattgagtaataagtggaaatgagatggcaaaagatgttgattgataaaatgtttgataccatgtatgactagctaggtacacatctagtaaagaggttcatactaaaacttgaaaagctaaaacttgattttagactcaactagtgcttttggcaaaccaaacccctcagccaaatagctgcatgtctagaggtagaggagtagattcctcacaccgggtaagtctagctgagtattagtatactcagccttgcttgtggcacaatttttgcaggtaccccccttgatttggttgatggtgtaacttggcctccatccctgccaccgggatagacagtcaagtgggttattgcttccgcaggagaggaccaggaggagtagtgtggacaggcttcgccatgttactcggttcttctccgttagttatttccgctgcattaaaatttatggttattatttctgaaactccgataatgtaatcactaatgatacttattaaatttgtggtattatgttttattgtatttctctgtgcctcaccttcgtgtgagctagtggtattcgattctggataagtggctttatcggactagatccgagggactgacgttttattcctatttaagtgtggtctagcatgtaaggtgggacttaggcacttaagttggaataattcgggtggttccgccacaactgccttacattctgaccccttttgtttgattgtctcctgctagatatgactcggcagatttccacttttgaagaaaaacattctcgagatcaggctgaactggtccagcggtgctctgattttgaagaaaagtattctcaaagccagactgaactagcttaggtctccgctgccttagatgacgccaatgcactgagctcttcccttcgcactaagcttgattctgaaaaggtgacttatgaaactgtgccttgccttattgtgctcctattgcttgcttgatgtttgaaagagttgattcttgtttgcaggaagaaaaatgtgtccttgttgcttcccgcgacaatcttgacagactgtatcgtgattccagcaactcattgaccatattggagaggagtcatcgcttcaccatggaggagttagacaaccatcgctgtaagctgcaggaatccgcggatgaggtgatccggctcaagcaattgatatcggcgaaggatgctactatcaaagaactccgtgcttccaagaaatccatcgcccaggagctagaagccgctcggttggctgccaaggttgctgaagaaacttccattactctgagagcccagcgcgacagagccatggataaggccattcgggcagggcaaatcttgatgaggagacccggcgtggttgttcccgaagatataaaggctgacgtgaatgctgctcctgattccttgagtcgcccttcctcgtcgattgctcctgagaaagatatcacgaaatagagaaatattttgcgtgctttgagcgtgcggttagcatggtcggacatttgttagaggacaccggtttagcacttgaatgatattgttgttctcttattgtttcagaattcaacagtacgtaaatttgaagtagtaaaatgatgtgtgatggttttgaaactgttttgtaggacatagaggtcatcctacgagtaattgtaagcacgtcagatcgccttaagtcgctgctgacttaagtcgattgcttctgttgatagggcgtagtggtcaccctgaattacgtaggcgcgag

SEQ ID NO: 78935 - DNA, 182 bp, Zea Mays
ataattataaaatattacacacattgtccagcaaaacattacatttcaaatgtcttcaaaataacagctaatcttctcttaaaactacttcgacagcttcgtttaatagttgatcaacaactttatccataataacttcgaccattttctattcgtcatcctcctttgctttggggttcgcc

SEQ ID NO: 78936 - DNA, 1470 bp, Zea Mays
agtttctgaactacaatagatgaagactcatattatgtgtaggttaactttagtagttggatatttttcttagttcagatgctgaatgaagtatagtgacatgggttaagcaagtattgtgttgttgttgggctgttagtgctctatgtagagtttttgacatttcttcgatgaactgtgccgcgcaagattttattggcttcttgtcggctttattgctccattagttctatagattttctcccttttggtggggtgcaaagtatgttagattacatgattatctttttattatagcaagaacaaggtttaggaagagtaggagttttgtttcaatagaactacttgtttcgtggtgctgtgaggtgaggtgtttgatcttcttatacattcatctagtgtggatgtttcaccattgaattaaaatgaattgttgaagttggtaaaggttgtgcttagtgcatattaccccttcataaaagagtgtcgttttaagacattgatgctgatgtatggctgcatccaaattcgatgttgtgaaatcatagtgttgattgcatctatgacttggtttcagcttcattaaatattggttcatgcttgatgtcaggttgtgtagtttccttagacaattagttcaaggtagaagttcttgtgttaattaagaccaataatggacccatgtttcgaatggtggtgctatatggggtaccttgggtgttttgcttggagtggtcgaattcgaggacgaattctttttaaggggggtagagtgtaatatcccaaaaaaagttgccaaaggtttatcttcggtgcgtggatgtggggaaagagttgtgggccgttggatgcaaagtcaagagacatctgaggcgtcgtttctttctcccacaaaaccctagtggtcgccccccctatttttcccttttcttggccgccaacccccccttttccccacccttggccgcccctcccccttccccttgcagccaccctccactacttccttctccctctagatctccccccacgcagcaaggatcgagaagaggaggagcaagatggattgaagaggaagagaggatcaaggagatgttctacccccatctcttgcagattttcttggggaaaccctaggtaaggataggatccttgttcctccctataattatatgcttttggaggttgtggatcatgtggattgaaggattagaggttggattagatgtggggttaggttttgatctcgaatttaatttctgcagaatggcagattcgacagtttctgttcatgtcagtttttcgtggtcttagtggcctcaaaaaaataaaaagtctatatatgagtcgtagataatttgtagatctttccgtggccatgaagaacacctcaatcggacatcagaacagaaagttattgcagtttgattatagcagtttttcagtctcataattctgtgcagaatctgt

SEQ ID NO: 78937 - DNA, 1301 bp, Zea Mays
aagctttccagattgttaaagagtgtattcatatgatttatcaaactccagttatgtttgttttactgtggctgttcctgtttgcctgacaaaaatgagcgggtctgttcactggtgggtttcatctagtaaatggtcgaattgactcttccaactgtggagacttttgtagagggataaaagttcttactgccagcagaatttcataatttttggttcagtagtttgggagatatcgaattttgaagttaactaggctgctgtctaaaacatattcagtcagttatcttgtcagatgttttagaatatattgatgacagaatttaattatccattgaataccgaagttgtagattgttttgtgtagatactcttagagtatttctttgatatcaccaatgttttaattttaaagatacaaaattaacaaacagcgtgctgctgctgtatagcatgtggttcagggtgggagtcttcccactaggtcttggtttcaagtgtaggagtgttttgttgattgttggcaaatgtttgtgaaatatttgtactaagttttatgcccgctagcaggtggctacactccaaatcatgcctagtacatttttcttcttcgatgaaggcaagtgaatgtagcggtggttgctattgttttgacctgttatttctatcacctacactctaatatgcagaattattggattctttcataattgaactctatgatgatgttttacttgattgtattatgttgatgctctatcatatattgatgattattatggttcaagtatgacccatgagattaattcacacccctgaaggcagatgaagtcttatttgaggtttgcattgtatctaaaggcatacgaagtattatttgaggattgcattgtatctgaaggcagataaagtattatttgaggtttgtattgtatctaaaggaagtgaaatttattgataaatgcagcatgccatatacattgcatgactcatttgcatctgaagttttgtcgtgacctatggtccgaccgtaccggtacaacttagcatcgtatgttgcccgaggaggggtacgatgcggcttcatacccttagaggtatgaaggcagaggacatatgcattgcattcatatgcatacattgaagtgatatttgcagatgatgtggttttataccctcagaggtatgaagatagaggacctacacattgcattcctatgcatacattgaagtgatatttgcaggtattgttgatgcagggaagtgttatacaacctattgtggttgttcgaggaaatgag

SEQ ID NO: 78938 - DNA, 534 bp, Zea Mays
cttttttttattcttgcatttttcacaaccggaatcatattttataactctataatacatggttgataaaaagactccctaatttataaacaaaatataaaaacctagttacataattaggatgaaccacttagaaagtgagatgaatttcatgtgaagcaatttaaaggaaaaccagcttgtctgtttgtgagattaccttaatgtgcattgtgactaaatactacatgaagcaaatgggtgataatagtagtgacaaggtcgatcttcagttcttcacgacatagtctttacagcttgtcggcttcttgggggcacctagagggggtgaataggttattctgtaaaaatgacttaaaacacataaacttggtctaataataaagttagtgaaaactaaagccaagtttgagagaagagaagacaaaaagtcctcttcacttgattgctcttccaagataagaattgtatcaagatcaacatcacaagtgagaagtagagaacttaggaagaagaaaaatcacaataaagtaa

SEQ ID NO: 78939 - DNA, 1289 bp, Zea Mays
cagacaactacagtgattttataattaaaattcccgagaccgagcagaacagctaggtcgcatggacctagtctagcgcaagccaaaccagtgcaagctgagctcttttgagccaaactttttcggctttctttgagggctttcctatgacttagacaaacataattagcacataattcagttgactaagtgttgggaacttacctcttctccttagtttcatcaggttttcaatatggctcaactcaagtccaaaaagtgcttttctgtacaaaagaggttagatcccaaacacaagtactaataggggtgaaaacggtcggaaacgatcaaaaaacactaaaatcgttactgttttcatattttttatcagaaacgaaatcggaaacggtaacttcggaaacgaaaacgatatcggtatttcggaagcatcaaaatcgaaagttcggtacgaaaaatacatcggtatcggtcgaaaccttaaatacaatcggtaatcatatcaatatgaaaatatctcaatataacgagttcataacacaatcggtaatcacatgtatgctggttgtaagagagcacaataattgtaattttggttgaacagtctgctcctctaaaaatacatataaaaagtactgaaaaatacatataaactaacatgtcacatgtatgcagtataatttgtaacctgcaattatgaagtaaagtaggttcaattaaaacgtgctaagaacatagaagagacagctgcaacacacttttaaggacatatgtggtttatgatataacaagttcacgcactgttttacatgcaaaatgagtcttcaccgtgcatagattcaaagcgcaaaatatttgagcggtgccacatccttggtaatgttgttcgatcaaaaaagacaggaagaaaaaatggtccaccatactgtggagtgcagacgcatcatgcatgagcatgattacttgattagaacaatactctatatgtatactacacccctgcctaccatatcattgatttagcgaaaacatagcttctggctccatcctacgggagatgcctgaacatggctggttattggccaccggcatctggacgtgtcgggtgtggcgcgcgcgggaagagaatgacagcgactcagccatggagccatggaggaggaccggatgagggagaatgaaacctgggaatggtcgatggcagcatccaccgtgctgcgccgccgacgttccaactaccgccgccgccggacacgaaccaggctagtatacccgttccaccgttccac

SEQ ID NO: 78940 - DNA, 1538 bp, Zea Mays
caacttcttcccagctccccctgcccttttctgttttatatcgcgttcctaaacacaggccgacagttaacagagcattccatgtatacatgctctgttctgtgcgcggctgcgcccagacccagaaccagcagcgcagtgtacattactctatattcttgctctatatcacaattcataatttagtcatcaaaatttcttactctatattacaatcattcgtacatatatccctccatattccctttatatcaactaatacacattctaacctaactattttttctctctatataacacagggcttttgctgcagccgatatggatacatgaagattttgtgtgcgctgtacatagtgctttactttagctagataggggtgaaaatggatcacgattcaaatgcttcttcacaaaatggtatgaccctaaataaattttagttcaaaaatgaatagaaatagagttcgattctaattcgatccgatccttaaatcttatagtgtaaaatttagagtctattgtcacctctagctacatagctatacaggaaaatgtagcgtgcagcggtgcaagtttttttacgctaccattcattgtatcagtttaccgtgagttttcacgcactgtagtgcagatggtctaagactgtccgcacctcatgtccctagcctctataggggatacaatattaccttactcctgcatcgcctcctcttcctcgcccccttagtgacgttcccttctctctcacaccaggcgaggaggagccctattcatccctagtcggtggcttctcgcgaacggaaacgcccgcgcgcacgcggagaaacatcctgctcccttccattggcgttgaagtcgagcaacgacttcaggagaccgaaggcaaggcgacagcacggttggtgaaagaaggcggagtcggatccggtggacgacgccggcgcggaggagcaacaagagaaggcggctgtggtgtttcggtggggggcagaagtggtggattgtgacctacaaccgcgacaaccatcgccgccatcgtagttcgtcgtcgtcgttgtcgtcttaccccctctagaagtcgtggccgggggcgagatctacttctcctcccccaatcttggtttcaacgaccaccgatccagattccctgaggtaagacctatttacgttgcctttgtgtaggttataagtggaaggtggaccgactccccttccatgtctcggcgacaggctttggtcatgctgcagttttcaagatgtcgttggtcctccctgtctctgtccgatgacgggctggatgacgtcctagagggctataataaggtggtcacccttgtggtagcaatatatttttcaggtggtcgctccatgtttcaattaacaaagtgatcttatcatgaacaataaataatctattaacaataatgataaacaggatcatgattcatatatagtattaatctcaaaaccaggtagagcaataccaagactacccaacaatttatttgtatacaaggtgtagggtaaacaag

SEQ ID NO: 78941 - DNA, 200 bp, Zea Mays
aaattactggttttcggtacttgccgatcgagacaggcaacactgagcgcgctccactcatgcagtttttaattgaccaagcctcggaccggtacgcgcggcaaaaataaaaaaataaaaaaaaacgtatgcacagggcacaacttatcgtcacccctgacggaggacgaacacgcgaacaaacatttttcaaacaaatc

SEQ ID NO: 78942 - DNA, 422 bp, Zea Mays
cggctgctggcctcctggcgttcggttgaagcaggggaaaggagagatagagaagagagggaagagagcaggagagagggagatgggagcaagcggcggctggctacagggagcgcgcgacggctgactcctagggtaggaggcggccggctgggagatgggccaagtgggccttaggttagggttgggtttttttttctttttttttcgaatttctaatttagaatacacttttaaataactctaaaatttatagtaattgaaccaaaagtatttataaataatatagttatctttggactgattatattatttatttactaggatttttatttaagaagaaatgttattcaataacgaaaaatcaatcatgtgcgataaaaaaaattactccaaatgaaataaataatgaacacttcaat

SEQ ID NO: 78943 - DNA, 298 bp, Zea Mays
gctgactcctagggtaggaggcggccggctgggagatgggccaagtgggccttaggttagggttggttttttttctttttttttcgaatttctaatttagaatacacttttaaataactctaaaatttatagtaattgaaccaaaagtatttataaataatatagttatctttggactgattatattatttatttactaggatttttatttaagaagaaatgttattcaataacgaaaaatcaatcatgtgcgataaaaaaaattactccaaatgaaataaataataaacacttcaat

SEQ ID NO: 78944 - DNA, 419 bp, Zea Mays
tatgatccaacaacatgcgtcaaccactcaacctatgttacttagatgttcctgtctttgacagctacaggctaaagtttcataacatccttttttttcaggaatcaagagaactaaaacaagaaaagatttgcgaactgatcatagataaatgtccagagaaatgtaccagtaatcattcctgctgattaaagtttatataaattagacaaataatctggttgggaatggttgcaacgattccgtgaagtgaaaaccgaacgggacctggttactagcggtaaaatctgcccgcccagattcaagagcaaaaaaaaaaaaaaaaaaaaaccctccttttgactccagttacccctatcgcacagagcaacaattcagacgaaacccctcgcacccaatatgcgagtgtaataactcgc

SEQ ID NO: 78945 - DNA, 282 bp, Zea Mays
gctgcttctccccgaaaaaaacgtttaaataaaaaacaaaacataattataaaccaacacgcctgccaccgaccgatcagacgaccccttccaagaggaaatccaccaccgcggccggggcctcccaggagatctcgccggaggccgcggcagcggcggcggtggggggcgatggcgctcaacatgaagaccctgacgcaggcgctggcgaaggcgtcggctgtgatagagaagacggtgtccacgacggtgcaagaggtgacgggcccgcgcccgttgcag

SEQ ID NO: 78946 - DNA, 1311 bp, Zea Mays
ctttcaaccacttacaagagctaggcattcaattctagacacactcaagagatcaaatcctctcccaaattccacacaaagctttagtgactagtgagagagatttgcttgtgttctttcgagctcttgcgcttggattgctttcttctttcttgattcttcattgcgatcaactcacttgtaattgaggcaagagacaccaatcttgtggtggtccttgtaggaactttgtgttccaagtgattgagaagagaaagctcactcggtccgagggaccgtttgagagagggaagggttgaaagagacccgacctttgtggcctcctcaacggggagtaggtttgcaagaaccgaacctcggtaaaacaaatccacgtgtcacacctcttatttgcttgcgatttgttttgcaccctctcccgcggacttgattatatttctaacgctaacccggcttgtagttgtgattatttttgagaatttcagtttcgccctattcacccccctctaggcgactttcagcttttgaccggcacacctggtcaatcgagtatcattgtgtagtctaccaggatagtcgtaggaattacctagaccgctgggaggctacctgtctggtgcgccgtacggaagatgatctccggggtgcagatgcctgctcagagcactatgccatctctgaggggcctgctcagagcactatgccatctctgagagggacactactgagacagccatgcaggatgcttgtaacaccccgtccattctcggaccggcggtacttactcctggcagctctctaggatcatatattgtctccatagacaaacatgggtcttttgtgtgcactttgtcctcactcatgcgcacccgagaaaacttctcggttggtcacccatcccaaattgcttcaagccaagcacacttaacttggaggttctttcgagataggcttccaaaaaagaagatgcgccttattgatatgagtactctattaattatattaagacttgggccagaatatcaccatcccctagggccaggatattacgatccacccccgtagaaggctgatgtcctcgtcggtcaatccaagccaggaacctccctttcagccatgtctgcgtgtctagtgtcgtcatatgccttatctttaagactttctgcagcagtctattcaaagtttacctaaaaacactgttttgcacttagactacactgttctcatagtagagtttgaatattgatacgaggataagtaagctgatggagatagcctaattagagatgctacacaataccacaaccatca

SEQ ID NO: 78947 - DNA, 932 bp, Zea Mays
gtgagaactttgagatagtcttttgagctcgattcttggccgtgtgtgtgcgcattttgctgtggatttgtgtgtgttgcttctctcccttactccgtatttctttgtgaatctcaagtgtaagggtgagagactccaagttgtggagattcctcacaaacaggatattgaaaggaaaagcataacactgtggtattcaagttgatcattggatcacttgagaggagttgagtgcaactcccgtccgttgggacgccacaacgtggagtaggcaagttttgtacttggccgaaccacaggataaattactgtgtcttctctgtgttgaactccttgtgattatcatattgtgcaagatcttctctccatccacttggcattaactgtgctaacacttaatcaaagttttgtggcttaagttttgaagtttacaagatcacctattcaccccccccctctaggtgctctcaattggtatcagagccgttctcttcaagaaagggactaatcgcccgaagagatggatcctaaggggaagggaatcgtgatcaacgacaaggaaaaggagtccttcgtcaacgagccaaaagatgacaaatccaacgactctggctcgggccacaagcgcaaagatgggaagaagaagaagacaaggcgcatcaaggaggcaagatacgtggacgacgccttgaatggaccgatcaacgagcatcaaccccttgctctcaaggcaacaagaagcaaggaggcgctacctagcaaggtggcacaaattgaggcggccggacttaatgatgaagagatggctctcatcatcaaacgcttcaagacggtgctaaaaggtcacaaggggcagccaagcaagaccaagacaaaggggaagcgctcatgcttcaagtgcggtaagattggtcattttatcgctaactgcc

SEQ ID NO: 78948 - DNA, 1372 bp, Zea Mays
ccccttatttccacacttatattcaaacaaatgctatcggctcgaatcctaccaccggctgagtcaatttgaatgggggttgacatggtagtaatcggaagattatgtgcttctacccatgatgcagtaatgaaagaatgcgttgctccagtatcaaataacacttctgcaatatgggagttgactgggaacatacctactatcatgtcgggggtctcctgagctgcttcagcctccaagtggttcagtcttccatgattgtaacgcggctgagagcggttgcctgctccaggctgaggcacattctgctttgctggggcattggggcctgactgctgctgggctgccttcttcggacattgcatcacccagtggccttgctctccacagtggaaacatgctctgtttccaacctgagctggtgctgcctgattgttctgctggtttgctggggcaggaagacgaggtgcttgctgattctgcctctgaaactgacctcctgactgattgctctgacggttctggtactgatgctgaggatactgcctttgaaactgttgatgctgctgaggtggacgctggttctgcctgaactgctgaggttgattgcttgagaaacgaggacgattgctgcttccaggctggggtccactgatcttgcgcttacgatcctccatctccttacgcttcctctctgtcatgattgctttgtcaatcaggtgctggaatgtcgagaaggtgtgattcatcagttggtactatagagggtcaaccaagcctctcaggaaacggtactgtcgcttggtgtcggtgttgacatcttcaggagcatagcgagacaattgcagaaacctgtcccggtactcactgacagacaatggcccttgcttgagggccaggaactcctccttcttcactgtcatcagacctgcaggaacatggtactgacggaagctttctctgaactcttcccaagtgatggcgtcagggtgggcatgggtggcgaggtaagactcccaccatgactgggctgctcctctcaacagacggggaccatacaggactttctccctgtcatcgcactgagcggtatgcaactcccgctccacagtgcgcagccagtcttcagcatccatggggtcagaagaatgagcgaacgttggtggatgacctctcatgaattcagcacgcttgtctctgggcatctgaggcatctgaggctgaggtggggcctgctgctgctgctgctgaatggcggccagagtctgaccgatggcttggactgcctgagtctgcatcagaaacatttgctcgatggacatcgggggcgggggcggcaggtgctgttgttggggcacctcatcctgctgag

SEQ ID NO: 78949 - DNA, 356 bp, Zea Mays
gtacacatcaacatactcagcaagtatcctgtttggctgtagtggactagctttatgtggggataagtcaagcagttgcttttagttggtcaaattattatttactaatagaaagccaggttttagcattaacccaagttattagcccgatgtaccctttccaaacggaaagagtaccacttaccagcaccaaagtcataaccaaaaccatcgatctcatagccacctgtaccataatgtctctgatcaagtaccattaatcactggagctcccttgaccgctcataaccgtgagcacggctgatatatcagtttttaaacactctgcagaggttgtgcacttttacccacaagcc

SEQ ID NO: 78950 - DNA, 182 bp, Zea Mays
atccggatccttcctcacccttttcgccaggacaagggcaatgcaatctaccttgagcgatagggaggcaagaagaagtgcaaacttgataaagctattcgagtagcggttgcagcagcatcggctgagagagtagagcagggaggacaaatgcatattggctctgatcaaattgcttacat

SEQ ID NO: 78951 - DNA, 272 bp, Zea Mays
gtcagattattatttactagtagaaagccaggttttagcattaacccaagttattagcccgatgtaccctttccaaacggaaagaataccacttaccaacaccatagtcataaccagaaccatcagtctcattgccacctgtaaacccaaatgtctctgatcaagtaccactaatcactagagctcccttggccgctcataaccgcgagcacggctgatatatcagttttcaaacactctgcagaggttgtgcactttacccacaagccgtg

SEQ ID NO: 78952 - DNA, 327 bp, Zea Mays
ggcgcttctgtggtgttatcgatgttttctaacttgctagttagctcattgttatgaatacacaaatttttcattttttcaagcaaactttcataagcctcaagagagaaatctagcttcgattttagtttttgattctttttaatcaaactttcatcggtagttgaggatggagcattagtttccaatttctcaattttagttgttagctcaacatttaaatttgcaaaagtttcaattttttctagcaaattcttaagctaagcaacttagatttgagcaattttaattgagctttttgtttagtgcaaacatccttaaataatt

SEQ ID NO: 78953 - DNA, 282 bp, Zea Mays
aaacaactatgcacatgcctaaaccttgatttgtggcttatgttgggtttcaactccagtctaccctaacttgcttggaactaaaaaggctttgttgttattgttgtactccccccgtcccaaaatagtattcgttttagctcttgatttatgtctatattcaaatgagtgactatgaatctcgacacatataaaacgcatacatcaaattgttgtatgaatctattagttatctataacaaattttaatttgggattgagggagtatttgcttgcattgtg

SEQ ID NO: 78954 - DNA, 154 bp, Zea Mays
ccgcattgacgcggcacggcgcgggggctcaacctcgtgctcaagtgctcaacccgaacttgcgataggatgcgatgagaagtcaacccgatgcaagcggtggacacggaggcaggcaggcaggcagcggcagccggcagggacaagcaaaaaa

SEQ ID NO: 78955 - DNA, 550 bp, Zea Mays
ccggcgtccgcggttggctacatgctacagcgtggaggtggatggatgggtgggcaggagcaggatgatgccctcggtccgccggcataactaactgcacgcgggcgtagcggcagacgaccggaccgaggcacacgtatttcatttgctgctgctggtgatgccggcgggggcctgggcagatcactgaatgaagcagtgtctgcagattatcgtactgcgtagtactaggattggtagatggacaagaaggtacttattcacacatagtagctagtaatagcgtcagtagagtagtagctgttgcacgtgctagtatttaccactggaacggcgcctgtcgcgaccaagcgaagcgttgccgattgtcgtactgccctgccatctctttaagcgacgcgttgctgctactactactgtgttcggcctccacttcccagacacaccaaacagacaggcgtcgcgactcgtgtcaacagctaccagcgccgcccgtgcctgccttgcctagctcggcggcaagacgacacgcgccgccgccgcccagtcg

SEQ ID NO: 78956 - DNA, 379 bp, Zea Mays
gcacgcagcagcggcaccggcaccggcgcggcctggacgggatgagccgcggcccggaaacaactgcaggcctgcagcgcgccggtgggagtgcgggacgacgctggcggctggcggcccgacgcactcggagctcggcgtagcttgttgaggatgaggagatggataacctaatgtcttattgggccggctcaaggtattgctcaggtaatactgggctatactgggccctccgtctctgatacgatgctagtgctacagaatgagatctacgtactagggtccttttggaggctttgggggcgtgttcagacgactctgaccgacgttaagagcaaagtttaatatataatatagctaatagtaggctttataatat

SEQ ID NO: 78957 - DNA, 553 bp, Zea Mays
aaaagccccattttcattgacacttccatcaaaatacaaaaggttgttcattatgaaccattttacaatgtttttcctactaattattactactactaaactatcgctatcctaaactacctactactacttaagtcggtgacacttcgccattggcatcatcgtcgtcgttgcccttgccctcgccccatcactgccaatgccatccttgccaccctcgctgccatcgtcgtccacctcgtcatcgtcgtcattcttgtcctcatcctcctactcttccgagctggcgaacccagctcgctcgacagccctatggaaggcccactcgacgagggttaggcccttagagtaagagtcggagctcaagggggcatgagaggagtccggtcgacgttggagctcaagcactcctctaagaactctgagtccccgaacgactcagagggtggtgaaggctatcgctttctcttctttcttggaccgaccatttcttcaaagagaggaagacgagtttttctcgagtactgggagagaaagaagaatagcaagcaat

SEQ ID NO: 78958 - DNA, 465 bp, Zea Mays
atatttttgactttaaataatcatcaacttcaacttaaaaacttgttttagttgatgtcacactgacatagtaaataagatctaataagaaatataaatattaacacaacaattcatttctctaataacatactaaaaaaactccatggcggatattgtttcatctgataaaggcaattgcacaatactaagctctttacttagattatttcaatcaatataacatgagctattagaagagaaattgttagccaatttattataatggtcttttagttcaatagaatccaaggacctcaaggttgtggagctcatagacacccaactatacttttgaattattcgagttcttcaaatatacttttaataaactaattgcaatatcaaccataactaagaattaattaaaattaaaattaaaaaagccttctcaacttcgagattttctttctcataatcggttcc

SEQ ID NO: 78959 - DNA, 527 bp, Zea Mays
ctcgtccgtatctcgcgcatagctcagacccgttctccactgcgccaggatcgcgtaccaggtgccgatataaacagaccatcctcttgttcctcctcccctctttccatgcctagccgcgcgccattcatcgctaccgcggggtctctagtcctcgccgcgtggtataccttccccgcgcgcagattgaggtgggggcatccgccaccgccgagctctggagccccagctcgagctcttcatcgccatgccgcgctgggcacggccatgaatttgccggggcggagccgtgctcgacgaacgctgatggctgggggttgccgccgtgggtgtcgcgtgtgcacatcatcgcgggattcgctgtgcgtagtccagggccgctctggagcgcatatgaccggaggatggctccaaatcttcgttggggtcatcgggggaatccggaatcgctcgacatggcaaagtccgccgcccccgtccactttcaaacatggctagacacattcaacgtcttcaccatcggtgag

SEQ ID NO: 78960 - DNA, 116 bp, Zea Mays
acgttatcaaaaccaccaactaaaactatctatggcattatttgtctagttttgcaaagctgaataggttaaacaaacggttttgaaagtgagggttacatagacttattctgctt

SEQ ID NO: 78961 - DNA, 565 bp, Zea Mays
gcgtgtttacgttacctgtcagcgacagcaggttatggactacagtacagtcgaggaagaggcagtctgaaattgattgggtattcagacagtgacttagccggtgacattgatgatcgccgcagtactacaggtgctatatttttcttggggggagtccagtgtcatggatgtctcagaaacaaaaggcagtggccacatcgtcgtgtgaagcagaatacatggcgagcgcagccgcggcagctcaagcagtgtggctgcagaagctacttgaggaggtcgttggcatccctgctaagccaacaattattctcatggataacacggctgctattgcgttggcaaagaacccggttcaccatgatcgaagcaaacatattgatgtgaaatatcattttaccagagaatgtgtggaacgtggtgatattgaattggtgcaagttgggactgatgaacagcttgcagatacgttcaccaaagctttgagcaggctgcgtttccaggagattcgcaggaagattggagtcgtttaggattccagattatgggaagcagaagtaggggg

SEQ ID NO: 78962 - DNA, 721 bp, Zea Mays
gttgaaatagacccggcctttgtggtctcctcaacggggagtaggtttgcgagaaccgaacctcggtaaaacaaatccttgcgtctcacttcttcactcactcgcgatttgttttcacgccctctctcggactcgtttctagttctaacgctaacccggcttgtagttgtgattaagtttgtaaatttcagattcgccctattcacccccccctctaggcgactttcaattggtatcagagccctgtgcttcattagagcctaacccctcgaagtgatgtcgggagatcacgccaagagggagatggagaccggcgacaagcccgctacaagccacgggaaagctccatcgggagagtcccgcaacaaggggaaggaaaaggaatccccttcacacaagtcacgtcggagaggtgacaagcacaagaagatgaggaaggtggtctactacgagaccgacatctcatctccatccacttccggctccgacgcgccgtccgtcacttctaagcgccatgagcgcaagaagtttagtaagattcccttacgctatcctcgcattcctaagcatacgcctttactttccgtcccattaggcaaaccaccaacgtttgatggtgaagattatgctaggtggaatgatttaatgcgatttcacctaacctcactccacaaaagtatatgggatgttgttgagtttggtgtacaggtaccatccgtag

SEQ ID NO: 78963 - DNA, 409 bp, Zea Mays
cggtcggctcctggcgttcggttgaagcaggggagaggagagatagagaagagagggaagagagcaggagagagggagatgggagaaagcggcggttgtgcaggggagaacagggacggcggctggggagatgggaggctagggcacgcgcggctgttgggccaaatgggccggtaggattaggttttgttttttgtttttttttgtttttttattcccttttctaatttcgaaatacatatttaaataacccaaacattcataataattaaaccaaaattatttataaataaaatattaattcttggactaattactatattatttatttggacttttaatgaagaagaaatgctattaagtattcaaaaaccagttatgagcaattaaaaatcattccaaatacaaa

SEQ ID NO: 78964 - DNA, 157 bp, Zea Mays
cacaaaacatgttcattatttggaaatagtccaccagctacttacacataaagactaacttactaacattaacctaggagtacatgaggcatgttgccaaaagttcacttatccacctcgtctttgatagcaagtagagccttaatgaggttatgct

SEQ ID NO: 78965 - DNA, 162 bp, Zea Mays
accctatttcttcgcctaaattcaaaccaagcacacacttcactcatattgacctatataaacctattcgtgaagtatcggctcaatcccatatcgtttcgtgcctcaattcaaattccaatcatcctatgtcactatttgtctgtcaaacgtcgttttcac

SEQ ID NO: 78966 - DNA, 447 bp, Zea Mays
gcgctgcgctagccggtagtcaggcggcggcggcggctgcttctggaaaaagatccggagtcagatgcttggctcctgcatggtgcgagggaatatccactgctcgtcctcggggagcggtgctcgagtcgctgtcgcaatcccgtatctgcgggcaacagttcgtggttcacctcagccaagattcacgtggccaccgttttttttttgcttcgcttctgattgaacgcacaaaactgaggctcctttggacgtagctgcgagctgcgtgaaccgagtgaaaatcattggccggtttccatctttttcttttcatgtgatatacacgcacaaaactgagtgtcctttggagggctactgtacagcagtctctgctacgctgttcgtggccaagattgtgttctccagggggtagcggatattcggcggatgcggagaatctcctcc

SEQ ID NO: 78967 - DNA, 387 bp, Zea Mays
cttaggaaagctcctagtagttgtgttagcagccaaggttcgcgaaacgacgagaccaaaaaaaaaggagggatgtgaagcgtgaaacgctatttggtatgtaaggaatatcttcgttggtattgttcgtttgagagatgaaacatatacttagtataatgattattgttgaaacgtggaacatattccattttttgctaaaacgtattgttcatcttgaacaacacttgttccactgtagcatattacaatttcgtcccgtgtccacatagggacctttcttgttagccactttcataccttcaactgttattatccactttcataccttcagggctagtttgagagacagaaaatcggagtggattggagtgactgaaatcccct

SEQ ID NO: 78968 - DNA, 456 bp, Zea Mays
caaagatccaaatccagcacaagttcatcataacaagcatgaaagcaactgataagcaaactaaactaaatggaagcaactgataagcaaactaaactaaatggaagcaactgataagcaaactaaactgactacctaagactgagacatctgacttaagatttattacaaactctgacgctaacgatctaaggatccagatctatcctggtcctagagacaggggaaccataagtgtggtgaccacgtggcggtgagcggtatgggtgctgagtcccaacaggagcgggggaaccaccctcctggtgatggcgctctgccagctcagcacgcaactccgcaatctccgtttgagccctgcttagctcgtccagagagtggtccagctcagtgttaagcactgcgactaggttgacggtgctgctcaacctagggttagcctcaccaacaggtgag

SEQ ID NO: 78969 - DNA, 197 bp, Zea Mays
ctaagatggaaatatgagtcgagattattattttaagcttaagtaccctttttgtccaacgaagaaattatctaagcattcatttgtataaatttgggtcaaggaggggtaacggaaaaatcaaccttgatcatggttcaccaactaagaacatggcctagatttgggtttaggcaaacaagtcactaactttctat

SEQ ID NO: 78970 - DNA, 195 bp, Zea Mays
gacggcgcgaacggtttatgaccttgggccggactgtccgtcacctgtgcgcaggacatgagggctggatacttggctcgactcggctcggctcggctcggctgaattcgtgctgtctcgttaaactaatgagatgactcaatttgactcgtttacgagctcaagctgactcgtttagctcataagtcatagtag

SEQ ID NO: 78971 - DNA, 792 bp, Zea Mays
aacgaagcatacacaaagcacgttagtcatccatcgcatcaccaggacccatgatctgtctccccactccagaacttgcagcccgcaccagaagtctcgctccctcctgaagaagatcctgcagttcttttttgctaagtcctgcccaagacgagatcaaagcaccaatgtgacaaataatctcattaggggatttaatcagaatctcatcaaaacacattttatttctggctttccatatcgcccaacagatagcagatattagcacaacatgcgtaattttattgatcttaagatggtaatgaagccatacaaaacattgatcaatatttccaggaatataattcgtgttaaggcatttcgcaaccacaccccagataaccttagcaaccgagcatctaaagaaaaggtgatcaatagtttcatcctgtgaacaaaaactgcaagtctggtcacctttccactttcttttaatcatgttatctctggttaaaagggctttgttttcaagtaaccacatgaaaatttaatttttgggggggattttggctttccagatatgttgcatgttagggccagagatgtttgtttgacaaactgttatacattgatttaaccgtaaaggttttcttccctccccatttccactgaacagtatcaggaaaatcttgaaactcgaagttctcacaattaccgcaaagtgatatccatcgaatctcattttcattatttagccatcttctgaaggacagttgccaattttttattcttgcatctttaactagaataaac

SEQ ID NO: 78972 - DNA, 491 bp, Zea Mays
gatccagcgaaggcgatgaagggggtgggcggcgaggcgggtccagccgggcaggggcctgcgccggacctggcaaggggtgtgaacggtgccggcgacaggagaagatcgaagggtgaggcgctgctgcgctgatcgccatgggagccagggaggccgacaaccatggggcagagagctccatccgtcctactgcttgaggaagtgagggcaccaagcaaggctcttgcaggggagaaaagaaagcagggacagtggggagcaccgtatgaggagtagctcggccaggctgttgcgcctagcagagaggagcagcggcgcgcagccgaagctgggcgaagcacaggaggccgacagcatgctccaaggaggaagacgactgggtgaagcaggcacgccgacatgaggggccgcgtcggtgctggccatgggcgcgccggcctaaggagcggcgccgtcgcgagctggtggccgcgaatccggggctggcg

SEQ ID NO: 78973 - DNA, 278 bp, Zea Mays
cgaacaaggagtggagcttgggcgcttgctgtgattaccggtgaggtggagcagggagtgtcgggctccatggcaggggcgagctgctgggcggccatggctgctgagctggagaggagagggcactcgaccatgccgcgtcgatgggaggagaaaggaagtccttgcatccatggagggggctctgttcagccaccatgggaaggggtccggcttggaggtggtggccgagggtgctggagctcaggtgttgtggctgtggagctgggaggccgtcc

SEQ ID NO: 78974 - DNA, 1426 bp, Zea Mays
  misc_feature (1)..(1): n is a, c, g, or t
ntctgcagcctgctgctacatacctcacccccggaactctattaaaaaaagatcctgccttaccttctggatgcctgaggcagattgatcagtatcctgccttctacaaggctattcggattcaaatagcacagcaattgaaccgtgcagtcccgtttagtttatgtttagatactgaagctaaccgctagctagctaaaagttctctctagacctctagtacatcgaaacagaagggttaatagatagtctaattttttagtcaagtctttaaaactagttaactagtcagataaccatggctaatttaagctatttttttagctccaaaacaggcccttagtatagctagagtcaactgacaggagcggtggtgtgttatgagatcatcatccagtggattttgtgtcgatgatccattcattctatcaacatgtgcttatatgatcgatcgatatgagagatcaactcatcatgtttctgacgcacgaaagaaataaggacgaaaattaggaacgagatgatctgtctcaaccagttcactagtgaaagaaaccaacagcatgaacatatatataccccatgcaccacatctcgaacgaaattccaacttaactcatcactgcatgcatgcgttgctaagctgacaatgatggctgccagtgcccagcagatgacttacagcatccataatatatataccaatgtttcgcactgacagagaagtcaaagaacgatgaaggaggagtgcccggcattctgcgagcaactggagaagatcgtcaggaagaaagcaggggcgtagccagctgcagcctgcaggaggagtgtgctggcgcatgcgttcaccattcctctgcgtgctactccagccataagcacacacagctagctaattaaggtattttagtctgtaaataatggactgtgtagtcgtgtgtgtgtgtgtgtgtcgtaactgtgaaagtcgccgatggatgcataatatatatgtggtttttcccttaaacaaattggatagatcctttggttctatttgtttcttttgccatggatagagaaaacactgtacagtgaactgcgtcagttttggttagagctgggagtgggcactgggcagaggagcatttcgctggcgcctgctcctgcattctaaagaggcccttgggtccaggtgagattcggcccggccgcgtccgaagagctgccggcgccacgatctggagcgttcgttcacggcatgtgggcctgatcactcccgccgcaaaagaaggcccagcccacctgtgtgttccccggagggagaaaccaattcaccaatccattaagcaggggaaaggatctgcagagcttgcggcttggcattgcaaatttgcaatgtcctaaaagagacttttaccttaatataattttaactcaatctgga

SEQ ID NO: 78975 - DNA, 553 bp, Zea Mays
ccgcctcgcctccttggtcacttagctcgcccgcctctttgcctccccgccctctcacgcaatggaaacaactgccctctccccccacttccaccactcagtggatgacgccattaatggctatgaagccactgcccggtccttcctcttccccagcgtcctccctctcccttctctctaactgatgtcgagctccatgtgccagtaactgtacgtccaaaaccatccaagcctttctctctctctctcttatcgtgggactcgccgccgtcgcctctgttcgtcgtcgccggaggccgctgctccctccccgtcgctagcgaggagagcctaggagcccgatgatgcgcccctgtcgtccttccccgcccgtcgaccccctgctcccgcaaccgatggccgaccgtgcccctgctcccatcgccgaccccttcttctcgttgttttctctgcgcaagaaccataaacaaggtagaagaagaaaattttgtgatgtacttactaaccgttgctatttgtctaacacgcgtggatataattatccataattcca

SEQ ID NO: 78976 - DNA, 218 bp, Zea Mays
ctgttgtgtgatttttaaatctagagttcaaaacaaggatttaaattgggtgggaatacatgaacttggataaaaaaaggaaaaaagaaaaaaaaggaaaaacaaacctgtgttgggcccaatcttcagccgacctccccacttctctcctcctcgccagcctaccactccctgtcgttctcaccgtccagtggggcccgcaagtcagcagcctcaac

SEQ ID NO: 78977 - DNA, 278 bp, Zea Mays
tttgccttgtttggagtccggatgagtctttttgagtgccggttgatctgagccattggatattaggattgtggaagttttcttctatttatacctccctaaccctagaagccacgtcctcccacccctagcagccgtcacccttttgtgccttgccccaagagaagagaggaagaaaaaaagaagagaagagaggggagatgagggcataccgtcgcccatcattgtcgttcctctccaagaattggtggctacacttcggatcatgcctagtacat

SEQ ID NO: 78978 - DNA, 1256 bp, Zea Mays
ccggctccttctaccagaccatatcaccctcacctgcgtggctccgctgggaccgtgtgccaccaggccattggccttatctcctggtcgtgcgtttttgctacctgggtgcagctcacctccctgtgccctagcttctcctccagttcgccgtggagctcaccttgggtgctgtccgccggccatctcctgctcatctccccttcatgctcatctaccgtcaccaagctacactcctctgctctgtcctctggagctcgtcagtgcttgggtggccatcgtcgaccacgtcgaccttgccgttggtccaagccacgtccatggtcgtcgagcacgccaaccatcgtgggctaccctcactcgactccctgttagctggcgtcgcttgggtcagcctcgccgtgaacctgctacagtcttccgctcatcccggctctggtcacagacaccagcgccctacgcacgcaagctggctgtacctatattcctcgccggtgtcctccctcatcagcgccccaccgttccttgcttacgccgcggttctcttcttctctggtgtctgcgcgccgtgaggttcctccaacgtcgtggctttccagttccttccagccgcgtgcgcaaattttctctgctcagccttaatcctcatcgtgtcgtcgacctcgccggttgtcgtcgttcgtcgtcgcgtcgtgtgtgcagctctatatatgtcactcttccgtatcgtcgtcaagccgtcgaaccccgttcttccccacctaaccttgtcaaacccgaatccccggacattaggcaaaaataagcgagatccgtgtgtatcgtttatcaagtgctcggtcgaagactttaatcaaagattgtcgtcgttccgtgcgtcatcaaaaaatctcaagaatcgggtgaagacaaaactagcagcgtgatattccccaagtgctcgacacaagggctgaatcagaatccttgccgtattcgcggatagcgcgtcagatttagtattgtaagccgattcatattttcattagtttaattattgaattagttcgataaatgcgatgtgattattttcatgattttagagtagtcgcgttggatagatttaagatgttaattatgtgacgtacggtaaattagtgaatgaattttaaatttagtattttaaaatgtctaaacaataatattattagtattacttatgacgaattttaatcgtttgataaaattaatggtaggctatatatgatagcttagag

SEQ ID NO: 78979 - DNA, 50 bp, Zea Mays
gtggatttgtacgggcgctagagatcgagaagagttaaccgggagagcag

SEQ ID NO: 78980 - DNA, 387 bp, Zea Mays
cagggtgatgacgcaaaaattcgagatgtcgatgatgggcgagttgaactacttccttgggttccaagtgaagcaactcaaggacgacaccttcatctcccaaacgaagtacgcgcaagacttgctgaagcggtttgggatgaaggacgccaagcccgcaaagactccgatggggaccgacggacacaccgacctcaacaaaggaggtaagtccgttgatcaaaaagcatactggtcaatgatagggtctttactttatctatgtgctagtagaccggatattatgcttagtgaaagtcgcctagagggggggtgaatagggcgaaactgaaattctcaaaaataatcacaactacaagccgggttagcgttagaaatataatcgag

SEQ ID NO: 78981 - DNA, 3738 bp, Zea Mays
cccctttctgttaaatttattgtaagattctgaggaatgcgctgcttaatgcttatatttgatgacgaatatatattgtgacacgtaatttgatacatatcgttctgtctccaattaagggtggctctcggaggttggggtgaccttgtgtagcgtgagtgcgtctgtgcgtgaccatgaatgaagcatgctcttggacatggcccgggcaatacgtcctccatcttccagctagctcgagcctgggcggcctgctctagcacctcgacgtcgctgatccggccggacgtgcggtggcgctggacacgccatatcatcgccgccatgcgaggacgcctagggtatccaccagtcagcacctccacctcagctccccctgcaactgcaaaatgaaagaagggcgccccattggctgctgtgcctgcaagcggacgccattaaacaacaaaaggtgttcaaggagtattattcttcttccttgcagaacagatgcacactagtacgtgttctcgatcggctctcaccctctcgcataaagtagcggattattattagcatctgctttcacgagcgtatagccacggtcatttcgtctcttcccttgaatatacatatatacttacctccgttcgcaactatatataacacagttgatatctttttaaaaaactttaatcactcgacttacaaaaaaaatcaaaaatcacgagttatcattttttgttgtaatttgttttatcacttaaaattgtttgaatatgactttaacttgttcaatctagaataaatatttttaatacttttttagtaagtttacagcaaaacgtggtttgcattcgatattctctagttaagtaggcaatatagttatgatgaaatgttagcaggacaatttatatatgaagacaaaattaaacctccagcctctaaggaatggtccctggcaattaactttattgtgaatcgcaaactataactaactttctatgctttttgtgggtttcgatccaactttacctgttgggagcacttgagtttaatctgacccatcacaggttctaggacagtgcgcaaacacaccttctgaccaatcctgagagctgttgagaaaccctaataaagggttatgtgggcaaataccgaatatagccctgaaggctatcgcgtctctatatatagaacatgtacccctcatatggaatagagaagagaaagaggtcagaggcccaaccctacatcgtgtctattgtgtttcctctgtcgtgctaatgggaagagagacgggtactctacagcttcttgcgtctctactgctgacgggagggaagggagcggatctagtgatccgtggtgacgtagttctcaacacgttatcagcacgctctacctcaacgttgctgcgagatcagatctgcatcaactcttcgtcacgccggcaggtccttggcctagccgaactgtcctacgcgacagccttcgattctccctctacataatcaagtggtatgacttctaagtagaatagatctactgttcttgatctgttcatcggaaaaatggtgatgcatgtcgccgccgtcgaagcctgctgccctagtcgcgagtgctcgcgtcggtcatgcctcagcccacgctagctccggtacgaagcaaggcgtgtccgtgccatgtacgcggtacaacacaccgtcgacggctcagctggccatgccgcgcataccgccctgctggcgagcccacgattctactactgggcggagcaaagtagcaatcgatggtcgaccggtctcgattcacgtgcccatacgatgaagacggccgtggtcgtggacaccgcgctcctatcctcggtggagaaaagtcttgcatgctgttctcgcggagaagagagttgtgctgacccattcaaccattccatcaccatgcaaaaatgaaagtagcccatacggctgacgtatccatccatgtgcacgagcgggtcacccgggagaaaaaaaatgcgggccccatttctttgattctttgaccatgagcgggacgttacgtgcggctaagaaaaaccaaaaaataagatatgaaacatatgctattaattctatttattctacgttacaaataaaaatagaataaaaacttgttatattgcagtttcttccttaatcaattatttctcgcagtaaataattagtagaaaaatgtatgtgaagattatgttgagcatttttatacgctctaaatatttatattatgttgagcttttgaactcatatcgagcgattaaactgtatagtgggtactcaaacatgtcgatcagactttgttgttaatcggttgagttatggcattgacgagcattggttgcgccctggcaccacgacacattatttgtgtcgtacgaacttggctgcgtcatgtgattgctatgttgcactctcacttagtcggaccactcccgttgagtcggaccatcatcgccgagtcgcgtattttttgcatgccctgcaggcacggttcgaccgccatgattagcgagccacaattgcgcctgttgcgcacgttgcgtggacttatcctgtaccccgactatcgagccacaattgcgcctgttgcgcttgttacggaggcttattcgttgtcgtggccttgatggccacacacacgttgatgccagatacgctggagcttgtactcgcgtggaatgtggtggattattcgagcccctgaagtcacagcatagcgcaaccttcgtaaacattgttgtttaactctatattttatttgattgttttgtgtggcatcatatatttatttatattgccaagtggccataacaactaaatcaagctttatagtgcttggaaatctgggaaattaaattaaaatacaatgaaatacagataagttaattctctgctctctcctcatgcataaagttttacccgaagtaacccgaagatatataatataatgcatgaaagcctttttggcataaaagacatcacaaattgggattctattagtaagcaaaagggcttaccaaataatttaagactataaatctcagcatatattgctcaaccagatgttagcacattgctctttttgtcgctaaatgacataaagcgaactttgagataaatggctagtacctcagcaacacgaagttgcgagtataccaagaggttattttgagaatttttttcactatgttgatgtgaaaaccatagtgtgtttccgtcgaatcactttactcgttctatctagaacctctatacttgtgtcgcatacatctctcggagttgtaaatacttatagtcactgaattgactcgggatagtgaaagagaaatgtgcccttgggtcatttctaagtattttggtgattgagtgccaacacaagtgcttaaatgtgaatttatgctcatggatgaacaaagtgcaaatcaagagtaaaggtatgtttctaagccttagtacattggttttgtgtactaatatacttgtctaagtgttagaaacagaaagaagaagaaaagaaaagaggtgaaaaaggcttggctgtgtacagccaagactcagctcagtctggcacaccggactgtccggtggtgcaccggacagtgtccggtgcgccaggctgactcggcgtgaagtgaccgctcttgggaattcgccgacagcgtacggctaaaattcaccggtctgtccggtgtacaccggactgtccggtgagccaacg

SEQ ID NO: 78982 - DNA, 92 bp, Zea Mays
ctgcacggcgccgcgggagaagagttcggccgtggccggcgccgagacgagacggacgacagagtttgcgtgtagcaaaaacggcgtgagct

SEQ ID NO: 78983 - DNA, 224 bp, Zea Mays
atgcattaaagagtattaaattattacatcatcatcggagttttgcaaaagtagtcatcattgttcgaagtgtagcggaataaaactaacggtaaataaacagagagatggggaagcctgtcccatcactcctcatgctccttctcaaccgaggcggggtcccactcgacagtccaacccggtggcaagatggacggccaagtcactccagcaaccatgtcctc

SEQ ID NO: 78984 - DNA, 121 bp, Zea Mays
ccagtggatgctcgccaagcgagtacccaccccagcaaacactatctaagtgttaaattaaaggcaagccccggttttatgcataaccgttatatatgctattttactgcacttaatgttt

SEQ ID NO: 78985 - DNA, 652 bp, Zea Mays
gtgaacgcgctcatcagctctggaccggctcgcggaggaacgtgttcgacgaggcgggcggcgcctcgaggtcgtggaacaccatgggcgctgggtacaccgggtgtgggagatggggctcgcgcaggagctgttcgacgaaatggagctgggagacatgttctcttgggggccttgatggacgggtatggtgtgaagcaagctggtgctggtgtggaccgtgcgcacgagttgtttgattaaatgatcgagagggatttgatgtgctggaactcgatgttcaacggtgatgccaggcatgtcaggatgaatcaggcgaggtcactgtttgaggaaacgatggagcggaatgtgatcttgtggaccattttcattgatgggcatgttaggtgctcgggggccaaggaggctttggagtattttcagagtatgctgcggtgtggcgtaaggcctgatagggtcgctgtcgtgggggttgttagtgttcgtgctcagctgagcaatttggagcaaggaagatagcttcacttttgtttagaaaggtgtttgttcttaacctcttggattggatggtagtgcgctgatcttaatataaaatcttgccaaaaataccgctaataagaacatcttgcaataaataccttatattgtt

SEQ ID NO: 78986 - DNA, 2069 bp, Zea Mays
ctacattattcaacactccaaacacagctagccagcgcgaacaaacaacataaagttgggcctttgagcatcaccaacagctccttaaaatcttggtctcaatacttattttaagggaaaaaaatacgtctaacaataatctatcatggtctttattttttttttggcacgcgaatgccttcccttcaggtgtgcaaacttccgccgctggctaagcggctcccaatccaactccgttttttcccttctcgccacgttttgccccttcgcggtggaacgctcacccgattctgcaatttacgcgcgagagctgtggtgatggacgtactggtcaggcggcgaccgccctctccgcatgcgcccaccctcgtcgatggaacctggcactggggaatcactaacgcaagcttcttttgccggggtgacgccatatccatctgcagcgaccgatgattttgaggtaagacttcggtttcgtgatatgtatgtggtcgtggtctgcgatctgcgagtctgcggtgttgctcgtgtttgctcactgggagaagacagaggcaacgatctgctagttgctcgttggcctgaattacatctgccggtatgagcaacagcagaacgttttgcttgactgctctagtagtctcgacttcgatgattgtgtggagtggcaactgcaatagagccaaaatccaaggtcaggtttctgctctgttccatagtgtatacaagtgatgtgaaacagcaaacggtgcctgtaatttgtttttgcttgttcctctttccttttttctatgttgtttttggcgcattctgcacatgaggtcatcatctattttagatgaaatatagagctttgtcaactcatgactgtacctttattaaaaaaaaactcatggctgtacataattaatcttgttgaatccttgtgttcagaaaaaaatctggttgttgacaaacctagagtacaagttgttgacattcctttcttatttatgtgcaatttggtgaagagaagacctcacatttgcagttttagagaagcatttgcttgagagaatcttttaccgtttgaaaaaaaccatttgcttgtttctgaaaaccatttacagtttcagataaccatttagatttaaagataaccatttacagtttgaaagaaccatttgcctgtttaagagaaccatttattgctgtttgtgttctattattattgcattttttgtttgagatggtggcagcctggaaggagttgcaactggggacgaggtgccgacgtcgtctgatacctaggacaaaattgacgtcgtatgaggcatgggacgaggtgtcggcgttgtttgcaacctgggcgacgcaagtagaaacagcggcgtaggttggatcggcggcgcaggacaaaattgagacaggaagttggaattgtgggactagaataactaagggggtgtttggttacatgggctaatttttagttcctacaatttagtcccttttagtctctaatttaccaaacataaggactaaagaaggaactaaaccaatttagtctctagtcccttaaggggtggctaaatgggactaaacctgatttttcctcatctacccttatccctaaccttccacgccgccggctctctttcctccccaatcttccgccgccaggatcgtccttccttgtgtcctcgcgttccagcgtctaccagcacctgtagtgtatttgggtgtatggcatactgcttcttcaatcgttgtaaacagtacggttgcttcctttttaactttttttctatattgtatttcaagggtatttgagtctttggacagtatatttaatgactttagaatctgtttagtccctaaaaccaaacaaagagggactaaagtttagtcctaggactaaagtttagtcctaggactaattgaaaccaaacatggcctaactcattagttttttagaaaaatattagtagttcttagagtagtagcaattttttaggatttaaagttttaaaaaggtactaattctcatatatcggaagaaatatttttcgggagttgttagccgtgct

SEQ ID NO: 78987 - DNA, 710 bp, Zea Mays
gacggtctaaacccagctcacgttccctattggtgggtgaacaatccaacacttggtgaattctgcttcacaatgataggaagagccgacatcgaaggatcaaaaagcaacgtcgctatgaacgcttggctgccacaagccagttatccctgtggtaacttttctgacacctctagcttcaaactccgaaggtctaaaggatcgataggccacgctttcacggttcgtattcgtactggaaatcagaatcaaacgagcttttacccttttgttccacacgagatttctgttctcgttgagctcatcttaggacacctgcgttatcttttaacagatgtgccgccccagccaaactccccacctgacaatgtcttccgcccggatcggcccggcgaggccgggccttggagccaaaaggaggggcggtgccccgcttccgacccacggaataagtaaaataacgttaaaagtagtggtatttcacttgcgcccggaggctcccacttatcctacacctctcaagtcatttcacaaagtcggactagagtcaagctcaacagggtcttctttccccgctgattccgccaagcccgttcccttggctgtggtttcgctggatagtagacagggacagtgggaatctcgttaatccattcatgcgcgtcactaattagatgacgaggcatttggctaccttaagagagtcatag

SEQ ID NO: 78988 - DNA, 142 bp, Zea Mays
gtgggcgaacgccgctgcgcagttggagtggccggagatcgttgaatgggactataggagggggaggttggggcactgggccggggccggggccggggccgggttgtggcctcgagcactcattaacgaaggggaggaggag

SEQ ID NO: 78989 - DNA, 293 bp, Zea Mays
atttgagaaacacattcaaccttatatatccaaccttccatacaacacattcaccattcataaagcaattaaatatgtgttatggataaacttatttgagaactaaacatgaaaaaggagagggaatagacaaaaactaaccatcttaagcagcctcatttgaggaaatagagaaaattacctagctatactcttctctctcacatataaaaccctagatccaaaatgtggctaaaattgagcaagaatgaacaaaaattgacaaagaaacataaaccaacctttcttatcca

SEQ ID NO: 78990 - DNA, 648 bp, Zea Mays
cttaaaatgcttcaaagaaggggacaatgagactaccaacaaaattgtattaccttcatcatctatcttcacatcaagacactaaggtccacaataattgaattaatttcattaagatgtgactgcatagatgtaccttttgacatgcgaatagtgtaaagatactccttgagacgtggcttgttttcaagactattggtcatatacagctcctccaatttcttccacaatgttgcagcggatttttcatgcattacttcacacagaacatcaaaagacaaactcagttgtatgatggacaaagctctctcatcaatatattgccacttatcatgagtcatgtcaacgaccgtctgcagcgcattttgaacaaccaactgggtaagaacaaccttcatctgactctaccaaatagcaaaactaattttgccatcaaactctggaatatcaaatttagtcgacacaatgcgatataaaaaaatccgaagtcaacgacgcggcggcggcggcggccacaatgtggataaaaacaatgtgtctaaccctaacttcgataccacttgttaaggaagggaatacaatagacataaaaatttacgtggaaaaatctccttcaatatggaggagcaaacaacaacgaggaaaaag

SEQ ID NO: 78991 - DNA, 284 bp, Zea Mays
gttttatccaaatcccatcctcagcaaagcagccgagatgcagtagtacgtgtacgtggacagacgagaacgacacccgggcctagctagaaaccagtcgccgtctggtccacgcgacctcgacctcttgccggtttcacctgcattattatgcacactagtagttccgagaggggggaggagggatttaccacttaccagcggtttgggtggctgattgagtggaacgaacaatggaataaggcccgggtacctcatatgaaagccatcgcacgtccgttcag

SEQ ID NO: 78992 - DNA, 364 bp, Zea Mays
cgcgcgggatggcgtcgtgctcgtgccgtgccgtcacgcctggttgatgtgtcgcttctgcgccgtcgccgcataccgttgcaggataagtcctgtgaacctgtggtgcggtcgttcacggcttcgcggcggcggcggcgcgcgctccctgctcgcaggagatgtgacgggaggcgaagcgttttttttttttttttttgtaacgtgtcgagttggtgagcggtgagccgtcccgtcacgccgccgtggcaagcttttcggcggcgcgtgctatggtctatggaagattggaagcggagaatcatggtgtcaccggtggggaagtggaggcagttccgggtgggtgggtacacggaccaatccc

SEQ ID NO: 78993 - DNA, 186 bp, Zea Mays
gtttcttcccatcatctggtggcgagctcccaagtcccaaacaaaacccatctgagattcagagccattgtctgctacctcggctacaggcacgggaaccttgtacagtgggacggcgagagcgaccgtgattaattagagcggtgccacggttcgttagactcagatccaaaccaaacaagcaaa

SEQ ID NO: 78994 - DNA, 564 bp, Zea Mays
gaaaaacgttttcaacaaaatattttgtatggtggtcaaattaacgaagtgatggggaagttgatgtacgtatattactgcatttctctatatcacatggtaaactttgatttaataaaacataaaatatgtattttattagttagataggtgtaaatgtggaatcaatgactaatattcaaatctctacttatgtataattttatcttgtttttgtataaagcgggaagaaaaaggaccgtggaaccattgcaccgtgaaatctggtgatgctttatatagtagaaaatagtagaaggttactttcaccattataaattcaggaagaaaagggaatacatacttatactacttctacactgtttgtctctataaattgcaactgcagcagtacaaacaatcgactttaatctaaagcgatcaagccctacattcttatgtattcttgtgtctatgttgttgtgtggtgttttgattaataatatttaataaattagttgttctacatacaattatggtaaataaacactccatgaacacatcacctatggatgcatatataag

SEQ ID NO: 78995 - DNA, 175 bp, Zea Mays
ctcagcaagtatcctgtttggctgtagtggactagctttatgtggggataagtcaagcagttgtttttagttggtcaggttattacttactagtagaaagccagattttaacattaacccaagttattagcccaatgtatcctttccaaacggaaagaataccacttaccaatac

SEQ ID NO: 78996 - DNA, 549 bp, Zea Mays
ttttttccctctagttttaatggaaaaattaattccgaagaggatcaaagatgttatcgcttaaactacctagcttttgacatcttaaacaattctcttagcaaagaagattatcatgccttcatatcaaactataacgaatccattcccgatgcgcatgatatttggactagaattaaaatcaagtttgatgagtccaaacataatagttcatttgatgcctctacttcctttagtttttgtgatactaacccttgcaaggaagaaggagaaaatgaacgatggagaccaaacgatgaatccacctctccaaaaggtttgtcttcccatttcgattcccacatgtgttgtgtggctaatgaaaatgatagcggaagcacaaatgaggatgaggaggaagaaagaagttttgtgcatctctacgctcgcctaagccaagaagataaggcggtcatgctcaaacttctagaaagagcgagagagcaaagcgaagctcgtcaaaggctagaagatattctctccataaagatgcaacactttgacgagttg

SEQ ID NO: 78997 - DNA, 853 bp, Zea Mays
gccgaacctcggtaaaacaaatcacccgtgttcattgtgcttttgcttgtgatttgtttgctttcccttactctaagttctcttgcgctattctttgctcatatcatttggtgttgcttcaagttaaaatctcatttaagtgaagcaacgctccgcaagaaaagaacttgagtcagtgctctttttcatctaagctttcttgctttgttatcatagaactattagttgtatagatttatcactttcacattatttgaaagctatactctttactagcaagaacttagtttctattcttcgatatttgtatatcttgttctatccactaatcaagggatctagttgggggataaagttttaattttcaggttccgcctattcacccccccccccctctaggcgactttcagcgcgcagggggcttgggccggccaaggggcggctgggccggccaaggagcccatggcacgggagagagggaaaggggaagagggagagagaaagaaagagaaagaaaaagaaaagattatttccctgttttcgaaatccgatcttcctagatgaatgcatttgcactttcaaacaatcaaagaatgcatagctcggcatggtgcatcaaacaacataaagtatttttttgagtttttctttacacgggaattccaaaccgaatcccgctagctttggaaaaagtcaaggtctagcgagggcaaaaagaaaaagaaaaggtaacgcccgaatttggcgagtaaagaaaagaaaaaaattcaactgcaaaattcggggcgttacaaacctatcccccttaaaagaatctcgccctcgagattcagggctggctagcaaagagctc

SEQ ID NO: 78998 - DNA, 303 bp, Zea Mays
caccacttcctttcctagtggggacaccaacttgattgtccttttatcacaactgataactgcctgatacttatctaaccaattcacccctaggatgacatctattccctgagtacccattactataaggttggcgggaaacgctatcccccttatttccacagttatatttaaacaaatgctatcagctcgaattctaccaccagctgagtcaatttgaatgggggttgacatggtagtagttggaagattatgtgcttttacccatgatgcagtaatgaaagaatgcgttgctccagtatc

SEQ ID NO: 78999 - DNA, 1556 bp, Zea Mays
ggaaaggggaagagggagagagaaagaaagagaaagaaaaagaaaagattatttccctgttttcgaaatccgatcttcctagatgaatgcatttgcactttcaaacaatcaaagaatgcatagctcggcatggtgcatcaaacaacataaagtatttttttgagtttttctttacacgggaattccaaaccgaatcccgctagctttggaaaaagtcaaggtctagcgagggcaaaaagaaaaagaaaaggtaacgcccgaatttggcgagtaaagaaaagaaaaaaattcaactgcaaaattcggggcgttacaaatgcattagctcaaagatagatatttggctgtttttaagtgaaaacaaataaacggcttcacgagtaccgggttgactaactcccgcacccgaaggctttgttttattcaccacaatccatatgtattgaggtagattatggtgtaaattaatttaatttacactctaattcatctcaatacatatggattgaaatacatatggattggagtgaatactagacgaccgaagtgggaatcaactgtcacactcgcaccagatgcccatcttgtcatcttcgatccaagatattaatagaacatttatttaagcatcaactgtttgcatactgatatgattaggatctaatctagtctgacaccaatattttgtgtgacaaggggtgtgcgacaaggttaacgagcagcatgggaggcacctgccaataatgaatggaatcaaagaggatataaaaacactgctgacgttggaattggggagccccctattccatgaagttctggtcaacctcttggttcgcctcaaagcgttgcaggtacagttcctgtgttatccaataactgcattggttgttctttatctgccaaatgtgcattgcttgtgaaacgtttctacttcagaatatacactagtgtaaggctttttggtggtagaagcatgtatttagttatgaacgtcacgcttgaaggaataggcaaagcgccatcttaggtgtcttcagaagtgagccatatggaaaccttcgactgcttaggaggttttgcttgcaaacttcacctgttgtaactttcaaggcttctataggaccttcaggcaaaagcaataatttatttgtgtggatgttgccctgtcctaatctgcatcgctttagcaaataacctaccatgagaatgatgagggggaccattcaccatgttaccaaagaaggaaatcgattccttccgttttcaagtggaaaagtttgtctctcttcgtgctgggtgatggatttgtctcgtttggacttccggccgggttcgttatttgaggctgatgttaggcgccggttttcttctcctgtttgctctggaagtccgaactctccgtcggccttttggctagttgtctcgtttggtagatgcatcttcaagctcgacccggtttcggttggtcatcttcttcaagctgcttttggtggttttgccaggggatttaaggtcctctcgcttgctgaccgggttttccgcttcacagtttcttc

SEQ ID NO: 79000 - DNA, 616 bp, Zea Mays
tgggcaccagcgccaccctcccacccgccggcgtccgtccggttcggtccttcctccccgagatctcccgcaccgaattcaacggtggaaatgggctctaggctgcgccgctacggagggaggaccagtccttgcaccgatcgatcggtggtgcccgcgacaggtgaattgccccgccggccgggcaagctgccaagatagggcgtgcaagttgcatcgccatcaccggtcaccggcgcgctacaaacagagcgtcagtgtgccgcttagacagatctgctccctcgcttgttgatgcagactgcttcgtttggcgcttccttgtactacgaatctacacgaagtattggtttgtttcaatttttttttttgaggggcgttgctgctgtgctgacagtacctaccccccataggatcgtgcttcggccgggcttcgcctggtgtggaaagttctggaaatgaccttgaaatggagtgaaaaaaggagagaaataaacagaaaaaaaggagtagtgtggccccatgcatgtaacaagttaattaccgccggttctctccatgacacacacgtcacggtgttaacttcgtgtcgtcgtcagacgaaaggccatggaat

SEQ ID NO: 79001 - DNA, 930 bp, Zea Mays
gcggccgctgtgcctggttgcctttcggacggcggctcggcttgctcgcacgggctcgcccgcggcggcggttcagcgtgcttgctcggggcgacggcacggagcctgctcgcttgcctgcggcagcggctcggcctgctcgctcgggaagcccgtgcctgttcgcggcagtggcggcgaggcccacgcttgctcgattacggcagtggcggcggtttctacccttgcctgctcgccttcggcgtcgacagcccagcctacgtgcgttcgggcacgacggcttaacctatgtgcttgcccacgggtagccaggctgcacacttgctcgtatggcggtgcctgctcccgtgcgcacgcccatgaggcggcgacgttggctgctcggtgtgcatgcttgcccgcggcagtgcctgcgttggtacttctggcggcgacagctcgcctgcgcggtgtcgtggcggcacctgctgcttgtgcggtgacatggtggtgtccgtgactatgaccagcgcacttgctggtggcgcagcgacggccggcacggttcccggcttcccgctctcgcattcgaggtgaggcggtgcggcggcatctgctcgcacgcttatgagcttcaagtcagaaaaatcggaaagcaagcaaatctgcctttgttttccttcaccggcgagaaaactacggatgcgttttcttttgatttccatatgtgtatacgtacatttgtgtttatgccagagggaagaaaaagatttaaaataaatgcaaaaacttcttactgccaagtgaagttaccgtcttactgctttgtcaactcttggattgagagcaatggtgctgataacgtgttaaggaccctttgctatcgagtatagtccaaaggctacttaactagaagtggaatcacaaacacaggagacacaaagatatagt

SEQ ID NO: 79002 - DNA, 296 bp, Zea Mays
ctagcgtctgcttgtaacccgagcgggggcaataaagtggtgtggatgccaattgtggcgcttggacccgggcctggtactgcaatctacggcccgcccgttccaagttggtagttgggttgtgaccgctttggcgaaggccatggcgtcccaacctctagagcggcgcgcaatgcgtgaggctggtttcacagagcagcgaataccatccgcttccaacggtggaaggataacgggccactgcactccaggcccacctaggctcaggcgctctttctggcagaccaccttttttg

SEQ ID NO: 79003 - DNA, 1874 bp, Zea Mays
gcgccctctgctccagctcgccggcacccagtcctagcgccgcgtctctccctgctctcctctctggccgcgcgcccaggaaggtctccatcacagcgcgcctccaagcttcatcccccgcgcgcagctcactcctggtgcttctctcccctccatggcggcattactccttctacctggccgcccactcttcctcaagctcatcttccccgcgcgccctttctgctcgacgccctgcaagccgcgcgtccgggtcttcttcgcccctgcgcgctccgctcatccatggcgcgcccctgatttcccctgccgcgcagctgttcgcctggccgcgcccctgctccctctgccttctccctaccgcgttccagctcggactgccctgcttcttgcgcgcccagatcctctctctccctgccgcgccggaactcccttcatggccagagctcagacggcgctcggtcctgccccctgccccaacgtcgaccatctcgtggcagcaggcaggtcaaaataatcacacgacacgcgtgctcacatgctggattgagacggggacgcgcatcatggttgccctggggacatgcccgcacgcgcacgggtcggtcgagctcgaagtctcgaatggagccatgctcgtccggcacgcggcacatggtctgagaccggtgttttaggggtcatggtctcgtgtcagggactcggggttggctttgtcgtttcagagatcctgagcaaccgtctgcttcttcctcgacctctactcctccatggcttcttccccgcgcgcagcagtgccctgtgctcgggttccagtcagccgcgcccactccccagccgatttctctgcgcgcggtactccctccagttctccctgctcgtgtcgcatttccctgtcctctacacgcacctcccggtctccatctcgctcgacctccttctcttggtttcccatggccgcgcgctgcgtgcctgctcgccatggcgattaccgccgagctcccttgttgttggcttcctgattcctcgtcgcgcgtgtagcgtttcgtgtgcttggccatcagagttcgccagccatcacgacatccccaatctatcgcgccatgctccggtcgtcgatcggctgaccgtcgtgttccctgttcccctcgtcggccaacctcaccgcgactaagcccatccgccgtgctatgtgctttggtctctggtcgaagaacatcgataccctctaccccttgctcacctccctggtcgtgctcgcctatgctgtgtggccaagttccctttcccggtcgccatcggtgaaagcccagccatcgatctcgtatgattttggttgtcttcttcgaccacgtcattgcctcgtgacatttggacaccttgacgacactcgaccacgtgttcgctcgttaccatgccatcttcagcatcatggttctgtaagactccgtgcactcgtcgacacccggctgtcgatctccaccacgcagcaccgcatcggacttaccctgtaggatgttcaccaagtgcgcgacaaaaagctcgaacatcctgcgtgactcaagttcgattcgtcaaaattattcagtcgaggaaaagatcttcagcaattggttactaaagaaaagaaggcccatgggtgacgtctacctaatacccgacgaaacgtctgaagtagaatttatcgatgtgtccatggaggtggagcgacttaatcttggtaagcgaactcgttacttcggatagttggaatggtaatttgtttggctagatttattaattgtaataatccttgtgttagcaccggcacgttgtggtagtgttaaatatgtgtcaaatacgatggagttagtaatgcgaaaggtagattaaat

SEQ ID NO: 79004 - DNA, 493 bp, Zea Mays
gtgccgcacgttgcgggcttgctggtgcctgccagtgccgagcggcggtggcccggtgcactgcatgcgggcaggcgccgaatggggggcagctggtgcatgctgagtcaccgctcgtcggctcggttcggtatgggggaaactcgggccggcgcgcacttccacggcgccgcgaacacgcgtcattttggttggtaaccgtacacagtagctcggcgcatgtacgtactaccaggtacgtactggtaatagagtggtcgctgcagcaggtagtacctgcggtctgtcagtgaagtggtaaagcagcctgtgtaagggctgcaaccacagtgatcgccattcttttcgtgctcgcttcggatttgctatgatatggcaagcatgacaatgaaagcgggtgaaatcagatcagccggctatgtttgaagagtctattattcaccacgatacatatggtttgagatagattatatataaattagtttaatttacg

SEQ ID NO: 79005 - DNA, 304 bp, Zea Mays
ctgcatagactgcattgccggtgccgtgcgtctccgtgtgcgtgtggggcctgcgaggtgtctggctgctgcttgcgcttgcagtgtctgaaactttgaatatctgcatgctgcattgcatgcatatgagatatgagcttgtcatgcgtctgtagcttccgcgcttcgctagtcaagtttactgttctatccctgctgttgttttttaaggaagcggcaaaaaaacttgcatgttcaatatattagaagagaaaaaaaaagagaatccacaagaccgaaaacacaccggaaaaaacaaaaaaaa

SEQ ID NO: 79006 - DNA, 746 bp, Zea Mays
cggcgcggtcatcagtagggtaaaactaacctgtctcacgacggtctaaacccagctcacgttccctattggtgggtgaacaatccaacacttggtgaattctgcttcacaatgataggaagagccgacatcgaaggatcaaaaagcaacgtcgctatgaacgcttggctgccacaagccagttatccctgtggtaacttttctgacacctctagcttcaaactccgaaggtctaaaggatcgataggccacgctttcacggttcgtattcgtactggaaatcagaatcaaacgagcttttacccttttgttccacacgagatttctgttctcgttgagctcatcttaggacacctgcgttatcttttaacagatgtgccgccccagccaaactccccacctgacaatgtcttccgcccggatcggcccggcgaggccgggccttggagccaaaaggaggggcggtgccccgcttccgacccacggaataagtaaaataacgttaaaagtagtggtatttcacttgcgcccggaggctcccacttatcctacacctctcaagtcatttcacaaagtcggactagagtcaagctcaacagggtcttctttccccgctgattccgccaagcccgttcccttggctgtggtttcgctggatagtagacagggacagtgggaatctcgttaatccattcatgcgcgtcactaattagatgacgaggcatttggctaccttaagagagtca

SEQ ID NO: 79007 - DNA, 615 bp, Zea Mays
gtatccttttcggttgtgttggcctattcgccaaaaatcatcggccctttattgtctccctgtatgacaacatctgcggtgcctattttgatgatgtccttttttgttgttctttgagttgctatagtcatatgcccccctgccggattggtcggcctaggaggccgagtagttcggcaatcttgttgggcctgtgtctggtgaccggattgagtagtgctcaatcggtcttgtactggtggcgtcaacctgtcaaaaacagatgtttggggtgccaaggcggggtactgtggcatcccaaatggatatggtggcatgccccacatttgatttgggccatacggcggaggtaaatatgtgtatggatatggcataggtggatatggaggtggaggtgtccatgcatgtatgttaggtctcacttgtacagtatgacctttcatttcttccgattggtggggtggtccaatcggcctgacctgacgctgctcatgaatgggtgagcggggtcgctttgctggccggtcactggggtcggccttcttttttacgtatttagacaataattgatcaaaagttgggccggctttaaccaaccgaccagctgccttgaat

SEQ ID NO: 79008 - DNA, 301 bp, Zea Mays
aagcctgatccgtcgcccgatgtcggacgaccttgttgttcctgtccactttgaagttggccaagaattttgctttcgcctcctggatcatccgctctttgtgctcctcaaactggagctgctcgtcagccggcaaggtttcccaagtcggctctatgacgttgcttggagaaatatcagagctctcccttgaaccggccattgagggccgatttgatgagcctagatgtgtctttccccagcggagtcgccaaaaagtatgttgacgccttttcggagcgccaaatactcaagaagaacc

SEQ ID NO: 79009 - DNA, 433 bp, Zea Mays
gttaaaccctaacctgagaggtctaatcttctttctctcgtctgttctcgggttgaacaatgattaaaaaaataatgagttcaatcatattgattcgagatctctctgtgatctcaaaaaaccgatgcggattaggagatctagggttcttaggacggctccgataccattgttagaatctatactgtataggatcgatttctaagtccctagaataccaatccgtaactgaaagtaaaaccttgatgacgtgtagatctgatctattgagaggaacggagaaacacacctttgttgttgttgctctcttcataccgtcgccctgcagataagcagcaggcatcgggatccgagccgctgcaagttgtcgcgtttccaaacactccgacgcctaggcgatgggagcctctgaggactagggttttggggcgag

SEQ ID NO: 79010 - DNA, 329 bp, Zea Mays
tggacagagacgcacagcgagcgaaatcctccaaagcaagcggcagcgaccagcgagacaaacatcggcgtcggtcccaggcaaaaatcaaaggcagggtcggctgcatccgtaggccggcgcggcagctgttgttctacaggactgaccgccgaggcccacacgcgtcaccagccaggaccaaaaagtctcgacggcagcggcagaagccgtcacatctctctccatcggggagaagtcaagacaccaagactgctgctgccgtcgcatgtctacaggggtaggcaaggcaggagagtaaagggggtgtttggttctgtggactaaag

SEQ ID NO: 79011 - DNA, 160 bp, Zea Mays
cgacggcagcggacgaaggaagatgtgattgcgttttccttagatttttgtcgtgttttatcttcttttctgctgtgcggtaaaatcaggggaggaggattccagcaatcgcgcatacgagatgtcaaaatcgggcgcttcctccgggtgtttcttccgc

SEQ ID NO: 79012 - DNA, 311 bp, Zea Mays
gttacctcggcgccaatgatgatggcgccgaggttagggtccattttttgaaatgaaactgtaaaaggcatagttgtgaaaaaaaaacaaaaaaaaaggctaaaatccaaaaaagttggtcgcacgggggaagcctttgtcaggccccgtttggttaccctctcctaaagtttagtgactaaattttagttacttttagtcactaaactagcaaacagggtgactaaatgtcttctcctaaactttagtcctttagtcactaagaggtagctaaaagtgactaaacttggacttttactgtttgcccctcc

SEQ ID NO: 79013 - DNA, 774 bp, Zea Mays
gtttgagatagcttaacttcaaaaatttcaactcaattctaacttttttctacataaacagatacaactccacgagctctagcttttttagaaaaatcgaaactagagaccagttcatataattcatgaagctccttagaggctacttttagaaacactgtttctatatattctcatgaagctgtacgaaaatatccaccatgccactgttatacaacatacaacttctgaaaaatcaattgtactatataaattgggacttgaggcccgacagatctgatgctaaatttacccggttcttgttctccaaacggtaatgtcagggcctgatcatctactactctctatcatgggttagtttttgactttttgtcgacactggatttctcagacgacttgagcaagaacctcccgatgcggcaatcccaatgtgacggatgagctccacccggtgcggcaagcccagcctcgatcttgtctcgtctcgtctcgtgaggtctggccatggtcatccaatccaggaggagggaaacgacgaagacgagcagagggaggcgaagtcaggccataactggacaggcgagtcgcgcgcggcagatcaaaatcacatgagccgagtcgcgcgctaacggcgagatcaggatcagcgcgcggcgcagaaaggaccgcgccgcgggcgggcgggcacccaccaccaaaatgtcggcatcagctggtcctcggacgtgggcgtgttgcttggatcgctaggcccggagggtggggggcacccac

SEQ ID NO: 79014 - DNA, 389 bp, Zea Mays
cgaaaaataaaagcagatagaagcacaagcacaagcttcagcgtcacaggcgcgcgcgcatgcatggcgacaaacgccagttaggttgattccgtcaccaagcacgtacgtgcgtacgctcttgcaacagtagcggcgtatatatgcgtccatcacgcgtcgagtcctgcggatgccgtctcctctgctccaacacccacatgccacggcctcaccacctggtcaggccacgcgtagccgtcggcactactcgagtcggtagtcggtagcagcatccgctccatcgatcggccatgccagtgccagccgagctctcgccgccgtcccctcacggcgcgccgcggaccagagccggcgagcaggacgacagcacgcttcctccgacggcg

SEQ ID NO: 79015 - DNA, 235 bp, Zea Mays
gattcaaagcttttactagaaagatgtcagtgtttgttacccgaccgcacaccacagggttaccttgtgatgcttttgggcaggacgacgccgttgatcgtgactcgatggttcgtgcggtggcacgataggagaaacatataagcttgtacaggttcgagccacgtgagaggcgtaacaccctacgtcatgcgatgatcttggtattgggatgagattacaagctgtgaactat

SEQ ID NO: 79016 - DNA, 666 bp, Zea Mays
gttcactcgttcccctcttctccccttcctcctcacccaagagagcgatggccggagggaagggaagcaggggcaggcatcactcggcggaggggaagcacaagcgccctctgagcccttcatcagaggacttcaggggctcggagttctctgaggaggagttgtcctccgagtacaatggctcaccccctccggcgtcccccatggcgtcgtctgatgactcagatgactccacggggttgtcggcgacaaagtgagcctacatctgatccgttgagcgtgtggggctcggggggttggatgactcagagggggaggactcctcggactttgaggaggagggtagcggcagcggcgacgacgacaacagcggtggcgacgacgacatcgacggtgatgagggcgatggagacgacagtaacgccggtggcaaggcgccaccgacgtagatagtagtgtagtggtagttgtagtagtagccatagttgtagtattagttttgtagcagtagttgttgttgttgtagtagtagcagtagtagcagtagttgtagttgtagtagtggtagaggaacaatgatatcagggtcggctcataatgagtcggccctattttctttgtaatgttcttcctccgattgaatgaaatccgaccattgcacttctg

SEQ ID NO: 79017 - DNA, 389 bp, Zea Mays
ttgatgccattacagggaagagagaaatggcaagaaaatgaatgccgtgggcgaggtgcgtcggtgtaagggcaggacgcggtcctcggcagcgtcggtcgggcgcaggcgcatcgggcgtcgaggtctaggcggcttcgcagtcggagtcgggtgtcctgcttcggtgctcggcttttggtccggctctgcatgcggtactcggctcggacgtcgcggcgcttcggtgtccttgggcgtcggtcggtctttgggcttgcagcgtgccgtcgggcatggtgcacggctgcctggcgcgtcggtcggcgcgggtgggtctctggacaggggcgctggtgcggtcgggcgctgctcgcgggtggcgtcggggcgtggctcggccggtcggg

SEQ ID NO: 79018 - DNA, 1469 bp, Zea Mays
gccatttctaagtattttggtgattgggtgtcaacacaagtgcttaaatgtgaatcaatgcccatggatgaacaaagtgaaaatctagagcaaaggtatgtttctaagtcttagtacattggttttgtgtactaatatatttgtctaagtgttagaaacagaaagaagaagagaagagaagacttggctgtgtacagccaagaggctgtttcggtctggggcaccggactgtccggtggtgcaccggacagtgtacggtgcgccaggctgccccggccgaagaggccgctctcgggaattcgccgacggcgtacggctaaaattcaccggactgtccggtgtacaccggactgtccggtgagccaacggtcggccaggaccaacggtcggccgcgcgatcagcgcaggacacgtggccgagccaacggtcggaagggggcaccggactgtccggtgtgcaccggacatgtccggtgcgccaacggctcccgcatctgcaacggtcgtcttcgccatttaaggaaaggaatcgggcaccggactgtccggtgcgcccgacgatagaaggcaaagatggccttccagatttgctctcaacggctcctagctgccttggggctataaaagggacccctaggcgcatggaggagacatccaagcaactcttgagcattcttgatcatccacactcagtctttgcgcatccatttgtgattctaagtgattcgagctctgttcttgtgagaaactgtgagatagtctttgagctcgaatcttggccgtgtgtgtgcgcgtttcgctgtggatttgtgtgtgttgctcccctcccttactccgtgcttctgtgtgaatcttaagtgtaagggcgagagactccaatttgtggagattcctcgcaagtgggataaagataagcaaggcaaaatactgtggtattcaagtgggtctttggactgcttgagaggggttgattgcaaccctcgtccgttgggacgccacaacgtggagtaggcaagttttgtacttggccgaaccacgggataaatcaccgtgtcttctctgtgttgaattctctgtgattgtcgtattgtgcaagatcttctctttagccacttggcaataattatgctaacccctaacaagtttttgtggctataagttaagtttttacaggatcacctattcacccccctctaggtgctctcacttcggccttagccttggcatttcaggcaggcaggaagcaagctccatttgaattgattgaaggcgaacgtttgccagccactgctccgtgcttgagagttgagacgaggcgggcagccggtcgtcgtcgtacaacacaaaaccggcgcgcaggacttatgtgtggtgtgcgcgtgagcatcgccgccgtgtaatggcacctggccaccggcgtcgatcaacgctttcaagcaactatttttttacaagctcctaaatctaat

SEQ ID NO: 79019 - DNA, 107 bp, Zea Mays
ggactgtagtgcttgcagatcaatccttaggtcgctggttcgaatccggcaggtcggataattttttgtattttcctttttgcgctctctttcatttctcatcttcc

SEQ ID NO: 79020 - DNA, 536 bp, Zea Mays
ggaaattagctatactcccaattaagactccagcttgcatgtacgtacaccagccagctaactctctgctgatgcagcacctgtggtgctgactgctacatctgttaagttcagtccgcctctcgtttcagataaactctactggtttccttttgcccatcatgataaactctatactagagttgttcagcgtaacaaagctataccgtctttaacacatgtttcttttaggtgcggatctttttttttttttttttggtcccgctcatggtgcttacttgattctctgtcactcttacggccggtcttcccaccaaatctctctatccgatccggccaggttccaggaaagaaagaaagaaagagtcatgatctcaggggaaaaagtgtaatctaattacagatgatacaggcatacagccgctgtctctacagatgagatagtctgaacactgtacagactgctacttgtcctggtgcgatgccattgtactacctaatttagccctgctagtgttagcctaataaggttagat

SEQ ID NO: 79021 - DNA, 259 bp, Zea Mays
gccaaatttacttctgtatgagacattccattcctaaactttgtgccacctattgagcaaaactcgaacagaagagctttatacaagatacataaaaaatcatgaaatgcatgcatggtaccatatgctggcatggaccatgtttttttttaaatatctagatccaactggttccgatggagcgactacaccaaaggccactgtatatattctccaggtccagttgctgggttcaaaacttttaaaagtgtgttgtcca

SEQ ID NO: 79022 - DNA, 930 bp, Zea Mays
caccaagacaaaaaggtaagggttcaaagttgatccttcatgaagtcctattctaatcgggaagtcatatgtatcctcatcacttgttcgaacactagttacaacattaacatatatgtccttaatgaatccaacatacttgtcggagctttatgtttgtccaaagcccaccacataacattccttggtatttctatcataatccttctttaagtcaataaaaatcatatgtaggtccttttgctccctatactactctatcacttttcttattaagaaaatgacttccatggttaaccttccgcacatgaaaccaaattggttcaaagagatcattgttatttctctctgacgatgctcgaaaactctcttgcatagcttcatagtatagctcatcaacttaattcctcggaaattagaacaattatgaatatctcccttattcttgtagatcggtgccagtgtattcttgtaaaatccatttaaaaagagtgattttgttgtaactcaatagcccaacctagtgattgaacgacattaactaaaacttgaatagtaattaaccaaacaaaggcaagcactaaatatgagtgcacataaattcccagtgtacaacaaaggcaaacgataaagaaaccttaggtacaaaagatgagagaaacaaaagagtttatcggactaatgtgtgcctcacctatgtgtgataggccaatcataaaatcgaatatctgcaagagattagacatatatcatttaaggatatggcagccaaactcatagctcaaagggaaacaaatgccaaaaactgatttagcaagatttatatcataataatttaactgcaagtattaatgtgaatattccatattgcaagaaactttttgtatgtggctttcaaagcagacttgaactatacaacgttactgtcag

SEQ ID NO: 79023 - DNA, 721 bp, Zea Mays
gttagaatgaaatgtgttgccatttttgggcaattggaccaataacaaaagcatcatctcagactttcatggtatttgtggtccagaaaaaacatgttatagaaaacaaggaagggttgggctaagatgaccctaatatttgcaacctcaactaacattgtgcacctctttatggcttgttcggttatttccgttctatatgaattggaggggattagtatggattggaagggattttgacttactagggattaaaatcgactcaatcctcttcaatccagatggattggggttaagccgaacatgcccttacctagctcactcccacctccatcaccaaactcaaggtgcaaacatcatctccagttccaactactctaactcttcctattcggctcgtctaattggcacatggatcggatcaaaattgctttgatggttatgtttgcaccactttctttgagttgaacgggtcgattttgtaaagaatctgacaacaccgaggctttagattcaacttggccgatgctaggctattcaaaattgagcctgaacgatgtgaagctgtttttttctcggggacatctattagacttagacttgctaatataacatctaggcttgtctcgaagcatattcgttcactgcatcctctccttcattcacaaacgcgcatcgttgctctcagagatgaagctaggttatttttaagggtgcagat

SEQ ID NO: 79024 - DNA, 409 bp, Zea Mays
gttgacattgccctttttgccacggcgatccgctcgatcaggacaatccttggcaaaatgacccgcctcgccacatgcgaaacatgtcaatttagccttgttcttcttcttcttgaagttggtagttttgttgggcttgttagattttggctttcctttgcccttgatgtggttcttctgaaccatgttggcgctggagtggccctcgcctcctttagatcccgtgtccttagcccgagctttctcctcaacatccagagacgctatcagattttcaactgatatctcctgtctcttatgtttcagagctgtggcgaagttcctccatgtagaaggcaactttgcaataatgcatccagccacaaatcggtcaggaaggactatcttaaggtggtcgagctccttggct

SEQ ID NO: 79025 - DNA, 228 bp, Zea Mays
ttttttagaaaaccgcaggagaactgcgcatcttatatattagagaggaaaaaagacattacaatagaggagaagttgcagagcaactctcccaaataaaccctaaggagattacagattgttgctggaagtcgacccgaccacgcccagggcagcaactgagcccaagcccccaaactccttagctcctgccattacccagcaaacgtactcatccgagaaacaccg

SEQ ID NO: 79026 - DNA, 50 bp, Zea Mays
aggctccaagttgtggagattcctcgcaaacgagatatagtgaaacaaag

SEQ ID NO: 79027 - DNA, 339 bp, Zea Mays
atgaaatcgttgtttgacgatgaaaacatgtgtcacgggaggccaaaaatagccttaccggcctccggggaccaaaatgtgtactatggtttggacactaaaattctactatgtcagcaaagttgatatggttaggagactcaaatttcattttactatggtttcgacactaaaatcctttagtgtcgatgtttaggtttagggtttagggataggatttagggtcttggtttccataaaatcgtgtgctatagctcacgggtggcaaaaaatgccataacagcctccccggtctaaaacgaaggtggctggtcggatacataaaattggttgtttggc

SEQ ID NO: 79028 - DNA, 2490 bp, Zea Mays
aaacaaattccgcagtcaacctaggctctggctaacccatgtcccagttcccactgtcatcgcctctctcctttccctccctatatatatataaaccaacccccctgcaggttggatggagtcttcattttctccattacgtgttcccagctgcatgccgcaagtgtcaaactccaattagtcaccagccttgcttgcttgcttgtcccagctaagccgaggacaggacacgcgaagaagaggaacgatcagtcaccagccttgtttgacatcctgagcagcttcatctcctcctcctggcaagtttcttggcaagctggtgctcaaacaatggcgtgttaattaggaataggatagaacaggatcgttgcatcacgcagccaaggagacatggctaggagcagagaggtggcgggctggggcacggtggccggaggaggcggcgcggcggccgtggagaaggcggtgcggtgcctcggcaggggcgtcgacatgacgggcgacctgaggctgaagcactgcaaggacgcggggggctgcctggtcgtccggagcgccgggaggaaggcggcggagaaggccgtcgtgccgggcttcggcgtcgtcgccgacctgcccgccgacgtcaggtgcggcaagggcgaccggatcaggttcaggtccgacgtgctcgagttcaacaagatgtcggaggcgttcaaccaccggaattcgctggcggggaagatcccgtcggggctcttcaactcctgcttcgacctggagagcggctcgtgggcggaggacgccgccgccaccaagtgcctcgccttcgacggctacttcatctcgctcctggacctccgcctcgactgccggccgctcgccctcgccgaccacgtcgtcggcgacgtgccggcggcatgggacccggcagccatagcaagtttcatcgagaggtacgggacccacatcgttgtcgggctgggcttgggtgggcaggacgtggtgtacgtgaagcaggacaggtcgtctccgctgtccccgtccgagatcaaggagcacctcgacaggctcggtgaccagctcttcaccgggacctgcaccctgcccccttccaaccgcaaactcagggaacacaaatctaaggtccctgaggcgttcaatgtgttcgatgcccaagtgacacagcaagggctccaaggaataatggctactccagtgtcctgcaaagagggcgtgacggtgatacactccaagaggggagggaacgcggcggcgagcgaccactcggagtggctgctcaccgtgcccgcgacgccggacgcgataagcttcaagctcgtgcccatcacgtccctcctcaagggcgtgagcggcgtcggcttcctctcccacgccatcaacctgtatctcagatacaaacctccgacaggcgagctgaggtacttcctggacttccagcaccacagactgtgggctccagtgctcggtgacctgccacttgggccctgctccaaccggcaggctcctagtccggccttgaacttcagcctcgtcggttccaagctctacgtcagctcgagcgaggtggttgttccaagactacccgtcaccgggatgagactacatctggagggcaagaaaaataaccggcatccacctgcagcatctgtccaacaccccagcgttcatcggcggaacaccggccaatgagcagccgccggcggcggtgtggcgcgggtcggagacgatctccgacgcgcggtactacgagccggtccagtggaggatgttcgcgcacgtgtgcacggtgccggtgaagtacgaccctcgctgggccggcgccggcgccggcccgccgtcggcgtacgtcgtctccggcgcgcagctccacgtcaaggcccacgactcgaccaacatcctgcacctcaggctcctgtacgcccggctgccgggccacgccgtggtgcagtccaggtgggcgcacggcgccgccaccaggctgtcatcgggcagagggagcttcttcctgtccaagtcgctggcctcgggctccggcggcgtcgacaaggagcagcagcacccggggagggttcacgtcgactccggcgtgttcgccggagggccgcccgtgcctgtcgggacccagaggctgctcaggtttgtggacacgtctcaggtcaccatggggccgcaggacagtcctgggtactggctggtcactggcgccaagctggacgttgagaaggggaagatctcactccgcgtcaagttctcgctgctcgctccagtttcttgacacgctagtcttctttctgctaggagaacaccgctgtgcagaaggccgaaattaggggggactccttgcgcagtgatgagtgattgtatcaaggtcatatttgattttacacagccttccgtacatatttttgctactactttcttgtacaatatattcttaaaatccttcagatttttcatgcaattatacacatttgcaaactaaat

SEQ ID NO: 79029 - DNA, 2053 bp, Zea Mays
attcgttgtccgaaagatctgcatcaatcataaatgagccggaggactagtactacctactggcttctaccaggatgacctctgcttcattactagctgttgggaaggaatagccgtcagaagaagcaggaatagccggtggcatggcaatggcgggtcggcaacgtgcgcctgaagcagcttcttcatatttgccgccagtgacggcagcggctttgcttctatgggtctttattagctgtgcacatgtggaggcaagcgttgattttgccaacctgactgctcttcagaagcatgctgaattcttcgaccggaataaggatggtattattacagcctcagagctctttgaaggatacgttgcaattggatgcgatgccgaatatgccagggttacagccgcatccatcagtgctggtgttggtcctataacaagccctgtacacagctgatgcaccactgcctcacacatccatatacgtagagtatatccatagggcgatgcatggaagtgatacgggtgcatacgacgctgaaggaaggtttgttcctgcaaagtttgaagaaatattcacgaagcatgcgaaggtcaggccggatgcgttgacgttcgaggagattgaggagatgattctagcaaatagagacccattagaccctgaatcatgggctgcgcctgaaggagaatggggactaacatacaagcttgcaagtgataagcaaggctttcttcacaaggactctgcaagaggcatatatgatggcagtgtgttctacaagcttgaggaacagaggacgtctgcagcaagcgaaatgtgatggagttcagcattcagccagatgcaaccagcatatataataaacacgaaaatgtgttaggaaattactagactgttatgtgaatcgggttttattggttgctggctccgctcccgcccagattacgccagcctgggccggtatagatacatgcccgtctcacatccccacgtatgcaagtaaacagatgaaaaaacagctaggttgcgcgaccgtatataggctggactcacgccatgcaggtaaccattcataagccaaaatatagtcaatgtacgcgctggacctgaacgctgctgaccaggtaaccaatcaggcgaataatgtattgtgcagtataagttacggcttttatgttaagccttcgaaatttgaagtttataaagcacaccattggcatgcgactggacaatatgaacataagttaccaagttcaccagttgaaccctcttgcgaatacaaggttgacttgtcccttttggttcgagttgattatgagtgattgtccatgggtagcactctagggtagtggtgggttgaccagtgtgtgaaattatgtatgtgcaaccatgtcggtcggcttgaggtatgcagatgtcgagcacagggacggtggtcgacggctgaggtgaaggtcatgtgggctcgtgttgatcggctgggagcggtgaaggacgtgtgttggatcttggctaacgagacggagcagcggggtgaccactcatggtggctgacacctgggacacccaatcgcgcgaggatatggtggagcgggccgtattgccggcgcggtcgaggactggcgggacaagtgtccaggacatggaggacgcgcccgcggtgcgatactcacgacggattggcggtttgggtctcaaaaccaccaaacgctacgcattgtgggttttgctgagtttgggcctcaaaacttgacagtgacggttctagtggtaatcggtggcaccatgtggcatcacagcgaagggtgcgtcagggcgaagtaacttcgtgtggagcgtgtggccgtcggatcaaaaaccaaggagttggttcatttcaccctcgatggagctgataggcttgtaaataggggtagtttagaaagtggaaataaccctctataaatataggggagggctgttgttacagccatctcttgactgccattttgttgagacttcacattttagagctcctaattttctctctaggtagacacctattgagccgagag

SEQ ID NO: 79030 - DNA, 1967 bp, Zea Mays
actggcttctaccaggatgacctctgcttcattactagctgttgggaaggaatagccgtcagaagaagcaggaatagccggtggcatggcaatggcgggtcggcaacgtgcgcctgaagcagcttcttcatatttgccgccagtgacggcagcggctttgcttctatgggtctttattagctgtgcacatgtggaggcaagcgttgattttgccaacctgactgctcttcagaagcatgctgaattcttcgaccggaataaggatggtattattacagcctcagagctctttgaaggatacgttgcaattggatgcgatgccgaatatgccagggttacagccgcatccatcagtgctggtgctgatgcaccactgcctcacacatccatatacgtagagtatatccatagggcgatgcatggaagtgatacgggtgcatacgacgctgaaggaaggtttgttcctgcaaagtttgaagaaatattcacgaagcatgcgaaggtcaggccggatgcgttgacgttcgaggagattgaggagatgattctagcaaatagagacccattagaccctgaatcatgggctgcgcctgaaggagaatggggactaacatacaagcttgcaagtgataagcaaggctttcttcacaaggactctgcaagaggcatatatgatggcagtgtgttctacaagcttgaggaacagaggacgtctgcagcaagcgaaatgtgatggagttcagcattcagccagatgcaaccagcatatataataaacacgaaaatgtgttaggaaattactagactgttatgtgaatcgggttttattggttgctggctccgctcccgcccagattacgccagcctgggccggtatagatacatgcccgtctcacatccccacgtatgcaagtaaacagatgaaaaaacagctaggttgcgcgaccgtatataggctggactcacgccatgcaggtaaccattcataagccaaaatatagtcaatgtacgcgctggacctgaacgctgctgaccaggtaaccaatcaggcgaataatgtattgtgcagtataagttacggcttttatgttaagccttcgaaatttgaagtttataaagcacaccattggcatgcgactggacaatatgaacataagttaccaagttcaccagttgaaccctcttgcgaatacaaggttgacttgtcccttttggttcgagttgattatgagtgattgtccatgggtagcactctagggtagtggtgggttgaccagtgtgtgaaattatgtatgtgcaaccatgtcggtcggcttgaggtatgcagatgtcgagcacagggacggtggtcgacggctgaggtgaaggtcatgtgggctcgtgttgatcggctgggagcggtgaaggacgtgtgttggatcttggctaacgagacggagcagcggggtgaccactcatggtggctgacacctgggacacccaatcgcgcgaggatatggtggagcgggccgtattgccggcgcggtcgaggactggcgggacaagtgtccaggacatggaggacgcgcccgcggtgcgatactcacgacggattggcggtttgggtctcaaaaccaccaaacgctacgcattgtgggttttgctgagtttgggcctcaaaacttgacagtgacggttctagtggtaatcggtggcaccatgtggcatcacagcgaagggtgcgtcagggcgaagtaacttcgtgtggagcgtgtggccgtcggatcaaaaaccaaggagttggttcatttcaccctcgatggagctgataggcttgtaaataggggtagtttagaaagtggaaataaccctctataaatataggggagggctgttgttacagccatctcttgactgccattttgttgagacttcacattttagagctcctaattttctctctaggtagacacctattgagccgagag

SEQ ID NO: 79031 - DNA, 1958 bp, Zea Mays
actggcttctaccaggatgacctctgcttcattactagctgttgggaaggaatagccgtcagaagaagcaggaatagccggtggcatggcaatggcgggtcggcaacgtgcgcctgaagcagcttcttcatatttgccgccagtgacggcagcggctttgcttctatgggtctttattagctgtgcacatgtggaggcaagcgttgattttgccaacctgactgctcttcagaagcatgctgaattcttcgaccggaataaggatggatacgttgcaattggatgcgatgccgaatatgccagggttacagccgcatccatcagtgctggtgttggtcctataacaagccctgctgatgcaccactgcctcacacatccatatacgtagagtatatccatagggcgatgcatggaagtgatacgggtgcatacgacgctgaaggaaggtttgttcctgcaaagtttgaagaaatattcacgaagcatgcgaaggtcaggccggatgcgttgacgttcgaggagattgaggagatgattctagcaaatagagacccattagaccctgaatcatgggctgcgcctgaaggagaatggggactaacatacaagcttgcaagtgataagcaaggctttcttcacaaggactctgcaagaggcatatatgatggcagtgtgttctacaagcttgaggaacagaggacgtctgcagcaagcgaaatgtgatggagttcagcattcagccagatgcaaccagcatatataataaacacgaaaatgtgttaggaaattactagactgttatgtgaatcgggttttattggttgctggctccgctcccgcccagattacgccagcctgggccggtatagatacatgcccgtctcacatccccacgtatgcaagtaaacagatgaaaaaacagctaggttgcgcgaccgtatataggctggactcacgccatgcaggtaaccattcataagccaaaatatagtcaatgtacgcgctggacctgaacgctgctgaccaggtaaccaatcaggcgaataatgtattgtgcagtataagttacggcttttatgttaagccttcgaaatttgaagtttataaagcacaccattggcatgcgactggacaatatgaacataagttaccaagttcaccagttgaaccctcttgcgaatacaaggttgacttgtcccttttggttcgagttgattatgagtgattgtccatgggtagcactctagggtagtggtgggttgaccagtgtgtgaaattatgtatgtgcaaccatgtcggtcggcttgaggtatgcagatgtcgagcacagggacggtggtcgacggctgaggtgaaggtcatgtgggctcgtgttgatcggctgggagcggtgaaggacgtgtgttggatcttggctaacgagacggagcagcggggtgaccactcatggtggctgacacctgggacacccaatcgcgcgaggatatggtggagcgggccgtattgccggcgcggtcgaggactggcgggacaagtgtccaggacatggaggacgcgcccgcggtgcgatactcacgacggattggcggtttgggtctcaaaaccaccaaacgctacgcattgtgggttttgctgagtttgggcctcaaaacttgacagtgacggttctagtggtaatcggtggcaccatgtggcatcacagcgaagggtgcgtcagggcgaagtaacttcgtgtggagcgtgtggccgtcggatcaaaaaccaaggagttggttcatttcaccctcgatggagctgataggcttgtaaataggggtagtttagaaagtggaaataaccctctataaatataggggagggctgttgttacagccatctcttgactgccattttgttgagacttcacattttagagctcctaattttctctctaggtagacacctattgagccgagag

SEQ ID NO: 79032 - DNA, 1988 bp, Zea Mays
actggcttctaccaggatgacctctgcttcattactagctgttgggaaggaatagccgtcagaagaagcaggaatagccggtggcatggcaatggcgggtcggcaacgtgcgcctgaagcagcttcttcatatttgccgccagtgacggcagcggctttgcttctatgggtctttattagctgtgcacatgtggaggcaagcgttgattttgccaacctgactgctcttcagaagcatgctgaattcttcgaccggaataaggatggtattattacagcctcagagctctttgaaggatacgttgcaattggatgcgatgccgaatatgccagggttacagccgcatccatcagtgctggtgttggtcctataacaagccctgctgatgcaccactgcctcacacatccatatacgtagagtatatccatagggcgatgcatggaagtgatacgggtgcatacgacgctgaaggaaggtttgttcctgcaaagtttgaagaaatattcacgaagcatgcgaaggtcaggccggatgcgttgacgttcgaggagattgaggagatgattctagcaaatagagacccattagaccctgaatcatgggctgcgcctgaaggagaatggggactaacatacaagcttgcaagtgataagcaaggctttcttcacaaggactctgcaagaggcatatatgatggcagtgtgttctacaagcttgaggaacagaggacgtctgcagcaagcgaaatgtgatggagttcagcattcagccagatgcaaccagcatatataataaacacgaaaatgtgttaggaaattactagactgttatgtgaatcgggttttattggttgctggctccgctcccgcccagattacgccagcctgggccggtatagatacatgcccgtctcacatccccacgtatgcaagtaaacagatgaaaaaacagctaggttgcgcgaccgtatataggctggactcacgccatgcaggtaaccattcataagccaaaatatagtcaatgtacgcgctggacctgaacgctgctgaccaggtaaccaatcaggcgaataatgtattgtgcagtataagttacggcttttatgttaagccttcgaaatttgaagtttataaagcacaccattggcatgcgactggacaatatgaacataagttaccaagttcaccagttgaaccctcttgcgaatacaaggttgacttgtcccttttggttcgagttgattatgagtgattgtccatgggtagcactctagggtagtggtgggttgaccagtgtgtgaaattatgtatgtgcaaccatgtcggtcggcttgaggtatgcagatgtcgagcacagggacggtggtcgacggctgaggtgaaggtcatgtgggctcgtgttgatcggctgggagcggtgaaggacgtgtgttggatcttggctaacgagacggagcagcggggtgaccactcatggtggctgacacctgggacacccaatcgcgcgaggatatggtggagcgggccgtattgccggcgcggtcgaggactggcgggacaagtgtccaggacatggaggacgcgcccgcggtgcgatactcacgacggattggcggtttgggtctcaaaaccaccaaacgctacgcattgtgggttttgctgagtttgggcctcaaaacttgacagtgacggttctagtggtaatcggtggcaccatgtggcatcacagcgaagggtgcgtcagggcgaagtaacttcgtgtggagcgtgtggccgtcggatcaaaaaccaaggagttggttcatttcaccctcgatggagctgataggcttgtaaataggggtagtttagaaagtggaaataaccctctataaatataggggagggctgttgttacagccatctcttgactgccattttgttgagacttcacattttagagctcctaattttctctctaggtagacacctattgagccgagag

SEQ ID NO: 79033 - DNA, 1507 bp, Zea Mays
taagcccatcactgagagacacttcgctgcttcattgcttcttgttggtcttctttcctttgggcaccctttcgaaagctgtaggtgcaggaattagcaagaagagaaggaagcaagcatgtcgaagcctgttgcagcagcaatggtccccgtggtggcgctgatgatggtgctgtgcgcgtgcacgatgcccgcgcgcggcggggacgactacacggcgttcgtgtacgccgggtgctcgcaggggcggtacgaccccgggtcgcagtacgccgcggacgtggacacggcgctgtcgtccctggcgaacagcgccggcttcaccgcctacgccaactacacctcgccgtctccgtcgggcctggagggcgtgtaccagtgccggtccgacctgcccgccgcggtgtgcggcgtctgcgtgaagtcggccgtgtcgaagctggcctcgctctgcagcgcggcggcgggcgccgcggtgcagctgcgcgcctgcttcgcgcggtacgggaacgactcgttcctggggaagcaggacacgacggtgctgttcaagaagtgcggcggcggagatggcgacgacgcgggcgtggcggccatgcgcgacgcggcgctcggcgcgctcgtggccgccggcggcggcggcggcgacgggggctcgtaccgcgccggcgcggcgggctacgtgcaggccatgtcgcagtgcgtcggcgacctcggcgctaaggcctgcaccgactgcgtctcggccgcggcctcgcagctcaaggccggctgcggctacgcctccgccgccgaggtgtacctcggcaagtgctacgcgcgcttctggtccaatgccggcggcggaggagtgccggtcggaggtggcgccggtaccggtggcggcggtgtggggggaggagctgcaggcaatggatacgcgtatggtggattcgttcccaacacgtacgggcagcacgacgagtccgggaaaaccctggccatcatcatcggcctggtggcggcggtggccattgtcatcgtcttcctctccttcctccgcagggccggcgccgtcggcggtaagatgcaaaagctaagtgcgcgcgggattggtcaccaccaacggactggatcggtcggtgcaggctctttataattggctcgaaaaccgctttacggtgcgagcgagctgaaaggcggctttccctgtgcagtcatgtgaacctgaagattccgtccagtaccagctactcgtagagccacgatgtgatatacattttccggcaaacaaaaaaataacagattatgtggactctctgcccgttattatatactatatatgtatacttatatagagagtgtacttattatggagcatgagattcagcatatatatattgtccaagtttatgtgtcgaattaattacggttggtgatgtgaatcttatgtactccctccggtgcagtaaaagaagtcatcgcgcaagcgtgcacaaaaagaagtcatagcgcgcatgggtctggg

SEQ ID NO: 79034 - DNA, 2743 bp, Zea Mays
cgtgcacaccctattgttctgccactgccgcggccgtaccccgccccgcatgctgcccggaatcagcgcctccgccgccgcagcccttccagaaatctccatcccgaatcctccgcgcccccgcctgcccccgcgcatcccgcagcccccgcccccgcgcatcccgcagccttggcgtcgtggccgccgcctctgctccctcctccatcccgcgcaacaacgacgaccgtcggggcctcgcctggcagatcaagcggggaatccacccgccaggcgtctccctgacagtggtagacggtggcggcgatgggggccgagagcgaggatgccccttccccatcctctaccctcccttgcgattccagcattggtgcccgcatccccgccgtccgaagcatggcgctcttcgtctcctccctcgccgccgccctctcccacctctccctcccatcgacctccaaccccaagcctcacccagcctcgctcctgcgcctgcgctccacctaccgccgcgctgttagcctcgcggtggccggagcaagaacggcaataggatgaagctgctgctgtccaacccctacggcttcagcagcccccgacatcgtgtgtcgggatctgggactccagcggcaaggcgaccactatgccgcacgggcgcggtgcaggagctcctccagcggcgccgcaactgcctctgagccctcatggtccagctcgagtgctcgacgcacccgctccgcacccgcccttgtcccccaggtgtcggcgtgcgggattcggtaacggtgttggagctcatccagtggcgccgcaaccgcctccgatccctcaaggtttggctcaaggctgatggccaggtcgaccgtctcctccatgcgcaggggaagaggaaggagctggagcagacggtgaatagcttctctgatttctccctctccggtcctgttgcaaagagccacaaactggttaggatgtcttggatcatcagacagatcagcatgacttgcaagcagctagctactgtttacagatgtcctctacttgccaaaaaataacaaaggggttctcgttcttgaaagctgcatagatagcacctcaacttggccactaaaacaactaagtttttttatggacatgtctgatgtttttctcaataattgtgcaaattttcctttcataattttcgtcgtcggggggcaggaaccgggcggtgtacgtgctggcgcagtgcacgctggacatgccgccggaccactgccgggcctcctcgatggagccatggcagagagcggcgacggaaggtcagcggcgacaagatggacgtggcggtcttcggggcgcggtgcaccctgcggtatgagatggacctgcagttcttcaatgtcactggcaacagcaagatgctgtccctatatttttacagatatttttaataatgacctcagtggaccctatgcatttcttgagccaccttttgttcaaagatcccttctatataagatacaggcaaggagaaaaaatagattaatcggtctcgaagcttctgatacactcagttctcacatgtcgcatgaaatggacctcactagaaaccaaacacccttgaatcgcagtcacccacgtcgccaacaggagtgacttcctcaccctgctccacgccctgccgccgcagagcgggagcggcggctgcgacggccgcggtgctggggaggaggatgcctccgcgctcgccaactccctcgacgcgctttgcaaggcctgcaagcctgagtaagcaagagaacaaaacccgcgggactgtgaacaagcgcagaaagaaatacgaatgcaacaagtcctacattctgttctccttttttggggggccaaaacgttgaggtctcaactcactcgtgcaagcagtttcatcgccacccccatgtgagcaatccgggacaccgcggagatgcctcgtgaggaaagcggtacggcgaggcagagcagcgtcggtggtcgtggaaggatggagcaacaaccccacatgttttgttctaatgacacagtggcgccaaggttccagactgtggcgggactgggctctgcagccgctgcaaaggagagtgcttcgtcttcaagcaactctcgaaggagacggccaccaggtcacacaaggccgccaagaacatggccaccggatacacttcggggctgtccaccaatggacctactgcaacaagtactcctccacccgcgtgcctgcataaaatggcaggggttctaccaacaatcaacacacatgtgaagcgaagctgggacgtgcatgtatgtggatccacgacacgtgcatctgtaggaaccctgattttggaaagtgctgagagaggtggcatctagaggatgtcatgtcgaacgtgtgaagtttttttagaaatatgtatatttgtgtgaagctttttagaaacttggctccattttattttctatgttcctctcggctttgtttcctatcctttccaatgacttgctatgcatttgcactgtatttggcatgtctaaaactgctacacaaaacttgatatatattttgtctaaaaatactatatccttgttatgcttgattgatctttattttgtctgctcttctattcttgtgtgggtctatcaagaatgaggcaattagataaagatatatgctttgtcagtattagctgagtctttgagcgtagcaggaaaagtcttggcacatcattgttttagttattat

SEQ ID NO: 79035 - DNA, 2820 bp, Zea Mays
ctgccgcggccgtaccccgccccgcatgctgcccggaatcagcgcctccgccgccgcagcccttccagaaatctccatcccgaatcctccgcgcccccgcctgcccccgcgcatcccgcagcccccgcccccgcgcatcccgcagccttggcgtcgtggccgccgcctctgctccctcctccatcccgcgcaacaacgacgaccgtcggggcctcgcctggcagatcaagcggggaatccacccgccaggcgtctccctgacagtggtagacggtggcggcgatgggggccgagagcgaggatgccccttccccatcctctaccctcccttgcgattccagcattggtgcccgcatccccgccgtccgaagcatggcgctcttcgtctcctccctcgccgccgccctctcccacctctccctcccatcgacctccaaccccaagcctcacccagcctcgctcctgcgcctgcgctccacctaccgccgcgctgttagcctcgcggtggccggagcaagaacggcaataggatgaagctgctgctgtccaacccctacggcttcagcagcccccgacatcgtgtgtcgggatctgggactccagcggcaaggcgaccactatgccgcacgggcgcggtgcaggagctcctccagcggcgccgcaactgcctctgagccctcatggtccagctcgagtgctcgacgcacccgctccgcacccgcccttgtcccccaggtgtcggcgtgcgggattcggtaacggtgttggagctcatccagtggcgccgcaaccgcctccgatccctcaaggtttggctcaaggctgatggccaggtcgaccgtctcctccatgcgcaggggaagaggaaggagctggagcagacggtgaatagcttctctgatttctccctctccggtcctgttgcaaagagccacaaactggttaggatgtcttggatcatcagacagatcagcatgacttgcaagcagctagctactgtttacagatgtcctctacttgccaaaaaataacaaaggggttctcgttcttgaaagctgcatagatagcacctcaacttggccactaaaacaactaagtttttttatggacatgtctgatgtttttctcaataattgtgcaaattttcctttcataattttcgtcgtcggggggcaggaaccgggcggtgtacgtgctggcgcagtgcacgctggacatgccgccggaccactgccgggcctcctcgatggagccatggcagagagcggcgacggaaggtcagcggcgacaagatggacgtggcggtcttcggggcgcggtgcaccctgcggtatgagatggacctgcagttcttcaatgtcactggcaacagcaagatgctgtccctatatttttacagatatttttaataatgacctcagtggaccctatgcatttcttgagccaccttttgttcaaagatcccttctatataagatacaggcaaggagaaaaaatagcattctccgatatatcgagtgggatgatgcttggtggacgtgtacatactaatattaatcggtctcgaagcttctgatacactcagttctcacatgtcgcatgaaatggacctcactagaaaccaaacacccttgaatcgcagtcacccacgtcgccaacaggagtgacttcctcaccctgctccacgccctgccgccgcagagcgggagcggcggctgcgacggccgcggtgctggggaggaggatgcctccgcgctcgccaactccctcgacgcgctttgcaaggcctgcaagcctgaggtgcgtgtactcactccttcactcgtgcgcaacttgttccttctccaacgtgttccagaacaccacagcatgcctctgtccacatacttcattggttcttcatttaattggaattcaaacaaggatttcggtaaatatgagtgtcaacttttgctttgcattcttctgtatagtacaacacacattgtttcttgcatttggaagttgttggtctcatgtaggacacagtggcgccaaggttccagactgtggcgggactgggctctgcagccgctgcaaaggagagtgcttcgtcttcaagcaactctcgaaggagacggccaccaggtcacacaaggccgccaagaacatggccaccggatacacttcggggctgtccaccaatggacctactgcaacaagtactcctccacccgcgtgcctgcataaaatggcaggggttctaccaacaatcaacacacatgtgaagcgaagctgggacgtgcatgtatgtggatccacgacacgtgcatctgtaggaaccctgattttggtatggtttctacactcaaattcatcagtatgatataaggcaatctgctggctggtatttaagagtggccctctcttcatatcatcgaaaggaaagtgctgagagaggtggcatctagaggatgtcatgtcgaacgtgtgaagtttttttagaaatatgtatatttgtgtgaagctttttagaaacttggctccattttattttctatgttcctctcggctttgtttcctatcctttccaatgacttgctatgcatttgcactgtatttggcatgtctaaaactgctacacaaaacttgatatatattttgtctaaaaatactatatccttgttatgcttgattgatctttattttgtctgctcttctattcttgtgtgggtctatcaagaatgaggcaattagataaagatatatgctttgtcagtattagctgagtctttgagcgtagcaggaaaagtcttggcacatcattgttttagttattat

SEQ ID NO: 79036 - DNA, 3982 bp, Zea Mays
ctgccgcggccgtaccccgccccgcatgctgcccggaatcagcgcctccgccgccgcagcccttccagaaatctccatcccgaatcctccgcgcccccgcctgcccccgcgcatcccgcagcccccgcccccgcgcatcccgcagccttggcgtcgtggccgccgcctctgctccctcctccatcccgcgcaacaacgacgaccgtcggggcctcgcctggcagatcaagcggggaatccacccgccaggcgtctccctgacagtggtagacggtggcggcgatgggggccgagagcgaggatgccccttccccatcctctaccctcccttgcgattccagcattggtgcccgcatccccgccgtccgaagcatggcgctcttcgtctcctccctcgccgccgccctctcccacctctccctcccatcgacctccaaccccaagcctcacccagcctcgctcctgcgcctgcgctccacctaccgccgcgctgttagcctcgcggtggccggagcaagaacggcaataggatgaagctgctgctgtccaacccctacggcttcagcagcccccgacatcgtgtgtcgggatctgggactccagcggcaaggcgaccactatgccgcacgggcgcggtgcaggagctcctccagcggcgccgcaactgcctctgagccctcatggtccagctcgagtgctcgacgcacccgctccgcacccgcccttgtcccccaggtgtcggcgtgcgggattcggtaacggtgttggagctcatccagtggcgccgcaaccgcctccgatccctcaaggtttggctcaaggctgatggccaggtcgaccgtctcctccatgcgcaggggaagaggaaggagctggagcagacggtgaatagcttctctgatttctccctctccggtcctgttgcaaagagccacaaactggaaccgggcggtgtacgtgctggcgcagtgcacgctggacatgccgccggaccactgccgggcctcctcgatggagccatggcagagagcggcgacggaaggtcagcggcgacaagatggacgtggcggtcttcggggcgcggtgcaccctgcggtatgagatggacctgcagttcttcaatgtcactggcaacagcaagatgctgtccctatatttttacagatatttttaataatgacctcagtggaccctatgcatttcttgagccaccttttgttcaaagatcccttctatataagatacaggcaaggagaaaaaatagattaatcggtctcgaagcttctgatacactcagttctcacatgtcgcatgaaatggacctcactagaaaccaaacacccttgaatcgcagtcacccacgtcgccaacaggagtgacttcctcaccctgctccacgccctgccgccgcagagcgggagcggcggctgcgacggccgcggtgctggggaggaggatgcctccgcgctcgccaactccctcgacgcgctttgcaaggcctgcaagcctgaggtgcgtgtactcactccttcactcgtgcgcaacttgttccttctccaacgtgttccagaacaccacagcatgcctctgtccacagtaagcaagagaacaaaacccgcgggactgtgaacaagcgcagaaagaaatacgaatgcaacaagtcctacattctgttctccttttttggggggccaaaacgttgaggtctcaactcactcgtgcaagcagtttcatcgccacccccatgtgagcaatccgggacaccgcggagatgcctcgtgaggaaagcggtacggcgaggcagagcagcgtcggtggtcgtggaaggatggagcaacaaccccacatgttttgttctaatggtccataagtttgcaccacacaaccatttggttttatctgttgtcatttgaccttgatggaaaggagtgagatgaactatggaggaattctgatattatggatttccatttaacttcatcgtacttgcaagccatgcaatatgctattgttgttattgccctttataatctgtgattggactatactgtgtatttaaagcggtatgccacttcttctaaatactatccaaccacagattgttattgccctttatatcaaatgatttttatattgataattagtacttcattggttcttcatttaattggaattcaaacaaggatttcggtaaatatgagtgtcaacttttgctttgcattcttctgtatagtacaacacacattgtttcttgcatttggaagttgttggtctcatgtaggacacagtggcgccaaggttccagactgtggcgggactgggctctgcagccgctgcaaaggagagtgcttcgtcttcaagcaactctcgaaggagacggccaccaggtcacacaaggccgccaagaacatggccaccggatacacttcggggctgtccaccaatggacctactgcaacaagtactcctccacccgcgtgcctgcataaaatggcaggggttctaccaacaatcaacacacatgtgaagcgaagctgggacgtgcatgtatgtggatccacgacacgtgcatctgtaggaaccctgattttggtatggtttctacactcaaattcatcagtatgatataaggcaatctgctggctggtatttaagagtggccctctcttcatatcatcgaaaggtaaaactattagtggcacacgttggttttttcctttgtttccaacatgtaacattatattaggggtatgtgcagtttagggtaagtaatatactcctttgtgctcagtaagtaattgatagaaggtagaagaaggtagaaacatatgtgcagtttagagtttacctctttatgatttctgggtagccacaatattttcacattgcaattcaagtccttagtaccctggtaatcaaactaacatgtcagagcatcaggcaaattcattgtgcacctgcctattgtatgctaaagaaatcagtttttttgcatgtgttagttgtctcctaacctgctgcattttcaatttttgtgttctgtgttttgtaatttgggagcaccttcaccattgtgttattagagctaggcaccttcaccattgtgttattgatgatctttcttggtctgaatggagtttttgcacctattcacatgccagagagtttatgcattgtcctccttttttggatacactttctgttaaaaaatgctacacagttgcattctacttaccttgtgattttgatggagctctgttgttgtgcttctttgacatttgtcggtcctttgagcattaggtctgcatcatgcattatgttgttatctattgatctatatatcccatattgtggagatcactaaaatcttagtaatttaagttctgttcaaactttcaattccatcgtccgtgaaaaattgataagtatgaatgtgttgacttgactccattttatcttctccttatttgagcttgtattcttattttttaatacattgctgccctgcactgagatttctattgtaaataaacaaagtgctatttaaattttgatttattccttacgaatgtctgttggtttcaggaaagtgctgagagaggtggcatctagaggatgtcatgtcgaacgtgtgaagtttttttagaaatatgtatatttgtgtgaagctttttagaaacttggctccattttattttctatgttcctctcggctttgtttcctatcctttccaatgacttgctatgcatttgcactgtatttggcatgtctaaaactgctacacaaaacttgatatatattttgtctaaaaatactatatccttgttatgcttgattgatctttattttgtctgctcttctattcttgtgtgggtctatcaagaatgaggcaattagataaagatatatgctttgtcagtattagctgagtctttgagcgtagcaggaaaagtcttggcacatcattgttttagttattat

SEQ ID NO: 79037 - DNA, 3224 bp, Zea Mays
ctgccgcggccgtaccccgccccgcatgctgcccggaatcagcgcctccgccgccgcagcccttccagaaatctccatcccgaatcctccgcgcccccgcctgcccccgcgcatcccgcagcccccgcccccgcgcatcccgcagccttggcgtcgtggccgccgcctctgctccctcctccatcccgcgcaacaacgacgaccgtcggggcctcgcctggcagatcaagcggggaatccacccgccaggcgtctccctgacagtggtagacggtggcggcgatgggggccgagagcgaggatgccccttccccatcctctaccctcccttgcgattccagcattggtgcccgcatccccgccgtccgaagcatggcgctcttcgtctcctccctcgccgccgccctctcccacctctccctcccatcgacctccaaccccaagcctcacccagcctcgctcctgcgcctgcgctccacctaccgccgcgctgttagcctcgcggtggccggagcaagaacggcaataggatgaagctgctgctgtccaacccctacggcttcagcagcccccgacatcgtgtgtcgggatctgggactccagcggcaaggcgaccactatgccgcacgggcgcggtgcaggagctcctccagcggcgccgcaactgcctctgagccctcatggtccagctcgagtgctcgacgcacccgctccgcacccgcccttgtcccccaggtgtcggcgtgcgggattcggtaacggtgttggagctcatccagtggcgccgcaaccgcctccgatccctcaaggtttggctcaaggctgatggccaggtcgaccgtctcctccatgcgcaggggaagaggaaggagctggagcagacggtgaatagcttctctgatttctccctctccggtcctgttgcaaagagccacaaactggttaggatgtcttggatcatcagacagatcagcatgacttgcaagcagctagctactgtttacagatgtcctctacttgccaaaaaataacaaaggggttctcgttcttgaaagctgcatagatagcacctcaacttggccactaaaacaactaagtttttttatggacatgtctgatgtttttctcaataattgtgcaaattttcctttcataattttcgtcgtcggggggcaggaaccgggcggtgtacgtgctggcgcagtgcacgctggacatgccgccggaccactgccgggcctcctcgatggagccatggcagagagcggcgacggaaggtcagcggcgacaagatggacgtggcggtcttcggggcgcggtgcaccctgcggtatgagatggacctgcagttcttcaatgtcactggcaacagcaagatgctgtccctatatttttacagatatttttaataatgacctcagtggaccctatgcatttcttgagccaccttttgttcaaagatcccttctatataagatacagtcacccacgtcgccaacaggagtgacttcctcaccctgctccacgccctgccgccgcagagcgggagcggcggctgcgacggccgcggtgctggggaggaggatgcctccgcgctcgccaactccctcgacgcgctttgcaaggcctgcaagcctgagtttcatcgccacccccatgtgagcaatccgggacaccgcggagatgcctcgtgaggaaagcggtacggcgaggcagagcagcgtcggtggtcgtggaaggatggagcaacaaccccacatgttttgttctaatgtaagttattgcaacctaaatttaaattatgtgaatccttgaatttggagactaccgctgcaagctgatccattttagctgagaactcattactcctaaatgaagttaaaattgagttatatagttcaagggatgacaagttttgatattcttagattgatcgccttgggcgtggatgtttatttgttgttacaacaatataaactattgagtatgctctcattttttatagggtccataagtttgcaccacacaaccatttggttttatctgttgtcatttgaccttgatggaaaggagtgagatgaactatggaggaattctgatattatggatttccatttaacttcatcgtacttgcaagccatgcaatatgctattgttgttattgccctttataatctgtgattggactatactgtgtatttaaagcggtatgccacttcttctaaatactatccaaccacagattgttattgccctttatatcaaatgatttttatattgataattagtacttcattggttcttcatttaattggaattcaaacaaggatttcggtaaatatgagtgtcaacttttgctttgcattcttctgtatagtacaacacacattgtttcttgcatttggaagttgttggtctcatgtaggacacagtggcgccaaggttccagactgtggcgggactgggctctgcagccgctgcaaaggagagtgcttcgtcttcaagcaactctcgaaggagacggccaccaggtcacacaaggccgccaagaacatggccaccggatacacttcggggctgtccaccaatggacctactgcaacaagtactcctccacccgcgtgcctgcataaaatggcaggggttctaccaacaatcaacacacatgtgaagcgaagctgggacgtgcatgtatgtggatccacgacacgtgcatctgtaggaaccctgattttggtatggtttctacactcaaattcatcagtatgatataaggcaatctgctggctggtatttaagagtggccctctcttcatatcatcgaaaggaaagtgctgagagaggtggcatctagaggatgtcatgtcgaacgtgtgaagtttttttagaaatatgtatatttgtgtgaagctttttagaaacttggctccattttattttctatgttcctctcggctttgtttcctatcctttccaatgacttgctatgcatttgcactgtatttggcatgtctaaaactgctacacaaaacttgatatatattttgtctaaaaatactatatccttgttatgcttgattgatctttattttgtctgctcttctattcttgtgtgggtctatcaagaatgaggcaattagataaagatatatgctttgtcagtattagctgagtctttgagcgtagcaggaaaagtcttggcacatcattgttttagttattat

SEQ ID NO: 79038 - DNA, 3581 bp, Zea Mays
ctgccgcggccgtaccccgccccgcatgctgcccggaatcagcgcctccgccgccgcagcccttccagaaatctccatcccgaatcctccgcgcccccgcctgcccccgcgcatcccgcagcccccgcccccgcgcatcccgcagccttggcgtcgtggccgccgcctctgctccctcctccatcccgcgcaacaacgacgaccgtcggggcctcgcctggcagatcaagcggggaatccacccgccaggcgtctccctgacagtggtagacggtggcggcgatgggggccgagagcgaggatgccccttccccatcctctaccctcccttgcgattccagcattggtgcccgcatccccgccgtccgaagcatggcgctcttcgtctcctccctcgccgccgccctctcccacctctccctcccatcgacctccaaccccaagcctcacccagcctcgctcctgcgcctgcgctccacctaccgccgcgctgttagcctcgcggtggccggagcaagaacggcaataggatgaagctgctgctgtccaacccctacggcttcagcagcccccgacatcgtgtgtcgggatctgggactccagcggcaaggcgaccactatgccgcacgggcgcggtgcaggagctcctccagcggcgccgcaactgcctctgagccctcatggtccagctcgagtgctcgacgcacccgctccgcacccgcccttgtcccccaggtgtcggcgtgcgggattcggtaacggtgttggagctcatccagtggcgccgcaaccgcctccgatccctcaaggtttggctcaaggctgatggccaggtcgaccgtctcctccatgcgcaggggaagaggaaggagctggagcagacggtgaatagcttctctgatttctccctctccggtcctgttgcaaagagccacaaactggttaggatgtcttggatcatcagacagatcagcatgacttgcaagcagctagctactgtttacagatgtcctctacttgccaaaaaataacaaaggggttctcgttcttgaaagctgcatagatagcacctcaacttggccactaaaacaactaagtttttttatggacatgtctgatgtttttctcaataattgtgcaaattttcctttcataattttcgtcgtcggggggcaggaaccgggcggtgtacgtgctggcgcagtgcacgctggacatgccgccggaccactgccgggcctcctcgatggagccatggcagagagcggcgacggaaggtcagcggcgacaagatggacgtggcggtcttcggggcgcggtgcaccctgcggtatgagatggacctgcagttcttcaatgtcactggcaacagcaagatgctgtccctatatttttacagatatttttaataatgacctcagtggaccctatgcatttcttgagccaccttttgttcaaagatcccttctatataagatacaggcaaggagaaaaaatagattaatcggtctcgaagcttctgatacactcagttctcacatgtcgcatgaaatggacctcactagaaaccaaacacccttgaatcgcagtcacccacgtcgccaacaggagtgacttcctcaccctgctccacgccctgccgccgcagagcgggagcggcggctgcgacggccgcggtgctggggaggaggatgcctccgcgctcgccaactccctcgacgcgctttgcaaggcctgcaagcctgagtttcatcgccacccccatgtgagcaatccgggacaccgcggagatgcctcgtgaggaaagcggtacggcgaggcagagcagcgtcggtggtcgtggaaggatggagcaacaaccccacatgttttgttctaatgacacagtggcgccaaggttccagactgtggcgggactgggctctgcagccgctgcaaaggagagtgcttcgtcttcaagcaactctcgaaggagacggccaccaggtcacacaaggccgccaagaacatggccaccggatacacttcggggctgtccaccaatggacctactgcaacaagtactcctccacccgcgtgcctgcataaaatggcaggggttctaccaacaatcaacacacatgtgaagcgaagctgggacgtgcatgtatgtggatccacgacacgtgcatctgtaggaaccctgattttggtatggtttctacactcaaattcatcagtatgatataaggcaatctgctggctggtatttaagagtggccctctcttcatatcatcgaaaggtaaaactattagtggcacacgttggttttttcctttgtttccaacatgtaacattatattaggggtatgtgcagtttagggtaagtaatatactcctttgtgctcagtaagtaattgatagaaggtagaagaaggtagaaacatatgtgcagtttagagtttacctctttatgatttctgggtagccacaatattttcacattgcaattcaagtccttagtaccctggtaatcaaactaacatgtcagagcatcaggcaaattcattgtgcacctgcctattgtatgctaaagaaatcagtttttttgcatgtgttagttgtctcctaacctgctgcattttcaatttttgtgttctgtgttttgtaatttgggagcaccttcaccattgtgttattagagctaggcaccttcaccattgtgttattgatgatctttcttggtctgaatggagtttttgcacctattcacatgccagagagtttatgcattgtcctccttttttggatacactttctgttaaaaaatgctacacagttgcattctacttaccttgtgattttgatggagctctgttgttgtgcttctttgacatttgtcggtcctttgagcattaggtctgcatcatgcattatgttgttatctattgatctatatatcccatattgtggagatcactaaaatcttagtaatttaagttctgttcaaactttcaattccatcgtccgtgaaaaattgataagtatgaatgtgttgacttgactccattttatcttctccttatttgagcttgtattcttattttttaatacattgctgccctgcactgagatttctattgtaaataaacaaagtgctatttaaattttgatttattccttacgaatgtctgttggtttcaggaaagtgctgagagaggtggcatctagaggatgtcatgtcgaacgtgtgaagtttttttagaaatatgtatatttgtgtgaagctttttagaaacttggctccattttattttctatgttcctctcggctttgtttcctatcctttccaatgacttgctatgcatttgcactgtatttggcatgtctaaaactgctacacaaaacttgatatatattttgtctaaaaatactatatccttgttatgcttgattgatctttattttgtctgctcttctattcttgtgtgggtctatcaagaatgaggcaattagataaagatatatgctttgtcagtattagctgagtctttgagcgtagcaggaaaagtcttggcacatcattgttttagttattat

SEQ ID NO: 79039 - DNA, 3329 bp, Zea Mays
ctgccgcggccgtaccccgccccgcatgctgcccggaatcagcgcctccgccgccgcagcccttccagaaatctccatcccgaatcctccgcgcccccgcctgcccccgcgcatcccgcagcccccgcccccgcgcatcccgcagccttggcgtcgtggccgccgcctctgctccctcctccatcccgcgcaacaacgacgaccgtcggggcctcgcctggcagatcaagcggggaatccacccgccaggcgtctccctgacagtggtagacggtggcggcgatgggggccgagagcgaggatgccccttccccatcctctaccctcccttgcgattccagcattggtgcccgcatccccgccgtccgaagcatggcgctcttcgtctcctccctcgccgccgccctctcccacctctccctcccatcgacctccaaccccaagcctcacccagcctcgctcctgcgcctgcgctccacctaccgccgcgctgttagcctcgcggtggccggagcaagaacggcaataggatgaagctgctgctgtccaacccctacggcttcagcagcccccgacatcgtgtgtcgggatctgggactccagcggcaaggcgaccactatgccgcacgggcgcggtgcaggagctcctccagcggcgccgcaactgcctctgagccctcatggtccagctcgagtgctcgacgcacccgctccgcacccgcccttgtcccccaggtgtcggcgtgcgggattcggtaacggtgttggagctcatccagtggcgccgcaaccgcctccgatccctcaaggtttggctcaaggctgatggccaggtcgaccgtctcctccatgcgcaggggaagaggaaggagctggagcagacggtgaatagcttctctgatttctccctctccggtcctgttgcaaagagccacaaactggaaccgggcggtgtacgtgctggcgcagtgcacgctggacatgccgccggaccactgccgggcctcctcgatggagccatggcagagagcggcgacggaaggtcagcggcgacaagatggacgtggcggtcttcggggcgcggtgcaccctgcggtatgagatggacctgcagttcttcaatgtcactggcaacagcaagatgctgtccctatatttttacagatatttttaataatgacctcagtggaccctatgcatttcttgagccaccttttgttcaaagatcccttctatataagatacagattaatcggtctcgaagcttctgatacactcagttctcacatgtcgcatgaaatggacctcactagaaaccaaacacccttgaatcgcagtcacccacgtcgccaacaggagtgacttcctcaccctgctccacgccctgccgccgcagagcgggagcggcggctgcgacggccgcggtgctggggaggaggatgcctccgcgctcgccaactccctcgacgcgctttgcaaggcctgcaagcctgagtttcatcgccacccccatgtgagcaatccgggacaccgcggagatgcctcgtgaggaaagcggtacggcgaggcagagcagcgtcggtggtcgtggaaggatggagcaacaaccccacatgttttgttctaatgacacagtggcgccaaggttccagactgtggcgggactgggctctgcagccgctgcaaaggagagtgcttcgtcttcaagcaactctcgaaggagacggccaccaggtcacacaaggccgccaagaacatggccaccggatacacttcggggctgtccaccaatggacctactgcaacaagtactcctccacccgcgtgcctgcataaaatggcaggggttctaccaacaatcaacacacatgtgaagcgaagctgggacgtgcatgtatgtggatccacgacacgtgcatctgtaggaaccctgattttggtatggtttctacactcaaattcatcagtatgatataaggcaatctgctggctggtatttaagagtggccctctcttcatatcatcgaaaggtaaaactattagtggcacacgttggttttttcctttgtttccaacatgtaacattatattaggggtatgtgcagtttagggtaagtaatatactcctttgtgctcagtaagtaattgatagaaggtagaagaaggtagaaacatatgtgcagtttagagtttacctctttatgatttctgggtagccacaatattttcacattgcaattcaagtccttagtaccctggtaatcaaactaacatgtcagagcatcaggcaaattcattgtgcacctgcctattgtatgctaaagaaatcagtttttttgcatgtgttagttgtctcctaacctgctgcattttcaatttttgtgttctgtgttttgtaatttgggagcaccttcaccattgtgttattagagctaggcaccttcaccattgtgttattgatgatctttcttggtctgaatggagtttttgcacctattcacatgccagagagtttatgcattgtcctccttttttggatacactttctgttaaaaaatgctacacagttgcattctacttaccttgtgattttgatggagctctgttgttgtgcttctttgacatttgtcggtcctttgagcattaggtctgcatcatgcattatgttgttatctattgatctatatatcccatattgtggagatcactaaaatcttagtaatttaagttctgttcaaactttcaattccatcgtccgtgaaaaattgataagtatgaatgtgttgacttgactccattttatcttctccttatttgagcttgtattcttattttttaatacattgctgccctgcactgagatttctattgtaaataaacaaagtgctatttaaattttgatttattccttacgaatgtctgttggtttcaggaaagtgctgagagaggtggcatctagaggatgtcatgtcgaacgtgtgaagtttttttagaaatatgtatatttgtgtgaagctttttagaaacttggctccattttattttctatgttcctctcggctttgtttcctatcctttccaatgacttgctatgcatttgcactgtatttggcatgtctaaaactgctacacaaaacttgatatatattttgtctaaaaatactatatccttgttatgcttgattgatctttattttgtctgctcttctattcttgtgtgggtctatcaagaatgaggcaattagataaagatatatgctttgtcagtattagctgagtctttgagcgtagcaggaaaagtcttggcacatcattgttttagttattat

SEQ ID NO: 79040 - DNA, 3634 bp, Zea Mays
ctgccgcggccgtaccccgccccgcatgctgcccggaatcagcgcctccgccgccgcagcccttccagaaatctccatcccgaatcctccgcgcccccgcctgcccccgcgcatcccgcagcccccgcccccgcgcatcccgcagccttggcgtcgtggccgccgcctctgctccctcctccatcccgcgcaacaacgacgaccgtcggggcctcgcctggcagatcaagcggggaatccacccgccaggcgtctccctgacagtggtagacggtggcggcgatgggggccgagagcgaggatgccccttccccatcctctaccctcccttgcgattccagcattggtgcccgcatccccgccgtccgaagcatggcgctcttcgtctcctccctcgccgccgccctctcccacctctccctcccatcgacctccaaccccaagcctcacccagcctcgctcctgcgcctgcgctccacctaccgccgcgctgttagcctcgcggtggccggagcaagaacggcaataggatgaagctgctgctgtccaacccctacggcttcagcagcccccgacatcgtgtgtcgggatctgggactccagcggcaaggcgaccactatgccgcacgggcgcggtgcaggagctcctccagcggcgccgcaactgcctctgagccctcatggtccagctcgagtgctcgacgcacccgctccgcacccgcccttgtcccccaggtgtcggcgtgcgggattcggtaacggtgttggagctcatccagtggcgccgcaaccgcctccgatccctcaaggtttggctcaaggctgatggccaggtcgaccgtctcctccatgcgcaggggaagaggaaggagctggagcagacggtgaatagcttctctgatttctccctctccggtcctgttgcaaagagccacaaactggttaggatgtcttggatcatcagacagatcagcatgacttgcaagcagctagctactgtttacagatgtcctctacttgccaaaaaataacaaaggggttctcgttcttgaaagctgcatagatagcacctcaacttggccactaaaacaactaagtttttttatggacatgtctgatgtttttctcaataattgtgcaaattttcctttcataattttcgtcgtcggggggcaggaaccgggcggtgtacgtgctggcgcagtgcacgctggacatgccgccggaccactgccgggcctcctcgatggagccatggcagagagcggcgacggaaggtcagcggcgacaagatggacgtggcggtcttcggggcgcggtgcaccctgcggtatgagatggacctgcagttcttcaatgtcactggcaacagcaagatgctgtccctatatttttacagatatttttaataatgacctcagtggaccctatgcatttcttgagccaccttttgttcaaagatcccttctatataagatacaggcaaggagaaaaaatagcattctccgatatatcgagtgggatgatgcttggtggacgtgtacatactaatattaatcggtctcgaagcttctgatacactcagttctcacatgtcgcatgaaatggacctcactagaaaccaaacacccttgaatcgcagtcacccacgtcgccaacaggagtgacttcctcaccctgctccacgccctgccgccgcagagcgggagcggcggctgcgacggccgcggtgctggggaggaggatgcctccgcgctcgccaactccctcgacgcgctttgcaaggcctgcaagcctgagtttcatcgccacccccatgtgagcaatccgggacaccgcggagatgcctcgtgaggaaagcggtacggcgaggcagagcagcgtcggtggtcgtggaaggatggagcaacaaccccacatgttttgttctaatgacacagtggcgccaaggttccagactgtggcgggactgggctctgcagccgctgcaaaggagagtgcttcgtcttcaagcaactctcgaaggagacggccaccaggtcacacaaggccgccaagaacatggccaccggatacacttcggggctgtccaccaatggacctactgcaacaagtactcctccacccgcgtgcctgcataaaatggcaggggttctaccaacaatcaacacacatgtgaagcgaagctgggacgtgcatgtatgtggatccacgacacgtgcatctgtaggaaccctgattttggtatggtttctacactcaaattcatcagtatgatataaggcaatctgctggctggtatttaagagtggccctctcttcatatcatcgaaaggtaaaactattagtggcacacgttggttttttcctttgtttccaacatgtaacattatattaggggtatgtgcagtttagggtaagtaatatactcctttgtgctcagtaagtaattgatagaaggtagaagaaggtagaaacatatgtgcagtttagagtttacctctttatgatttctgggtagccacaatattttcacattgcaattcaagtccttagtaccctggtaatcaaactaacatgtcagagcatcaggcaaattcattgtgcacctgcctattgtatgctaaagaaatcagtttttttgcatgtgttagttgtctcctaacctgctgcattttcaatttttgtgttctgtgttttgtaatttgggagcaccttcaccattgtgttattagagctaggcaccttcaccattgtgttattgatgatctttcttggtctgaatggagtttttgcacctattcacatgccagagagtttatgcattgtcctccttttttggatacactttctgttaaaaaatgctacacagttgcattctacttaccttgtgattttgatggagctctgttgttgtgcttctttgacatttgtcggtcctttgagcattaggtctgcatcatgcattatgttgttatctattgatctatatatcccatattgtggagatcactaaaatcttagtaatttaagttctgttcaaactttcaattccatcgtccgtgaaaaattgataagtatgaatgtgttgacttgactccattttatcttctccttatttgagcttgtattcttattttttaatacattgctgccctgcactgagatttctattgtaaataaacaaagtgctatttaaattttgatttattccttacgaatgtctgttggtttcaggaaagtgctgagagaggtggcatctagaggatgtcatgtcgaacgtgtgaagtttttttagaaatatgtatatttgtgtgaagctttttagaaacttggctccattttattttctatgttcctctcggctttgtttcctatcctttccaatgacttgctatgcatttgcactgtatttggcatgtctaaaactgctacacaaaacttgatatatattttgtctaaaaatactatatccttgttatgcttgattgatctttattttgtctgctcttctattcttgtgtgggtctatcaagaatgaggcaattagataaagatatatgctttgtcagtattagctgagtctttgagcgtagcaggaaaagtcttggcacatcattgttttagttattat

SEQ ID NO: 79041 - DNA, 4185 bp, Zea Mays
ctgccgcggccgtaccccgccccgcatgctgcccggaatcagcgcctccgccgccgcagcccttccagaaatctccatcccgaatcctccgcgcccccgcctgcccccgcgcatcccgcagcccccgcccccgcgcatcccgcagccttggcgtcgtggccgccgcctctgctccctcctccatcccgcgcaacaacgacgaccgtcggggcctcgcctggcagatcaagcggggaatccacccgccaggcgtctccctgacagtggtagacggtggcggcgatgggggccgagagcgaggatgccccttccccatcctctaccctcccttgcgattccagcattggtgcccgcatccccgccgtccgaagcatggcgctcttcgtctcctccctcgccgccgccctctcccacctctccctcccatcgacctccaaccccaagcctcacccagcctcgctcctgcgcctgcgctccacctaccgccgcgctgttagcctcgcggtggccggagcaagaacggcaataggatgaagctgctgctgtccaacccctacggcttcagcagcccccgacatcgtgtgtcgggatctgggactccagcggcaaggcgaccactatgccgcacgggcgcggtgcaggagctcctccagcggcgccgcaactgcctctgagccctcatggtccagctcgagtgctcgacgcacccgctccgcacccgcccttgtcccccaggtgtcggcgtgcgggattcggtaacggtgttggagctcatccagtggcgccgcaaccgcctccgatccctcaaggtttggctcaaggctgatggccaggtcgaccgtctcctccatgcgcaggggaagaggaaggagctggagcagacggtgaatagcttctctgatttctccctctccggtcctgttgcaaagagccacaaactggttaggatgtcttggatcatcagacagatcagcatgacttgcaagcagctagctactgtttacagatgtcctctacttgccaaaaaataacaaaggggttctcgttcttgaaagctgcatagatagcacctcaacttggccactaaaacaactaagtttttttatggacatgtctgatgtttttctcaataattgtgcaaattttcctttcataattttcgtcgtcggggggcaggaaccgggcggtgtacgtgctggcgcagtgcacgctggacatgccgccggaccactgccgggcctcctcgatggagccatggcagagagcggcgacggaaggtcagcggcgacaagatggacgtggcggtcttcggggcgcggtgcaccctgcggtatgagatggacctgcagttcttcaatgtcactggcaacagcaagatgctgtccctatatttttacagatatttttaataatgacctcagtggaccctatgcatttcttgagccaccttttgttcaaagatcccttctatataagatacaggcaaggagaaaaaatagcattctccgatatatcgagtgggatgatgcttggtggacgtgtacatactaatattaatcggtctcgaagcttctgatacactcagttctcacatgtcgcatgaaatggacctcactagaaaccaaacacccttgaatcgcagtcacccacgtcgccaacaggagtgacttcctcaccctgctccacgccctgccgccgcagagcgggagcggcggctgcgacggccgcggtgctggggaggaggatgcctccgcgctcgccaactccctcgacgcgctttgcaaggcctgcaagcctgagtaagcaagagaacaaaacccgcgggactgtgaacaagcgcagaaagaaatacgaatgcaacaagtcctacattctgttctccttttttggggggccaaaacgttgaggtctcaactcactcgtgcaagcagtttcatcgccacccccatgtgagcaatccgggacaccgcggagatgcctcgtgaggaaagcggtacggcgaggcagagcagcgtcggtggtcgtggaaggatggagcaacaaccccacatgttttgttctaatggtccataagtttgcaccacacaaccatttggttttatctgttgtcatttgaccttgatggaaaggagtgagatgaactatggaggaattctgatattatggatttccatttaacttcatcgtacttgcaagccatgcaatatgctattgttgttattgccctttataatctgtgattggactatactgtgtatttaaagcggtatgccacttcttctaaatactatccaaccacagattgttattgccctttatatcaaatgatttttatattgataattagtacttcattggttcttcatttaattggaattcaaacaaggatttcggtaaatatgagtgtcaacttttgctttgcattcttctgtatagtacaacacacattgtttcttgcatttggaagttgttggtctcatgtaggacacagtggcgccaaggttccagactgtggcgggactgggctctgcagccgctgcaaaggagagtgcttcgtcttcaagcaactctcgaaggagacggccaccaggtcacacaaggccgccaagaacatggccaccggatacacttcggggctgtccaccaatggacctactgcaacaagtactcctccacccgcgtgcctgcataaaatggcaggggttctaccaacaatcaacacacatgtgaagcgaagctgggacgtgcatgtatgtggatccacgacacgtgcatctgtaggaaccctgattttggtatggtttctacactcaaattcatcagtatgatataaggcaatctgctggctggtatttaagagtggccctctcttcatatcatcgaaaggtaaaactattagtggcacacgttggttttttcctttgtttccaacatgtaacattatattaggggtatgtgcagtttagggtaagtaatatactcctttgtgctcagtaagtaattgatagaaggtagaagaaggtagaaacatatgtgcagtttagagtttacctctttatgatttctgggtagccacaatattttcacattgcaattcaagtccttagtaccctggtaatcaaactaacatgtcagagcatcaggcaaattcattgtgcacctgcctattgtatgctaaagaaatcagtttttttgcatgtgttagttgtctcctaacctgctgcattttcaatttttgtgttctgtgttttgtaatttgggagcaccttcaccattgtgttattagagctaggcaccttcaccattgtgttattgatgatctttcttggtctgaatggagtttttgcacctattcacatgccagagagtttatgcattgtcctccttttttggatacactttctgttaaaaaatgctacacagttgcattctacttaccttgtgattttgatggagctctgttgttgtgcttctttgacatttgtcggtcctttgagcattaggtctgcatcatgcattatgttgttatctattgatctatatatcccatattgtggagatcactaaaatcttagtaatttaagttctgttcaaactttcaattccatcgtccgtgaaaaattgataagtatgaatgtgttgacttgactccattttatcttctccttatttgagcttgtattcttattttttaatacattgctgccctgcactgagatttctattgtaaataaacaaagtgctatttaaattttgatttattccttacgaatgtctgttggtttcaggaaagtgctgagagaggtggcatctagaggatgtcatgtcgaacgtgtgaagtttttttagaaatatgtatatttgtgtgaagctttttagaaacttggctccattttattttctatgttcctctcggctttgtttcctatcctttccaatgacttgctatgcatttgcactgtatttggcatgtctaaaactgctacacaaaacttgatatatattttgtctaaaaatactatatccttgttatgcttgattgatctttattttgtctgctcttctattcttgtgtgggtctatcaagaatgaggcaattagataaagatatatgctttgtcagtattagctgagtctttgagcgtagcaggaaaagtcttggcacatcattgttttagttattat

SEQ ID NO: 79042 - DNA, 3742 bp, Zea Mays
ctgccgcggccgtaccccgccccgcatgctgcccggaatcagcgcctccgccgccgcagcccttccagaaatctccatcccgaatcctccgcgcccccgcctgcccccgcgcatcccgcagcccccgcccccgcgcatcccgcagccttggcgtcgtggccgccgcctctgctccctcctccatcccgcgcaacaacgacgaccgtcggggcctcgcctggcagatcaagcggggaatccacccgccaggcgtctccctgacagtggtagacggtggcggcgatgggggccgagagcgaggatgccccttccccatcctctaccctcccttgcgattccagcattggtgcccgcatccccgccgtccgaagcatggcgctcttcgtctcctccctcgccgccgccctctcccacctctccctcccatcgacctccaaccccaagcctcacccagcctcgctcctgcgcctgcgctccacctaccgccgcgctgttagcctcgcggtggccggagcaagaacggcaataggatgaagctgctgctgtccaacccctacggcttcagcagcccccgacatcgtgtgtcgggatctgggactccagcggcaaggcgaccactatgccgcacgggcgcggtgcaggagctcctccagcggcgccgcaactgcctctgagccctcatggtccagctcgagtgctcgacgcacccgctccgcacccgcccttgtcccccaggtgtcggcgtgcgggattcggtaacggtgttggagctcatccagtggcgccgcaaccgcctccgatccctcaaggtttggctcaaggctgatggccaggtcgaccgtctcctccatgcgcaggggaagaggaaggagctggagcagacggtgaatagcttctctgatttctccctctccggtcctgttgcaaagagccacaaactggttaggatgtcttggatcatcagacagatcagcatgacttgcaagcagctagctactgtttacagatgtcctctacttgccaaaaaataacaaaggggttctcgttcttgaaagctgcatagatagcacctcaacttggccactaaaacaactaagtttttttatggacatgtctgatgtttttctcaataattgtgcaaattttcctttcataattttcgtcgtcggggggcaggaaccgggcggtgtacgtgctggcgcagtgcacgctggacatgccgccggaccactgccgggcctcctcgatggagccatggcagagagcggcgacggaaggtcagcggcgacaagatggacgtggcggtcttcggggcgcggtgcaccctgcggtatgagatggacctgcagttcttcaatgtcactggcaacagcaagatgctgtccctatatttttacagatatttttaataatgacctcagtggaccctatgcatttcttgagccaccttttgttcaaagatcccttctatataagatacaggcaaggagaaaaaataggattcagataactgtatcactttctgcaagtacaaatacacaaacacagaatatctttccctttatgtacttttagctagaccttccagtaatatttcgcttgaggggcattctccgatatatcgagtgggatgatgcttggtggacgtgtacatactaatattaatcggtctcgaagcttctgatacactcagttctcacatgtcgcatgaaatggacctcactagaaaccaaacacccttgaatcgcagtcacccacgtcgccaacaggagtgacttcctcaccctgctccacgccctgccgccgcagagcgggagcggcggctgcgacggccgcggtgctggggaggaggatgcctccgcgctcgccaactccctcgacgcgctttgcaaggcctgcaagcctgagtttcatcgccacccccatgtgagcaatccgggacaccgcggagatgcctcgtgaggaaagcggtacggcgaggcagagcagcgtcggtggtcgtggaaggatggagcaacaaccccacatgttttgttctaatgacacagtggcgccaaggttccagactgtggcgggactgggctctgcagccgctgcaaaggagagtgcttcgtcttcaagcaactctcgaaggagacggccaccaggtcacacaaggccgccaagaacatggccaccggatacacttcggggctgtccaccaatggacctactgcaacaagtactcctccacccgcgtgcctgcataaaatggcaggggttctaccaacaatcaacacacatgtgaagcgaagctgggacgtgcatgtatgtggatccacgacacgtgcatctgtaggaaccctgattttggtatggtttctacactcaaattcatcagtatgatataaggcaatctgctggctggtatttaagagtggccctctcttcatatcatcgaaaggtaaaactattagtggcacacgttggttttttcctttgtttccaacatgtaacattatattaggggtatgtgcagtttagggtaagtaatatactcctttgtgctcagtaagtaattgatagaaggtagaagaaggtagaaacatatgtgcagtttagagtttacctctttatgatttctgggtagccacaatattttcacattgcaattcaagtccttagtaccctggtaatcaaactaacatgtcagagcatcaggcaaattcattgtgcacctgcctattgtatgctaaagaaatcagtttttttgcatgtgttagttgtctcctaacctgctgcattttcaatttttgtgttctgtgttttgtaatttgggagcaccttcaccattgtgttattagagctaggcaccttcaccattgtgttattgatgatctttcttggtctgaatggagtttttgcacctattcacatgccagagagtttatgcattgtcctccttttttggatacactttctgttaaaaaatgctacacagttgcattctacttaccttgtgattttgatggagctctgttgttgtgcttctttgacatttgtcggtcctttgagcattaggtctgcatcatgcattatgttgttatctattgatctatatatcccatattgtggagatcactaaaatcttagtaatttaagttctgttcaaactttcaattccatcgtccgtgaaaaattgataagtatgaatgtgttgacttgactccattttatcttctccttatttgagcttgtattcttattttttaatacattgctgccctgcactgagatttctattgtaaataaacaaagtgctatttaaattttgatttattccttacgaatgtctgttggtttcaggaaagtgctgagagaggtggcatctagaggatgtcatgtcgaacgtgtgaagtttttttagaaatatgtatatttgtgtgaagctttttagaaacttggctccattttattttctatgttcctctcggctttgtttcctatcctttccaatgacttgctatgcatttgcactgtatttggcatgtctaaaactgctacacaaaacttgatatatattttgtctaaaaatactatatccttgttatgcttgattgatctttattttgtctgctcttctattcttgtgtgggtctatcaagaatgaggcaattagataaagatatatgctttgtcagtattagctgagtctttgagcgtagcaggaaaagtcttggcacatcattgttttagttattat

SEQ ID NO: 79043 - DNA, 3283 bp, Zea Mays
ctgccgcggccgtaccccgccccgcatgctgcccggaatcagcgcctccgccgccgcagcccttccagaaatctccatcccgaatcctccgcgcccccgcctgcccccgcgcatcccgcagcccccgcccccgcgcatcccgcagccttggcgtcgtggccgccgcctctgctccctcctccatcccgcgcaacaacgacgaccgtcggggcctcgcctggcagatcaagcggggaatccacccgccaggcgtctccctgacagtggtagacggtggcggcgatgggggccgagagcgaggatgccccttccccatcctctaccctcccttgcgattccagcattggtgcccgcatccccgccgtccgaagcatggcgctcttcgtctcctccctcgccgccgccctctcccacctctccctcccatcgacctccaaccccaagcctcacccagcctcgctcctgcgcctgcgctccacctaccgccgcgctgttagcctcgcggtggccggagcaagaacggcaataggatgaagctgctgctgtccaacccctacggcttcagcagcccccgacatcgtgtgtcgggatctgggactccagcggcaaggcgaccactatgccgcacgggcgcggtgcaggagctcctccagcggcgccgcaactgcctctgagccctcatggtccagctcgagtgctcgacgcacccgctccgcacccgcccttgtcccccaggtgtcggcgtgcgggattcggtaacggtgttggagctcatccagtggcgccgcaaccgcctccgatccctcaaggtttggctcaaggctgatggccaggtcgaccgtctcctccatgcgcaggggaagaggaaggagctggagcagacggtgaatagcttctctgatttctccctctccggtcctgttgcaaagagccacaaactggttaggatgtcttggatcatcagacagatcagcatgacttgcaagcagctagctactgtttacagatgtcctctacttgccaaaaaataacaaaggggttctcgttcttgaaagctgcatagatagcacctcaacttggccactaaaacaactaagtttttttatggacatgtctgatgtttttctcaataattgtgcaaattttcctttcataattttcgtcgtcggggggcaggaaccgggcggtgtacgtgctggcgcagtgcacgctggacatgccgccggaccactgccgggcctcctcgatggagccatggcagagagcggcgacggaaggtcagcggcgacaagatggacgtggcggtcttcggggcgcggtgcaccctgcggtatgagatggacctgcagttcttcaatgtcactggcaacagcaagatgctgtccctatatttttacagatatttttaataatgacctcagtggaccctatgcatttcttgagccaccttttgttcaaagatcccttctatataagatacaggcaaggagaaaaaatagcattctccgatatatcgagtgggatgatgcttggtggacgtgtacatactaatattaatcggtctcgaagcttctgatacactcagttctcacatgtcgcatgaaatggacctcactagaaaccaaacacccttgaatcgcagtcacccacgtcgccaacaggagtgacttcctcaccctgctccacgccctgccgccgcagagcgggagcggcggctgcgacggccgcggtgctggggaggaggatgcctccgcgctcgccaactccctcgacgcgctttgcaaggcctgcaagcctgagtaagcaagagaacaaaacccgcgggactgtgaacaagcgcagaaagaaatacgaatgcaacaagtcctacattctgttctccttttttggggggccaaaacgttgaggtctcaactcactcgtgcaagcagtttcatcgccacccccatgtgagcaatccgggacaccgcggagatgcctcgtgaggaaagcggtacggcgaggcagagcagcgtcggtggtcgtggaaggatggagcaacaaccccacatgttttgttctaatggtccataagtttgcaccacacaaccatttggttttatctgttgtcatttgaccttgatggaaaggagtgagatgaactatggaggaattctgatattatggatttccatttaacttcatcgtacttgcaagccatgcaatatgctattgttgttattgccctttataatctgtgattggactatactgtgtatttaaagcggtatgccacttcttctaaatactatccaaccacagattgttattgccctttatatcaaatgatttttatattgataattagtacttcattggttcttcatttaattggaattcaaacaaggatttcggtaaatatgagtgtcaacttttgctttgcattcttctgtatagtacaacacacattgtttcttgcatttggaagttgttggtctcatgtaggacacagtggcgccaaggttccagactgtggcgggactgggctctgcagccgctgcaaaggagagtgcttcgtcttcaagcaactctcgaaggagacggccaccaggtcacacaaggccgccaagaacatggccaccggatacacttcggggctgtccaccaatggacctactgcaacaagtactcctccacccgcgtgcctgcataaaatggcaggggttctaccaacaatcaacacacatgtgaagcgaagctgggacgtgcatgtatgtggatccacgacacgtgcatctgtaggaaccctgattttggtatggtttctacactcaaattcatcagtatgatataaggcaatctgctggctggtatttaagagtggccctctcttcatatcatcgaaaggaaagtgctgagagaggtggcatctagaggatgtcatgtcgaacgtgtgaagtttttttagaaatatgtatatttgtgtgaagctttttagaaacttggctccattttattttctatgttcctctcggctttgtttcctatcctttccaatgacttgctatgcatttgcactgtatttggcatgtctaaaactgctacacaaaacttgatatatattttgtctaaaaatactatatccttgttatgcttgattgatctttattttgtctgctcttctattcttgtgtgggtctatcaagaatgaggcaattagataaagatatatgctttgtcagtattagctgagtctttgagcgtagcaggaaaagtcttggcacatcattgttttagttattat

SEQ ID NO: 79044 - DNA, 3474 bp, Zea Mays
ctgccgcggccgtaccccgccccgcatgctgcccggaatcagcgcctccgccgccgcagcccttccagaaatctccatcccgaatcctccgcgcccccgcctgcccccgcgcatcccgcagcccccgcccccgcgcatcccgcagccttggcgtcgtggccgccgcctctgctccctcctccatcccgcgcaacaacgacgaccgtcggggcctcgcctggcagatcaagcggggaatccacccgccaggcgtctccctgacagtggtagacggtggcggcgatgggggccgagagcgaggatgccccttccccatcctctaccctcccttgcgattccagcattggtgcccgcatccccgccgtccgaagcatggcgctcttcgtctcctccctcgccgccgccctctcccacctctccctcccatcgacctccaaccccaagcctcacccagcctcgctcctgcgcctgcgctccacctaccgccgcgctgttagcctcgcggtggccggagcaagaacggcaataggatgaagctgctgctgtccaacccctacggcttcagcagcccccgacatcgtgtgtcgggatctgggactccagcggcaaggcgaccactatgccgcacgggcgcggtgcaggagctcctccagcggcgccgcaactgcctctgagccctcatggtccagctcgagtgctcgacgcacccgctccgcacccgcccttgtcccccaggtgtcggcgtgcgggattcggtaacggtgttggagctcatccagtggcgccgcaaccgcctccgatccctcaaggtttggctcaaggctgatggccaggtcgaccgtctcctccatgcgcaggggaagaggaaggagctggagcagacggtgaatagcttctctgatttctccctctccggtcctgttgcaaagagccacaaactggttaggatgtcttggatcatcagacagatcagcatgacttgcaagcagctagctactgtttacagatgtcctctacttgccaaaaaataacaaaggggttctcgttcttgaaagctgcatagatagcacctcaacttggccactaaaacaactaagtttttttatggacatgtctgatgtttttctcaataattgtgcaaattttcctttcataattttcgtcgtcggggggcaggaaccgggcggtgtacgtgctggcgcagtgcacgctggacatgccgccggaccactgccgggcctcctcgatggagccatggcagagagcggcgacggaaggtcagcggcgacaagatggacgtggcggtcttcggggcgcggtgcaccctgcggtatgagatggacctgcagttcttcaatgtcactggcaacagcaagatgctgtccctatatttttacagatatttttaataatgacctcagtggaccctatgcatttcttgagccaccttttgttcaaagatcccttctatataagatacagtcacccacgtcgccaacaggagtgacttcctcaccctgctccacgccctgccgccgcagagcgggagcggcggctgcgacggccgcggtgctggggaggaggatgcctccgcgctcgccaactccctcgacgcgctttgcaaggcctgcaagcctgagtttcatcgccacccccatgtgagcaatccgggacaccgcggagatgcctcgtgaggaaagcggtacggcgaggcagagcagcgtcggtggtcgtggaaggatggagcaacaaccccacatgttttgttctaatgacacagtggcgccaaggttccagactgtggcgggactgggctctgcagccgctgcaaaggagagtgcttcgtcttcaagcaactctcgaaggagacggccaccaggtcacacaaggccgccaagaacatggccaccggatacacttcggggctgtccaccaatggacctactgcaacaagtactcctccacccgcgtgcctgcataaaatggcaggggttctaccaacaatcaacacacatgtgaagcgaagctgggacgtgcatgtatgtggatccacgacacgtgcatctgtaggaaccctgattttggtatggtttctacactcaaattcatcagtatgatataaggcaatctgctggctggtatttaagagtggccctctcttcatatcatcgaaaggtaaaactattagtggcacacgttggttttttcctttgtttccaacatgtaacattatattaggggtatgtgcagtttagggtaagtaatatactcctttgtgctcagtaagtaattgatagaaggtagaagaaggtagaaacatatgtgcagtttagagtttacctctttatgatttctgggtagccacaatattttcacattgcaattcaagtccttagtaccctggtaatcaaactaacatgtcagagcatcaggcaaattcattgtgcacctgcctattgtatgctaaagaaatcagtttttttgcatgtgttagttgtctcctaacctgctgcattttcaatttttgtgttctgtgttttgtaatttgggagcaccttcaccattgtgttattagagctaggcaccttcaccattgtgttattgatgatctttcttggtctgaatggagtttttgcacctattcacatgccagagagtttatgcattgtcctccttttttggatacactttctgttaaaaaatgctacacagttgcattctacttaccttgtgattttgatggagctctgttgttgtgcttctttgacatttgtcggtcctttgagcattaggtctgcatcatgcattatgttgttatctattgatctatatatcccatattgtggagatcactaaaatcttagtaatttaagttctgttcaaactttcaattccatcgtccgtgaaaaattgataagtatgaatgtgttgacttgactccattttatcttctccttatttgagcttgtattcttattttttaatacattgctgccctgcactgagatttctattgtaaataaacaaagtgctatttaaattttgatttattccttacgaatgtctgttggtttcaggaaagtgctgagagaggtggcatctagaggatgtcatgtcgaacgtgtgaagtttttttagaaatatgtatatttgtgtgaagctttttagaaacttggctccattttattttctatgttcctctcggctttgtttcctatcctttccaatgacttgctatgcatttgcactgtatttggcatgtctaaaactgctacacaaaacttgatatatattttgtctaaaaatactatatccttgttatgcttgattgatctttattttgtctgctcttctattcttgtgtgggtctatcaagaatgaggcaattagataaagatatatgctttgtcagtattagctgagtctttgagcgtagcaggaaaagtcttggcacatcattgttttagttattat

SEQ ID NO: 79045 - DNA, 3780 bp, Zea Mays
ctgccgcggccgtaccccgccccgcatgctgcccggaatcagcgcctccgccgccgcagcccttccagaaatctccatcccgaatcctccgcgcccccgcctgcccccgcgcatcccgcagcccccgcccccgcgcatcccgcagccttggcgtcgtggccgccgcctctgctccctcctccatcccgcgcaacaacgacgaccgtcggggcctcgcctggcagatcaagcggggaatccacccgccaggcgtctccctgacagtggtagacggtggcggcgatgggggccgagagcgaggatgccccttccccatcctctaccctcccttgcgattccagcattggtgcccgcatccccgccgtccgaagcatggcgctcttcgtctcctccctcgccgccgccctctcccacctctccctcccatcgacctccaaccccaagcctcacccagcctcgctcctgcgcctgcgctccacctaccgccgcgctgttagcctcgcggtggccggagcaagaacggcaataggatgaagctgctgctgtccaacccctacggcttcagcagcccccgacatcgtgtgtcgggatctgggactccagcggcaaggcgaccactatgccgcacgggcgcggtgcaggagctcctccagcggcgccgcaactgcctctgagccctcatggtccagctcgagtgctcgacgcacccgctccgcacccgcccttgtcccccaggtgtcggcgtgcgggattcggtaacggtgttggagctcatccagtggcgccgcaaccgcctccgatccctcaaggtttggctcaaggctgatggccaggtcgaccgtctcctccatgcgcaggggaagaggaaggagctggagcagacggtgaatagcttctctgatttctccctctccggtcctgttgcaaagagccacaaactggttaggatgtcttggatcatcagacagatcagcatgacttgcaagcagctagctactgtttacagatgtcctctacttgccaaaaaataacaaaggggttctcgttcttgaaagctgcatagatagcacctcaacttggccactaaaacaactaagtttttttatggacatgtctgatgtttttctcaataattgtgcaaattttcctttcataattttcgtcgtcggggggcaggaaccgggcggtgtacgtgctggcgcagtgcacgctggacatgccgccggaccactgccgggcctcctcgatggagccatggcagagagcggcgacggaaggtcagcggcgacaagatggacgtggcggtcttcggggcgcggtgcaccctgcggtatgagatggacctgcagttcttcaatgtcactggcaacagcaagatgctgtccctatatttttacagatatttttaataatgacctcagtggaccctatgcatttcttgagccaccttttgttcaaagatcccttctatataagatacagattaatcggtctcgaagcttctgatacactcagttctcacatgtcgcatgaaatggacctcactagaaaccaaacacccttgaatcgcagtcacccacgtcgccaacaggagtgacttcctcaccctgctccacgccctgccgccgcagagcgggagcggcggctgcgacggccgcggtgctggggaggaggatgcctccgcgctcgccaactccctcgacgcgctttgcaaggcctgcaagcctgaggtgcgtgtactcactccttcactcgtgcgcaacttgttccttctccaacgtgttccagaacaccacagcatgcctctgtccacagtaagcaagagaacaaaacccgcgggactgtgaacaagcgcagaaagaaatacgaatgcaacaagtcctacattctgttctccttttttggggggccaaaacgttgaggtctcaactcactcgtgcaagcagtttcatcgccacccccatgtgagcaatccgggacaccgcggagatgcctcgtgaggaaagcggtacggcgaggcagagcagcgtcggtggtcgtggaaggatggagcaacaaccccacatgttttgttctaatgacacagtggcgccaaggttccagactgtggcgggactgggctctgcagccgctgcaaaggagagtgcttcgtcttcaagcaactctcgaaggagacggccaccaggtcacacaaggccgccaagaacatggccaccggatacacttcggggctgtccaccaatggacctactgcaacaagtactcctccacccgcgtgcctgcataaaatggcaggggttctaccaacaatcaacacacatgtgaagcgaagctgggacgtgcatgtatgtggatccacgacacgtgcatctgtaggaaccctgattttggtatggtttctacactcaaattcatcagtatgatataaggcaatctgctggctggtatttaagagtggccctctcttcatatcatcgaaaggtaaaactattagtggcacacgttggttttttcctttgtttccaacatgtaacattatattaggggtatgtgcagtttagggtaagtaatatactcctttgtgctcagtaagtaattgatagaaggtagaagaaggtagaaacatatgtgcagtttagagtttacctctttatgatttctgggtagccacaatattttcacattgcaattcaagtccttagtaccctggtaatcaaactaacatgtcagagcatcaggcaaattcattgtgcacctgcctattgtatgctaaagaaatcagtttttttgcatgtgttagttgtctcctaacctgctgcattttcaatttttgtgttctgtgttttgtaatttgggagcaccttcaccattgtgttattagagctaggcaccttcaccattgtgttattgatgatctttcttggtctgaatggagtttttgcacctattcacatgccagagagtttatgcattgtcctccttttttggatacactttctgttaaaaaatgctacacagttgcattctacttaccttgtgattttgatggagctctgttgttgtgcttctttgacatttgtcggtcctttgagcattaggtctgcatcatgcattatgttgttatctattgatctatatatcccatattgtggagatcactaaaatcttagtaatttaagttctgttcaaactttcaattccatcgtccgtgaaaaattgataagtatgaatgtgttgacttgactccattttatcttctccttatttgagcttgtattcttattttttaatacattgctgccctgcactgagatttctattgtaaataaacaaagtgctatttaaattttgatttattccttacgaatgtctgttggtttcaggaaagtgctgagagaggtggcatctagaggatgtcatgtcgaacgtgtgaagtttttttagaaatatgtatatttgtgtgaagctttttagaaacttggctccattttattttctatgttcctctcggctttgtttcctatcctttccaatgacttgctatgcatttgcactgtatttggcatgtctaaaactgctacacaaaacttgatatatattttgtctaaaaatactatatccttgttatgcttgattgatctttattttgtctgctcttctattcttgtgtgggtctatcaagaatgaggcaattagataaagatatatgctttgtcagtattagctgagtctttgagcgtagcaggaaaagtcttggcacatcattgttttagttattat

SEQ ID NO: 79046 - DNA, 3096 bp, Zea Mays
ctgccgcggccgtaccccgccccgcatgctgcccggaatcagcgcctccgccgccgcagcccttccagaaatctccatcccgaatcctccgcgcccccgcctgcccccgcgcatcccgcagcccccgcccccgcgcatcccgcagccttggcgtcgtggccgccgcctctgctccctcctccatcccgcgcaacaacgacgaccgtcggggcctcgcctggcagatcaagcggggaatccacccgccaggcgtctccctgacagtggtagacggtggcggcgatgggggccgagagcgaggatgccccttccccatcctctaccctcccttgcgattccagcattggtgcccgcatccccgccgtccgaagcatggcgctcttcgtctcctccctcgccgccgccctctcccacctctccctcccatcgacctccaaccccaagcctcacccagcctcgctcctgcgcctgcgctccacctaccgccgcgctgttagcctcgcggtggccggagcaagaacggcaataggatgaagctgctgctgtccaacccctacggcttcagcagcccccgacatcgtgtgtcgggatctgggactccagcggcaaggcgaccactatgccgcacgggcgcggtgcaggagctcctccagcggcgccgcaactgcctctgagccctcatggtccagctcgagtgctcgacgcacccgctccgcacccgcccttgtcccccaggtgtcggcgtgcgggattcggtaacggtgttggagctcatccagtggcgccgcaaccgcctccgatccctcaaggtttggctcaaggctgatggccaggtcgaccgtctcctccatgcgcaggggaagaggaaggagctggagcagacggtgaatagcttctctgatttctccctctccggtcctgttgcaaagagccacaaactggaaccgggcggtgtacgtgctggcgcagtgcacgctggacatgccgccggaccactgccgggcctcctcgatggagccatggcagagagcggcgacggaaggtcagcggcgacaagatggacgtggcggtcttcggggcgcggtgcaccctgcggtatgagatggacctgcagttcttcaatgtcactggcaacagcaagatgctgtccctatatttttacagatatttttaataatgacctcagtggaccctatgcatttcttgagccaccttttgttcaaagatcccttctatataagatacaggcaaggagaaaaaatagattaatcggtctcgaagcttctgatacactcagttctcacatgtcgcatgaaatggacctcactagaaaccaaacacccttgaatcgcagtcacccacgtcgccaacaggagtgacttcctcaccctgctccacgccctgccgccgcagagcgggagcggcggctgcgacggccgcggtgctggggaggaggatgcctccgcgctcgccaactccctcgacgcgctttgcaaggcctgcaagcctgagtttcatcgccacccccatgtgagcaatccgggacaccgcggagatgcctcgtgaggaaagcggtacggcgaggcagagcagcgtcggtggtcgtggaaggatggagcaacaaccccacatgttttgttctaatgtaagttattgcaacctaaatttaaattatgtgaatccttgaatttggagactaccgctgcaagctgatccattttagctgagaactcattactcctaaatgaagttaaaattgagttatatagttcaagggatgacaagttttgatattcttagattgatcgccttgggcgtggatgtttatttgttgttacaacaatataaactattgagtatgctctcattttttatagggtccataagtttgcaccacacaaccatttggttttatctgttgtcatttgaccttgatggaaaggagtgagatgaactatggaggaattctgatattatggatttccatttaacttcatcgtacttgcaagccatgcaatatgctattgttgttattgccctttataatctgtgattggactatactgtgtatttaaagcggtatgccacttcttctaaatactatccaaccacagattgttattgccctttatatcaaatgatttttatattgataattagtacttcattggttcttcatttaattggaattcaaacaaggatttcggtaaatatgagtgtcaacttttgctttgcattcttctgtatagtacaacacacattgtttcttgcatttggaagttgttggtctcatgtaggacacagtggcgccaaggttccagactgtggcgggactgggctctgcagccgctgcaaaggagagtgcttcgtcttcaagcaactctcgaaggagacggccaccaggtcacacaaggccgccaagaacatggccaccggatacacttcggggctgtccaccaatggacctactgcaacaagtactcctccacccgcgtgcctgcataaaatggcaggggttctaccaacaatcaacacacatgtgaagcgaagctgggacgtgcatgtatgtggatccacgacacgtgcatctgtaggaaccctgattttggtatggtttctacactcaaattcatcagtatgatataaggcaatctgctggctggtatttaagagtggccctctcttcatatcatcgaaaggaaagtgctgagagaggtggcatctagaggatgtcatgtcgaacgtgtgaagtttttttagaaatatgtatatttgtgtgaagctttttagaaacttggctccattttattttctatgttcctctcggctttgtttcctatcctttccaatgacttgctatgcatttgcactgtatttggcatgtctaaaactgctacacaaaacttgatatatattttgtctaaaaatactatatccttgttatgcttgattgatctttattttgtctgctcttctattcttgtgtgggtctatcaagaatgaggcaattagataaagatatatgctttgtcagtattagctgagtctttgagcgtagcaggaaaagtcttggcacatcattgttttagttattat

SEQ ID NO: 79047 - DNA, 3895 bp, Zea Mays
ctgccgcggccgtaccccgccccgcatgctgcccggaatcagcgcctccgccgccgcagcccttccagaaatctccatcccgaatcctccgcgcccccgcctgcccccgcgcatcccgcagcccccgcccccgcgcatcccgcagccttggcgtcgtggccgccgcctctgctccctcctccatcccgcgcaacaacgacgaccgtcggggcctcgcctggcagatcaagcggggaatccacccgccaggcgtctccctgacagtggtagacggtggcggcgatgggggccgagagcgaggatgccccttccccatcctctaccctcccttgcgattccagcattggtgcccgcatccccgccgtccgaagcatggcgctcttcgtctcctccctcgccgccgccctctcccacctctccctcccatcgacctccaaccccaagcctcacccagcctcgctcctgcgcctgcgctccacctaccgccgcgctgttagcctcgcggtggccggagcaagaacggcaataggatgaagctgctgctgtccaacccctacggcttcagcagcccccgacatcgtgtgtcgggatctgggactccagcggcaaggcgaccactatgccgcacgggcgcggtgcaggagctcctccagcggcgccgcaactgcctctgagccctcatggtccagctcgagtgctcgacgcacccgctccgcacccgcccttgtcccccaggtgtcggcgtgcgggattcggtaacggtgttggagctcatccagtggcgccgcaaccgcctccgatccctcaaggtttggctcaaggctgatggccaggtcgaccgtctcctccatgcgcaggggaagaggaaggagctggagcagacggtgaatagcttctctgatttctccctctccggtcctgttgcaaagagccacaaactggttaggatgtcttggatcatcagacagatcagcatgacttgcaagcagctagctactgtttacagatgtcctctacttgccaaaaaataacaaaggggttctcgttcttgaaagctgcatagatagcacctcaacttggccactaaaacaactaagtttttttatggacatgccgccggaccactgccgggcctcctcgatggagccatggcagagagcggcgacggaaggtcagcggcgacaagatggacgtggcggtcttcggggcgcggtgcaccctgcggtatgagatggacctgcagttcttcaatgtcactggcaacagcaagatgctgtccctatatttttacagatatttttaataatgacctcagtggaccctatgcatttcttgagccaccttttgttcaaagatcccttctatataagatacaggcaaggagaaaaaatagattaatcggtctcgaagcttctgatacactcagttctcacatgtcgcatgaaatggacctcactagaaaccaaacacccttgaatcgcagtcacccacgtcgccaacaggagtgacttcctcaccctgctccacgccctgccgccgcagagcgggagcggcggctgcgacggccgcggtgctggggaggaggatgcctccgcgctcgccaactccctcgacgcgctttgcaaggcctgcaagcctgagtttcatcgccacccccatgtgagcaatccgggacaccgcggagatgcctcgtgaggaaagcggtacggcgaggcagagcagcgtcggtggtcgtggaaggatggagcaacaaccccacatgttttgttctaatggtccataagtttgcaccacacaaccatttggttttatctgttgtcatttgaccttgatggaaaggagtgagatgaactatggaggaattctgatattatggatttccatttaacttcatcgtacttgcaagccatgcaatatgctattgttgttattgccctttataatctgtgattggactatactgtgtatttaaagcggtatgccacttcttctaaatactatccaaccacagattgttattgccctttatatcaaatgatttttatattgataattagtacttcattggttcttcatttaattggaattcaaacaaggatttcggtaaatatgagtgtcaacttttgctttgcattcttctgtatagtacaacacacattgtttcttgcatttggaagttgttggtctcatgtaggacacagtggcgccaaggttccagactgtggcgggactgggctctgcagccgctgcaaaggagagtgcttcgtcttcaagcaactctcgaaggagacggccaccaggtcacacaaggccgccaagaacatggccaccggatacacttcggggctgtccaccaatggacctactgcaacaagtactcctccacccgcgtgcctgcataaaatggcaggggttctaccaacaatcaacacacatgtgaagcgaagctgggacgtgcatgtatgtggatccacgacacgtgcatctgtaggaaccctgattttggtatggtttctacactcaaattcatcagtatgatataaggcaatctgctggctggtatttaagagtggccctctcttcatatcatcgaaaggtaaaactattagtggcacacgttggttttttcctttgtttccaacatgtaacattatattaggggtatgtgcagtttagggtaagtaatatactcctttgtgctcagtaagtaattgatagaaggtagaagaaggtagaaacatatgtgcagtttagagtttacctctttatgatttctgggtagccacaatattttcacattgcaattcaagtccttagtaccctggtaatcaaactaacatgtcagagcatcaggcaaattcattgtgcacctgcctattgtatgctaaagaaatcagtttttttgcatgtgttagttgtctcctaacctgctgcattttcaatttttgtgttctgtgttttgtaatttgggagcaccttcaccattgtgttattagagctaggcaccttcaccattgtgttattgatgatctttcttggtctgaatggagtttttgcacctattcacatgccagagagtttatgcattgtcctccttttttggatacactttctgttaaaaaatgctacacagttgcattctacttaccttgtgattttgatggagctctgttgttgtgcttctttgacatttgtcggtcctttgagcattaggtctgcatcatgcattatgttgttatctattgatctatatatcccatattgtggagatcactaaaatcttagtaatttaagttctgttcaaactttcaattccatcgtccgtgaaaaattgataagtatgaatgtgttgacttgactccattttatcttctccttatttgagcttgtattcttattttttaatacattgctgccctgcactgagatttctattgtaaataaacaaagtgctatttaaattttgatttattccttacgaatgtctgttggtttcaggaaagtgctgagagaggtggcatctagaggatgtcatgtcgaacgtgtgaagtttttttagaaatatgtatatttgtgtgaagctttttagaaacttggctccattttattttctatgttcctctcggctttgtttcctatcctttccaatgacttgctatgcatttgcactgtatttggcatgtctaaaactgctacacaaaacttgatatatattttgtctaaaaatactatatccttgttatgcttgattgatctttattttgtctgctcttctattcttgtgtgggtctatcaagaatgaggcaattagataaagatatatgctttgtcagtattagctgagtctttgagcgtagcaggaaaagtcttggcacatcattgttttagttattat

SEQ ID NO: 79048 - DNA, 3564 bp, Zea Mays
ctgccgcggccgtaccccgccccgcatgctgcccggaatcagcgcctccgccgccgcagcccttccagaaatctccatcccgaatcctccgcgcccccgcctgcccccgcgcatcccgcagcccccgcccccgcgcatcccgcagccttggcgtcgtggccgccgcctctgctccctcctccatcccgcgcaacaacgacgaccgtcggggcctcgcctggcagatcaagcggggaatccacccgccaggcgtctccctgacagtggtagacggtggcggcgatgggggccgagagcgaggatgccccttccccatcctctaccctcccttgcgattccagcattggtgcccgcatccccgccgtccgaagcatggcgctcttcgtctcctccctcgccgccgccctctcccacctctccctcccatcgacctccaaccccaagcctcacccagcctcgctcctgcgcctgcgctccacctaccgccgcgctgttagcctcgcggtggccggagcaagaacggcaataggatgaagctgctgctgtccaacccctacggcttcagcagcccccgacatcgtgtgtcgggatctgggactccagcggcaaggcgaccactatgccgcacgggcgcggtgcaggagctcctccagcggcgccgcaactgcctctgagccctcatggtccagctcgagtgctcgacgcacccgctccgcacccgcccttgtcccccaggtgtcggcgtgcgggattcggtaacggtgttggagctcatccagtggcgccgcaaccgcctccgatccctcaaggtttggctcaaggctgatggccaggtcgaccgtctcctccatgcgcaggggaagaggaaggagctggagcagacggtgaatagcttctctgatttctccctctccggtcctgttgcaaagagccacaaactggttaggatgtcttggatcatcagacagatcagcatgacttgcaagcagctagctactgtttacagatgtcctctacttgccaaaaaataacaaaggggttctcgttcttgaaagctgcatagatagcacctcaacttggccactaaaacaactaagtttttttatggacatgtctgatgtttttctcaataattgtgcaaattttcctttcataattttcgtcgtcggggggcaggaaccgggcggtgtacgtgctggcgcagtgcacgctggacatgccgccggaccactgccgggcctcctcgatggagccatggcagagagcggcgacggaaggtcagcggcgacaagatggacgtggcggtcttcggggcgcggtgcaccctgcggtatgagatggacctgcagttcttcaatgtcactggcaacagcaagatgctgtccctatatttttacagatatttttaataatgacctcagtggaccctatgcatttcttgagccaccttttgttcaaagatcccttctatataagatacagattaatcggtctcgaagcttctgatacactcagttctcacatgtcgcatgaaatggacctcactagaaaccaaacacccttgaatcgcagtcacccacgtcgccaacaggagtgacttcctcaccctgctccacgccctgccgccgcagagcgggagcggcggctgcgacggccgcggtgctggggaggaggatgcctccgcgctcgccaactccctcgacgcgctttgcaaggcctgcaagcctgagtttcatcgccacccccatgtgagcaatccgggacaccgcggagatgcctcgtgaggaaagcggtacggcgaggcagagcagcgtcggtggtcgtggaaggatggagcaacaaccccacatgttttgttctaatgacacagtggcgccaaggttccagactgtggcgggactgggctctgcagccgctgcaaaggagagtgcttcgtcttcaagcaactctcgaaggagacggccaccaggtcacacaaggccgccaagaacatggccaccggatacacttcggggctgtccaccaatggacctactgcaacaagtactcctccacccgcgtgcctgcataaaatggcaggggttctaccaacaatcaacacacatgtgaagcgaagctgggacgtgcatgtatgtggatccacgacacgtgcatctgtaggaaccctgattttggtatggtttctacactcaaattcatcagtatgatataaggcaatctgctggctggtatttaagagtggccctctcttcatatcatcgaaaggtaaaactattagtggcacacgttggttttttcctttgtttccaacatgtaacattatattaggggtatgtgcagtttagggtaagtaatatactcctttgtgctcagtaagtaattgatagaaggtagaagaaggtagaaacatatgtgcagtttagagtttacctctttatgatttctgggtagccacaatattttcacattgcaattcaagtccttagtaccctggtaatcaaactaacatgtcagagcatcaggcaaattcattgtgcacctgcctattgtatgctaaagaaatcagtttttttgcatgtgttagttgtctcctaacctgctgcattttcaatttttgtgttctgtgttttgtaatttgggagcaccttcaccattgtgttattagagctaggcaccttcaccattgtgttattgatgatctttcttggtctgaatggagtttttgcacctattcacatgccagagagtttatgcattgtcctccttttttggatacactttctgttaaaaaatgctacacagttgcattctacttaccttgtgattttgatggagctctgttgttgtgcttctttgacatttgtcggtcctttgagcattaggtctgcatcatgcattatgttgttatctattgatctatatatcccatattgtggagatcactaaaatcttagtaatttaagttctgttcaaactttcaattccatcgtccgtgaaaaattgataagtatgaatgtgttgacttgactccattttatcttctccttatttgagcttgtattcttattttttaatacattgctgccctgcactgagatttctattgtaaataaacaaagtgctatttaaattttgatttattccttacgaatgtctgttggtttcaggaaagtgctgagagaggtggcatctagaggatgtcatgtcgaacgtgtgaagtttttttagaaatatgtatatttgtgtgaagctttttagaaacttggctccattttattttctatgttcctctcggctttgtttcctatcctttccaatgacttgctatgcatttgcactgtatttggcatgtctaaaactgctacacaaaacttgatatatattttgtctaaaaatactatatccttgttatgcttgattgatctttattttgtctgctcttctattcttgtgtgggtctatcaagaatgaggcaattagataaagatatatgctttgtcagtattagctgagtctttgagcgtagcaggaaaagtcttggcacatcattgttttagttattat

SEQ ID NO: 79049 - DNA, 3298 bp, Zea Mays
ctgccgcggccgtaccccgccccgcatgctgcccggaatcagcgcctccgccgccgcagcccttccagaaatctccatcccgaatcctccgcgcccccgcctgcccccgcgcatcccgcagcccccgcccccgcgcatcccgcagccttggcgtcgtggccgccgcctctgctccctcctccatcccgcgcaacaacgacgaccgtcggggcctcgcctggcagatcaagcggggaatccacccgccaggcgtctccctgacagtggtagacggtggcggcgatgggggccgagagcgaggatgccccttccccatcctctaccctcccttgcgattccagcattggtgcccgcatccccgccgtccgaagcatggcgctcttcgtctcctccctcgccgccgccctctcccacctctccctcccatcgacctccaaccccaagcctcacccagcctcgctcctgcgcctgcgctccacctaccgccgcgctgttagcctcgcggtggccggagcaagaacggcaataggatgaagctgctgctgtccaacccctacggcttcagcagcccccgacatcgtgtgtcgggatctgggactccagcggcaaggcgaccactatgccgcacgggcgcggtgcaggagctcctccagcggcgccgcaactgcctctgagccctcatggtccagctcgagtgctcgacgcacccgctccgcacccgcccttgtcccccaggtgtcggcgtgcgggattcggtaacggtgttggagctcatccagtggcgccgcaaccgcctccgatccctcaaggtttggctcaaggctgatggccaggtcgaccgtctcctccatgcgcaggggaagaggaaggagctggagcagacggtgaatagcttctctgatttctccctctccggtcctgttgcaaagagccacaaactggttaggatgtcttggatcatcagacagatcagcatgacttgcaagcagctagctactgtttacagatgtcctctacttgccaaaaaataacaaaggggttctcgttcttgaaagctgcatagatagcacctcaacttggccactaaaacaactaagtttttttatggacatgtctgatgtttttctcaataattgtgcaaattttcctttcataattttcgtcgtcggggggcaggaaccgggcggtgtacgtgctggcgcagtgcacgctggacatgccgccggaccactgccgggcctcctcgatggagccatggcagagagcggcgacggaaggtcagcggcgacaagatggacgtggcggtcttcggggcgcggtgcaccctgcggtatgagatggacctgcagttcttcaatgtcactggcaacagcaagatgctgtccctatatttttacagatatttttaataatgacctcagtggaccctatgcatttcttgagccaccttttgttcaaagatcccttctatataagatacagattaatcggtctcgaagcttctgatacactcagttctcacatgtcgcatgaaatggacctcactagaaaccaaacacccttgaatcgcagtcacccacgtcgccaacaggagtgacttcctcaccctgctccacgccctgccgccgcagagcgggagcggcggctgcgacggccgcggtgctggggaggaggatgcctccgcgctcgccaactccctcgacgcgctttgcaaggcctgcaagcctgaggtgcgtgtactcactccttcactcgtgcgcaacttgttccttctccaacgtgttccagaacaccacagcatgcctctgtccacagtaagcaagagaacaaaacccgcgggactgtgaacaagcgcagaaagaaatacgaatgcaacaagtcctacattctgttctccttttttggggggccaaaacgttgaggtctcaactcactcgtgcaagcagtttcatcgccacccccatgtgagcaatccgggacaccgcggagatgcctcgtgaggaaagcggtacggcgaggcagagcagcgtcggtggtcgtggaaggatggagcaacaaccccacatgttttgttctaatggtccataagtttgcaccacacaaccatttggttttatctgttgtcatttgaccttgatggaaaggagtgagatgaactatggaggaattctgatattatggatttccatttaacttcatcgtacttgcaagccatgcaatatgctattgttgttattgccctttataatctgtgattggactatactgtgtatttaaagcggtatgccacttcttctaaatactatccaaccacagattgttattgccctttatatcaaatgatttttatattgataattagtacttcattggttcttcatttaattggaattcaaacaaggatttcggtaaatatgagtgtcaacttttgctttgcattcttctgtatagtacaacacacattgtttcttgcatttggaagttgttggtctcatgtaggacacagtggcgccaaggttccagactgtggcgggactgggctctgcagccgctgcaaaggagagtgcttcgtcttcaagcaactctcgaaggagacggccaccaggtcacacaaggccgccaagaacatggccaccggatacacttcggggctgtccaccaatggacctactgcaacaagtactcctccacccgcgtgcctgcataaaatggcaggggttctaccaacaatcaacacacatgtgaagcgaagctgggacgtgcatgtatgtggatccacgacacgtgcatctgtaggaaccctgattttggtatggtttctacactcaaattcatcagtatgatataaggcaatctgctggctggtatttaagagtggccctctcttcatatcatcgaaaggaaagtgctgagagaggtggcatctagaggatgtcatgtcgaacgtgtgaagtttttttagaaatatgtatatttgtgtgaagctttttagaaacttggctccattttattttctatgttcctctcggctttgtttcctatcctttccaatgacttgctatgcatttgcactgtatttggcatgtctaaaactgctacacaaaacttgatatatattttgtctaaaaatactatatccttgttatgcttgattgatctttattttgtctgctcttctattcttgtgtgggtctatcaagaatgaggcaattagataaagatatatgctttgtcagtattagctgagtctttgagcgtagcaggaaaagtcttggcacatcattgttttagttattat

SEQ ID NO: 79050 - DNA, 3998 bp, Zea Mays
ctgccgcggccgtaccccgccccgcatgctgcccggaatcagcgcctccgccgccgcagcccttccagaaatctccatcccgaatcctccgcgcccccgcctgcccccgcgcatcccgcagcccccgcccccgcgcatcccgcagccttggcgtcgtggccgccgcctctgctccctcctccatcccgcgcaacaacgacgaccgtcggggcctcgcctggcagatcaagcggggaatccacccgccaggcgtctccctgacagtggtagacggtggcggcgatgggggccgagagcgaggatgccccttccccatcctctaccctcccttgcgattccagcattggtgcccgcatccccgccgtccgaagcatggcgctcttcgtctcctccctcgccgccgccctctcccacctctccctcccatcgacctccaaccccaagcctcacccagcctcgctcctgcgcctgcgctccacctaccgccgcgctgttagcctcgcggtggccggagcaagaacggcaataggatgaagctgctgctgtccaacccctacggcttcagcagcccccgacatcgtgtgtcgggatctgggactccagcggcaaggcgaccactatgccgcacgggcgcggtgcaggagctcctccagcggcgccgcaactgcctctgagccctcatggtccagctcgagtgctcgacgcacccgctccgcacccgcccttgtcccccaggtgtcggcgtgcgggattcggtaacggtgttggagctcatccagtggcgccgcaaccgcctccgatccctcaaggtttggctcaaggctgatggccaggtcgaccgtctcctccatgcgcaggggaagaggaaggagctggagcagacggtgaatagcttctctgatttctccctctccggtcctgttgcaaagagccacaaactggttaggatgtcttggatcatcagacagatcagcatgacttgcaagcagctagctactgtttacagatgtcctctacttgccaaaaaataacaaaggggttctcgttcttgaaagctgcatagatagcacctcaacttggccactaaaacaactaagtttttttatggacatgtctgatgtttttctcaataattgtgcaaattttcctttcataattttcgtcgtcggggggcaggaaccgggcggtgtacgtgctggcgcagtgcacgctggacatgccgccggaccactgccgggcctcctcgatggagccatggcagagagcggcgacggaaggtcagcggcgacaagatggacgtggcggtcttcggggcgcggtgcaccctgcggtatgagatggacctgcagttcttcaatgtcactggcaacagcaagatgctgtccctatatttttacagatatttttaataatgacctcagtggaccctatgcatttcttgagccaccttttgttcaaagatcccttctatataagatacagattaatcggtctcgaagcttctgatacactcagttctcacatgtcgcatgaaatggacctcactagaaaccaaacacccttgaatcgcagtcacccacgtcgccaacaggagtgacttcctcaccctgctccacgccctgccgccgcagagcgggagcggcggctgcgacggccgcggtgctggggaggaggatgcctccgcgctcgccaactccctcgacgcgctttgcaaggcctgcaagcctgagtttcatcgccacccccatgtgagcaatccgggacaccgcggagatgcctcgtgaggaaagcggtacggcgaggcagagcagcgtcggtggtcgtggaaggatggagcaacaaccccacatgttttgttctaatgtaagttattgcaacctaaatttaaattatgtgaatccttgaatttggagactaccgctgcaagctgatccattttagctgagaactcattactcctaaatgaagttaaaattgagttatatagttcaagggatgacaagttttgatattcttagattgatcgccttgggcgtggatgtttatttgttgttacaacaatataaactattgagtatgctctcattttttatagggtccataagtttgcaccacacaaccatttggttttatctgttgtcatttgaccttgatggaaaggagtgagatgaactatggaggaattctgatattatggatttccatttaacttcatcgtacttgcaagccatgcaatatgctattgttgttattgccctttataatctgtgattggactatactgtgtatttaaagcggacacagtggcgccaaggttccagactgtggcgggactgggctctgcagccgctgcaaaggagagtgcttcgtcttcaagcaactctcgaaggagacggccaccaggtcacacaaggccgccaagaacatggccaccggatacacttcggggctgtccaccaatggacctactgcaacaagtactcctccacccgcgtgcctgcataaaatggcaggggttctaccaacaatcaacacacatgtgaagcgaagctgggacgtgcatgtatgtggatccacgacacgtgcatctgtaggaaccctgattttggtatggtttctacactcaaattcatcagtatgatataaggcaatctgctggctggtatttaagagtggccctctcttcatatcatcgaaaggtaaaactattagtggcacacgttggttttttcctttgtttccaacatgtaacattatattaggggtatgtgcagtttagggtaagtaatatactcctttgtgctcagtaagtaattgatagaaggtagaagaaggtagaaacatatgtgcagtttagagtttacctctttatgatttctgggtagccacaatattttcacattgcaattcaagtccttagtaccctggtaatcaaactaacatgtcagagcatcaggcaaattcattgtgcacctgcctattgtatgctaaagaaatcagtttttttgcatgtgttagttgtctcctaacctgctgcattttcaatttttgtgttctgtgttttgtaatttgggagcaccttcaccattgtgttattagagctaggcaccttcaccattgtgttattgatgatctttcttggtctgaatggagtttttgcacctattcacatgccagagagtttatgcattgtcctccttttttggatacactttctgttaaaaaatgctacacagttgcattctacttaccttgtgattttgatggagctctgttgttgtgcttctttgacatttgtcggtcctttgagcattaggtctgcatcatgcattatgttgttatctattgatctatatatcccatattgtggagatcactaaaatcttagtaatttaagttctgttcaaactttcaattccatcgtccgtgaaaaattgataagtatgaatgtgttgacttgactccattttatcttctccttatttgagcttgtattcttattttttaatacattgctgccctgcactgagatttctattgtaaataaacaaagtgctatttaaattttgatttattccttacgaatgtctgttggtttcaggaaagtgctgagagaggtggcatctagaggatgtcatgtcgaacgtgtgaagtttttttagaaatatgtatatttgtgtgaagctttttagaaacttggctccattttattttctatgttcctctcggctttgtttcctatcctttccaatgacttgctatgcatttgcactgtatttggcatgtctaaaactgctacacaaaacttgatatatattttgtctaaaaatactatatccttgttatgcttgattgatctttattttgtctgctcttctattcttgtgtgggtctatcaagaatgaggcaattagataaagatatatgctttgtcagtattagctgagtctttgagcgtagcaggaaaagtcttggcacatcattgttttagttattat

SEQ ID NO: 79051 - DNA, 3356 bp, Zea Mays
ctgccgcggccgtaccccgccccgcatgctgcccggaatcagcgcctccgccgccgcagcccttccagaaatctccatcccgaatcctccgcgcccccgcctgcccccgcgcatcccgcagcccccgcccccgcgcatcccgcagccttggcgtcgtggccgccgcctctgctccctcctccatcccgcgcaacaacgacgaccgtcggggcctcgcctggcagatcaagcggggaatccacccgccaggcgtctccctgacagtggtagacggtggcggcgatgggggccgagagcgaggatgccccttccccatcctctaccctcccttgcgattccagcattggtgcccgcatccccgccgtccgaagcatggcgctcttcgtctcctccctcgccgccgccctctcccacctctccctcccatcgacctccaaccccaagcctcacccagcctcgctcctgcgcctgcgctccacctaccgccgcgctgttagcctcgcggtggccggagcaagaacggcaataggatgaagctgctgctgtccaacccctacggcttcagcagcccccgacatcgtgtgtcgggatctgggactccagcggcaaggcgaccactatgccgcacgggcgcggtgcaggagctcctccagcggcgccgcaactgcctctgagccctcatggtccagctcgagtgctcgacgcacccgctccgcacccgcccttgtcccccaggtgtcggcgtgcgggattcggtaacggtgttggagctcatccagtggcgccgcaaccgcctccgatccctcaaggtttggctcaaggctgatggccaggtcgaccgtctcctccatgcgcaggggaagaggaaggagctggagcagacggtgaatagcttctctgatttctccctctccggtcctgttgcaaagagccacaaactggttaggatgtcttggatcatcagacagatcagcatgacttgcaagcagctagctactgtttacagatgtcctctacttgccaaaaaataacaaaggggttctcgttcttgaaagctgcatagatagcacctcaacttggccactaaaacaactaagtttttttatggacatgccgccggaccactgccgggcctcctcgatggagccatggcagagagcggcgacggaaggtcagcggcgacaagatggacgtggcggtcttcggggcgcggtgcaccctgcggtatgagatggacctgcagttcttcaatgtcactggcaacagcaagatgctgtccctatatttttacagatatttttaataatgacctcagtggaccctatgcatttcttgagccaccttttgttcaaagatcccttctatataagatacaggcaaggagaaaaaatagattaatcggtctcgaagcttctgatacactcagttctcacatgtcgcatgaaatggacctcactagaaaccaaacacccttgaatcgcagtcacccacgtcgccaacaggagtgacttcctcaccctgctccacgccctgccgccgcagagcgggagcggcggctgcgacggccgcggtgctggggaggaggatgcctccgcgctcgccaactccctcgacgcgctttgcaaggcctgcaagcctgagtaagcaagagaacaaaacccgcgggactgtgaacaagcgcagaaagaaatacgaatgcaacaagtcctacattctgttctccttttttggggggccaaaacgttgaggtctcaactcactcgtgcaagcagtttcatcgccacccccatgtgagcaatccgggacaccgcggagatgcctcgtgaggaaagcggtacggcgaggcagagcagcgtcggtggtcgtggaaggatggagcaacaaccccacatgttttgttctaatgtaagttattgcaacctaaatttaaattatgtgaatccttgaatttggagactaccgctgcaagctgatccattttagctgagaactcattactcctaaatgaagttaaaattgagttatatagttcaagggatgacaagttttgatattcttagattgatcgccttgggcgtggatgtttatttgttgttacaacaatataaactattgagtatgctctcattttttatagggtccataagtttgcaccacacaaccatttggttttatctgttgtcatttgaccttgatggaaaggagtgagatgaactatggaggaattctgatattatggatttccatttaacttcatcgtacttgcaagccatgcaatatgctattgttgttattgccctttataatctgtgattggactatactgtgtatttaaagcggtatgccacttcttctaaatactatccaaccacagattgttattgccctttatatcaaatgatttttatattgataattagtacttcattggttcttcatttaattggaattcaaacaaggatttcggtaaatatgagtgtcaacttttgctttgcattcttctgtatagtacaacacacattgtttcttgcatttggaagttgttggtctcatgtaggacacagtggcgccaaggttccagactgtggcgggactgggctctgcagccgctgcaaaggagagtgcttcgtcttcaagcaactctcgaaggagacggccaccaggtcacacaaggccgccaagaacatggccaccggatacacttcggggctgtccaccaatggacctactgcaacaagtactcctccacccgcgtgcctgcataaaatggcaggggttctaccaacaatcaacacacatgtgaagcgaagctgggacgtgcatgtatgtggatccacgacacgtgcatctgtaggaaccctgattttggtatggtttctacactcaaattcatcagtatgatataaggcaatctgctggctggtatttaagagtggccctctcttcatatcatcgaaaggaaagtgctgagagaggtggcatctagaggatgtcatgtcgaacgtgtgaagtttttttagaaatatgtatatttgtgtgaagctttttagaaacttggctccattttattttctatgttcctctcggctttgtttcctatcctttccaatgacttgctatgcatttgcactgtatttggcatgtctaaaactgctacacaaaacttgatatatattttgtctaaaaatactatatccttgttatgcttgattgatctttattttgtctgctcttctattcttgtgtgggtctatcaagaatgaggcaattagataaagatatatgctttgtcagtattagctgagtctttgagcgtagcaggaaaagtcttggcacatcattgttttagttattat

SEQ ID NO: 79052 - DNA, 3346 bp, Zea Mays
ctgccgcggccgtaccccgccccgcatgctgcccggaatcagcgcctccgccgccgcagcccttccagaaatctccatcccgaatcctccgcgcccccgcctgcccccgcgcatcccgcagcccccgcccccgcgcatcccgcagccttggcgtcgtggccgccgcctctgctccctcctccatcccgcgcaacaacgacgaccgtcggggcctcgcctggcagatcaagcggggaatccacccgccaggcgtctccctgacagtggtagacggtggcggcgatgggggccgagagcgaggatgccccttccccatcctctaccctcccttgcgattccagcattggtgcccgcatccccgccgtccgaagcatggcgctcttcgtctcctccctcgccgccgccctctcccacctctccctcccatcgacctccaaccccaagcctcacccagcctcgctcctgcgcctgcgctccacctaccgccgcgctgttagcctcgcggtggccggagcaagaacggcaataggatgaagctgctgctgtccaacccctacggcttcagcagcccccgacatcgtgtgtcgggatctgggactccagcggcaaggcgaccactatgccgcacgggcgcggtgcaggagctcctccagcggcgccgcaactgcctctgagccctcatggtccagctcgagtgctcgacgcacccgctccgcacccgcccttgtcccccaggtgtcggcgtgcgggattcggtaacggtgttggagctcatccagtggcgccgcaaccgcctccgatccctcaaggtttggctcaaggctgatggccaggtcgaccgtctcctccatgcgcaggggaagaggaaggagctggagcagacggtgaatagcttctctgatttctccctctccggtcctgttgcaaagagccacaaactggaaccgggcggtgtacgtgctggcgcagtgcacgctggacatgccgccggaccactgccgggcctcctcgatggagccatggcagagagcggcgacggaaggtcagcggcgacaagatggacgtggcggtcttcggggcgcggtgcaccctgcggtatgagatggacctgcagttcttcaatgtcactggcaacagcaagatgctgtccctatatttttacagatatttttaataatgacctcagtggaccctatgcatttcttgagccaccttttgttcaaagatcccttctatataagatacaggcaaggagaaaaaatagattaatcggtctcgaagcttctgatacactcagttctcacatgtcgcatgaaatggacctcactagaaaccaaacacccttgaatcgcagtcacccacgtcgccaacaggagtgacttcctcaccctgctccacgccctgccgccgcagagcgggagcggcggctgcgacggccgcggtgctggggaggaggatgcctccgcgctcgccaactccctcgacgcgctttgcaaggcctgcaagcctgagtttcatcgccacccccatgtgagcaatccgggacaccgcggagatgcctcgtgaggaaagcggtacggcgaggcagagcagcgtcggtggtcgtggaaggatggagcaacaaccccacatgttttgttctaatgacacagtggcgccaaggttccagactgtggcgggactgggctctgcagccgctgcaaaggagagtgcttcgtcttcaagcaactctcgaaggagacggccaccaggtcacacaaggccgccaagaacatggccaccggatacacttcggggctgtccaccaatggacctactgcaacaagtactcctccacccgcgtgcctgcataaaatggcaggggttctaccaacaatcaacacacatgtgaagcgaagctgggacgtgcatgtatgtggatccacgacacgtgcatctgtaggaaccctgattttggtatggtttctacactcaaattcatcagtatgatataaggcaatctgctggctggtatttaagagtggccctctcttcatatcatcgaaaggtaaaactattagtggcacacgttggttttttcctttgtttccaacatgtaacattatattaggggtatgtgcagtttagggtaagtaatatactcctttgtgctcagtaagtaattgatagaaggtagaagaaggtagaaacatatgtgcagtttagagtttacctctttatgatttctgggtagccacaatattttcacattgcaattcaagtccttagtaccctggtaatcaaactaacatgtcagagcatcaggcaaattcattgtgcacctgcctattgtatgctaaagaaatcagtttttttgcatgtgttagttgtctcctaacctgctgcattttcaatttttgtgttctgtgttttgtaatttgggagcaccttcaccattgtgttattagagctaggcaccttcaccattgtgttattgatgatctttcttggtctgaatggagtttttgcacctattcacatgccagagagtttatgcattgtcctccttttttggatacactttctgttaaaaaatgctacacagttgcattctacttaccttgtgattttgatggagctctgttgttgtgcttctttgacatttgtcggtcctttgagcattaggtctgcatcatgcattatgttgttatctattgatctatatatcccatattgtggagatcactaaaatcttagtaatttaagttctgttcaaactttcaattccatcgtccgtgaaaaattgataagtatgaatgtgttgacttgactccattttatcttctccttatttgagcttgtattcttattttttaatacattgctgccctgcactgagatttctattgtaaataaacaaagtgctatttaaattttgatttattccttacgaatgtctgttggtttcaggaaagtgctgagagaggtggcatctagaggatgtcatgtcgaacgtgtgaagtttttttagaaatatgtatatttgtgtgaagctttttagaaacttggctccattttattttctatgttcctctcggctttgtttcctatcctttccaatgacttgctatgcatttgcactgtatttggcatgtctaaaactgctacacaaaacttgatatatattttgtctaaaaatactatatccttgttatgcttgattgatctttattttgtctgctcttctattcttgtgtgggtctatcaagaatgaggcaattagataaagatatatgctttgtcagtattagctgagtctttgagcgtagcaggaaaagtcttggcacatcattgttttagttattat

SEQ ID NO: 79053 - DNA, 4077 bp, Zea Mays
ctgccgcggccgtaccccgccccgcatgctgcccggaatcagcgcctccgccgccgcagcccttccagaaatctccatcccgaatcctccgcgcccccgcctgcccccgcgcatcccgcagcccccgcccccgcgcatcccgcagccttggcgtcgtggccgccgcctctgctccctcctccatcccgcgcaacaacgacgaccgtcggggcctcgcctggcagatcaagcggggaatccacccgccaggcgtctccctgacagtggtagacggtggcggcgatgggggccgagagcgaggatgccccttccccatcctctaccctcccttgcgattccagcattggtgcccgcatccccgccgtccgaagcatggcgctcttcgtctcctccctcgccgccgccctctcccacctctccctcccatcgacctccaaccccaagcctcacccagcctcgctcctgcgcctgcgctccacctaccgccgcgctgttagcctcgcggtggccggagcaagaacggcaataggatgaagctgctgctgtccaacccctacggcttcagcagcccccgacatcgtgtgtcgggatctgggactccagcggcaaggcgaccactatgccgcacgggcgcggtgcaggagctcctccagcggcgccgcaactgcctctgagccctcatggtccagctcgagtgctcgacgcacccgctccgcacccgcccttgtcccccaggtgtcggcgtgcgggattcggtaacggtgttggagctcatccagtggcgccgcaaccgcctccgatccctcaaggtttggctcaaggctgatggccaggtcgaccgtctcctccatgcgcaggggaagaggaaggagctggagcagacggtgaatagcttctctgatttctccctctccggtcctgttgcaaagagccacaaactggttaggatgtcttggatcatcagacagatcagcatgacttgcaagcagctagctactgtttacagatgtcctctacttgccaaaaaataacaaaggggttctcgttcttgaaagctgcatagatagcacctcaacttggccactaaaacaactaagtttttttatggacatgtctgatgtttttctcaataattgtgcaaattttcctttcataattttcgtcgtcggggggcaggaaccgggcggtgtacgtgctggcgcagtgcacgctggacatgccgccggaccactgccgggcctcctcgatggagccatggcagagagcggcgacggaaggtcagcggcgacaagatggacgtggcggtcttcggggcgcggtgcaccctgcggtatgagatggacctgcagttcttcaatgtcactggcaacagcaagatgctgtccctattcaaagcaaggtggcaccccagtgttgatattggtaaatcatgcgtaaatgggtgtgctgaaatgatggagaacaatagggaacatagaattgctcttgttgctgctggattagctgctagaatcacttcagatatttttaataatgacctcagtggaccctatgcatttcttgaggattcagataactgtatcactttctgcaagtacaaatacacaaacacagaatatctttccctttatgtacttttagctagaccttccagtaatatttcgcttgagggggtaggtgcaactctcctcagtttgtgaaaacgagtaatgaatttttaagtttgcctactataggatcttatttctgatgcacgattcatttttcagcattctccgatatatcgagtgggatgatgcttggtggacgtgtacatactaatgtgatgcaccttagccacatcgaggtggacggaaaacctaactctactagattctaatgtccactcatcttttgtcctcttgcagattaatcggtctcgaagcttctgatacactcagttctcacatgtcgcatgaaatggacctcactagaaaccaaacacccttgaatcgcagtcacccacgtcgccaacaggagtgacttcctcaccctgctccacgccctgccgccgcagagcgggagcggcggctgcgacggccgcggtgctggggaggaggatgcctccgcgctcgccaactccctcgacgcgctttgcaaggcctgcaagcctgaggtgcgtgtactcactccttcactcgtgcgcaacttgttccttctccaacgtgttccagaacaccacagcatgcctctgtccacatacttcattggttcttcatttaattggaattcaaacaaggatttcggtaaatatgagtgtcaacttttgctttgcattcttctgtatagtacaacacacattgtttcttgcatttggaagttgttggtctcatgtaggacacagtggcgccaaggttccagactgtggcgggactgggctctgcagccgctgcaaaggagagtgcttcgtcttcaagcaactctcgaaggagacggccaccaggtcacacaaggccgccaagaacatggccaccggatacacttcggggctgtccaccaatggacctactgcaacaagtactcctccacccgcgtgcctgcataaaatggcaggggttctaccaacaatcaacacacatgtgaagcgaagctgggacgtgcatgtatgtggatccacgacacgtgcatctgtaggaaccctgattttggtatggtttctacactcaaattcatcagtatgatataaggcaatctgctggctggtatttaagagtggccctctcttcatatcatcgaaaggtaaaactattagtggcacacgttggttttttcctttgtttccaacatgtaacattatattaggggtatgtgcagtttagggtaagtaatatactcctttgtgctcagtaagtaattgatagaaggtagaagaaggtagaaacatatgtgcagtttagagtttacctctttatgatttctgggtagccacaatattttcacattgcaattcaagtccttagtaccctggtaatcaaactaacatgtcagagcatcaggcaaattcattgtgcacctgcctattgtatgctaaagaaatcagtttttttgcatgtgttagttgtctcctaacctgctgcattttcaatttttgtgttctgtgttttgtaatttgggagcaccttcaccattgtgttattagagctaggcaccttcaccattgtgttattgatgatctttcttggtctgaatggagtttttgcacctattcacatgccagagagtttatgcattgtcctccttttttggatacactttctgttaaaaaatgctacacagttgcattctacttaccttgtgattttgatggagctctgttgttgtgcttctttgacatttgtcggtcctttgagcattaggtctgcatcatgcattatgttgttatctattgatctatatatcccatattgtggagatcactaaaatcttagtaatttaagttctgttcaaactttcaattccatcgtccgtgaaaaattgataagtatgaatgtgttgacttgactccattttatcttctccttatttgagcttgtattcttattttttaatacattgctgccctgcactgagatttctattgtaaataaacaaagtgctatttaaattttgatttattccttacgaatgtctgttggtttcaggaaagtgctgagagaggtggcatctagaggatgtcatgtcgaacgtgtgaagtttttttagaaatatgtatatttgtgtgaagctttttagaaacttggctccattttattttctatgttcctctcggctttgtttcctatcctttccaatgacttgctatgcatttgcactgtatttggcatgtctaaaactgctacacaaaacttgatatatattttgtctaaaaatactatatccttgttatgcttgattgatctttattttgtctgctcttctattcttgtgtgggtctatcaagaatgaggcaattagataaagatatatgctttgtcagtattagctgagtctttgagcgtagcaggaaaagtcttggcacatcattgttttagttattat

SEQ ID NO: 79054 - DNA, 3572 bp, Zea Mays
ctgccgcggccgtaccccgccccgcatgctgcccggaatcagcgcctccgccgccgcagcccttccagaaatctccatcccgaatcctccgcgcccccgcctgcccccgcgcatcccgcagcccccgcccccgcgcatcccgcagccttggcgtcgtggccgccgcctctgctccctcctccatcccgcgcaacaacgacgaccgtcggggcctcgcctggcagatcaagcggggaatccacccgccaggcgtctccctgacagtggtagacggtggcggcgatgggggccgagagcgaggatgccccttccccatcctctaccctcccttgcgattccagcattggtgcccgcatccccgccgtccgaagcatggcgctcttcgtctcctccctcgccgccgccctctcccacctctccctcccatcgacctccaaccccaagcctcacccagcctcgctcctgcgcctgcgctccacctaccgccgcgctgttagcctcgcggtggccggagcaagaacggcaataggatgaagctgctgctgtccaacccctacggcttcagcagcccccgacatcgtgtgtcgggatctgggactccagcggcaaggcgaccactatgccgcacgggcgcggtgcaggagctcctccagcggcgccgcaactgcctctgagccctcatggtccagctcgagtgctcgacgcacccgctccgcacccgcccttgtcccccaggtgtcggcgtgcgggattcggtaacggtgttggagctcatccagtggcgccgcaaccgcctccgatccctcaaggtttggctcaaggctgatggccaggtcgaccgtctcctccatgcgcaggggaagaggaaggagctggagcagacggtgaatagcttctctgatttctccctctccggtcctgttgcaaagagccacaaactggttaggatgtcttggatcatcagacagatcagcatgacttgcaagcagctagctactgtttacagatgtcctctacttgccaaaaaataacaaaggggttctcgttcttgaaagctgcatagatagcacctcaacttggccactaaaacaactaagtttttttatggacatgtctgatgtttttctcaataattgtgcaaattttcctttcataattttcgtcgtcggggggcaggaaccgggcggtgtacgtgctggcgcagtgcacgctggacatgccgccggaccactgccgggcctcctcgatggagccatggcagagagcggcgacggaaggtcagcggcgacaagatggacgtggcggtcttcggggcgcggtgcaccctgcggtatgagatggacctgcagttcttcaatgtcactggcaacagcaagatgctgtccctatatttttacagatatttttaataatgacctcagtggaccctatgcatttcttgaggattcagataactgtatcactttctgcaagtacaaatacacaaacacagaatatctttccctttatgtacttttagctagaccttccagtaatatttcgcttgaggggagcgggagcggcggctgcgacggccgcggtgctggggaggaggatgcctccgcgctcgccaactccctcgacgcgctttgcaaggcctgcaagcctgaggtgcgtgtactcactccttcactcgtgcgcaacttgttccttctccaacgtgttccagaacaccacagcatgcctctgtccacatacttcattggttcttcatttaattggaattcaaacaaggatttcggtaaatatgagtgtcaacttttgctttgcattcttctgtatagtacaacacacattgtttcttgcatttggaagttgttggtctcatgtaggacacagtggcgccaaggttccagactgtggcgggactgggctctgcagccgctgcaaaggagagtgcttcgtcttcaagcaactctcgaaggagacggccaccaggtcacacaaggccgccaagaacatggccaccggatacacttcggggctgtccaccaatggacctactgcaacaagtactcctccacccgcgtgcctgcataaaatggcaggggttctaccaacaatcaacacacatgtgaagcgaagctgggacgtgcatgtatgtggatccacgacacgtgcatctgtaggaaccctgattttggtatggtttctacactcaaattcatcagtatgatataaggcaatctgctggctggtatttaagagtggccctctcttcatatcatcgaaaggtaaaactattagtggcacacgttggttttttcctttgtttccaacatgtaacattatattaggggtatgtgcagtttagggtaagtaatatactcctttgtgctcagtaagtaattgatagaaggtagaagaaggtagaaacatatgtgcagtttagagtttacctctttatgatttctgggtagccacaatattttcacattgcaattcaagtccttagtaccctggtaatcaaactaacatgtcagagcatcaggcaaattcattgtgcacctgcctattgtatgctaaagaaatcagtttttttgcatgtgttagttgtctcctaacctgctgcattttcaatttttgtgttctgtgttttgtaatttgggagcaccttcaccattgtgttattagagctaggcaccttcaccattgtgttattgatgatctttcttggtctgaatggagtttttgcacctattcacatgccagagagtttatgcattgtcctccttttttggatacactttctgttaaaaaatgctacacagttgcattctacttaccttgtgattttgatggagctctgttgttgtgcttctttgacatttgtcggtcctttgagcattaggtctgcatcatgcattatgttgttatctattgatctatatatcccatattgtggagatcactaaaatcttagtaatttaagttctgttcaaactttcaattccatcgtccgtgaaaaattgataagtatgaatgtgttgacttgactccattttatcttctccttatttgagcttgtattcttattttttaatacattgctgccctgcactgagatttctattgtaaataaacaaagtgctatttaaattttgatttattccttacgaatgtctgttggtttcaggaaagtgctgagagaggtggcatctagaggatgtcatgtcgaacgtgtgaagtttttttagaaatatgtatatttgtgtgaagctttttagaaacttggctccattttattttctatgttcctctcggctttgtttcctatcctttccaatgacttgctatgcatttgcactgtatttggcatgtctaaaactgctacacaaaacttgatatatattttgtctaaaaatactatatccttgttatgcttgattgatctttattttgtctgctcttctattcttgtgtgggtctatcaagaatgaggcaattagataaagatatatgctttgtcagtattagctgagtctttgagcgtagcaggaaaagtcttggcacatcattgttttagttattat

SEQ ID NO: 79055 - DNA, 2971 bp, Zea Mays
ctgccgcggccgtaccccgccccgcatgctgcccggaatcagcgcctccgccgccgcagcccttccagaaatctccatcccgaatcctccgcgcccccgcctgcccccgcgcatcccgcagcccccgcccccgcgcatcccgcagccttggcgtcgtggccgccgcctctgctccctcctccatcccgcgcaacaacgacgaccgtcggggcctcgcctggcagatcaagcggggaatccacccgccaggcgtctccctgacagtggtagacggtggcggcgatgggggccgagagcgaggatgccccttccccatcctctaccctcccttgcgattccagcattggtgcccgcatccccgccgtccgaagcatggcgctcttcgtctcctccctcgccgccgccctctcccacctctccctcccatcgacctccaaccccaagcctcacccagcctcgctcctgcgcctgcgctccacctaccgccgcgctgttagcctcgcggtggccggagcaagaacggcaataggatgaagctgctgctgtccaacccctacggcttcagcagcccccgacatcgtgtgtcgggatctgggactccagcggcaaggcgaccactatgccgcacgggcgcggtgcaggagctcctccagcggcgccgcaactgcctctgagccctcatggtccagctcgagtgctcgacgcacccgctccgcacccgcccttgtcccccaggtgtcggcgtgcgggattcggtaacggtgttggagctcatccagtggcgccgcaaccgcctccgatccctcaaggtttggctcaaggctgatggccaggtcgaccgtctcctccatgcgcaggggaagaggaaggagctggagcagacggtgaatagcttctctgatttctccctctccggtcctgttgcaaagagccacaaactggttaggatgtcttggatcatcagacagatcagcatgacttgcaagcagctagctactgtttacagatgtcctctacttgccaaaaaataacaaaggggttctcgttcttgaaagctgcatagatagcacctcaacttggccactaaaacaactaagtttttttatggacatgtctgatgtttttctcaataattgtgcaaattttcctttcataattttcgtcgtcggggggcaggaaccgggcggtgtacgtgctggcgcagtgcacgctggacatgccgccggaccactgccgggcctcctcgatggagccatggcagagagcggcgacggaaggtcagcggcgacaagatggacgtggcggtcttcggggcgcggtgcaccctgcggtatgagatggacctgcagttcttcaatgtcactggcaacagcaagatgctgtccctatatttttacagatatttttaataatgacctcagtggaccctatgcatttcttgagccaccttttgttcaaagatcccttctatataagatacaggcaaggagaaaaaataggattcagataactgtatcactttctgcaagtacaaatacacaaacacagaatatctttccctttatgtacttttagctagaccttccagtaatatttcgcttgaggggcattctccgatatatcgagtgggatgatgcttggtggacgtgtacatactaatattaatcggtctcgaagcttctgatacactcagttctcacatgtcgcatgaaatggacctcactagaaaccaaacacccttgaatcgcagtcacccacgtcgccaacaggagtgacttcctcaccctgctccacgccctgccgccgcagagcgggagcggcggctgcgacggccgcggtgctggggaggaggatgcctccgcgctcgccaactccctcgacgcgctttgcaaggcctgcaagcctgagtaagcaagagaacaaaacccgcgggactgtgaacaagcgcagaaagaaatacgaatgcaacaagtcctacattctgttctccttttttggggggccaaaacgttgaggtctcaactcactcgtgcaagcagtttcatcgccacccccatgtgagcaatccgggacaccgcggagatgcctcgtgaggaaagcggtacggcgaggcagagcagcgtcggtggtcgtggaaggatggagcaacaaccccacatgttttgttctaatgacacagtggcgccaaggttccagactgtggcgggactgggctctgcagccgctgcaaaggagagtgcttcgtcttcaagcaactctcgaaggagacggccaccaggtcacacaaggccgccaagaacatggccaccggatacacttcggggctgtccaccaatggacctactgcaacaagtactcctccacccgcgtgcctgcataaaatggcaggggttctaccaacaatcaacacacatgtgaagcgaagctgggacgtgcatgtatgtggatccacgacacgtgcatctgtaggaaccctgattttggtatggtttctacactcaaattcatcagtatgatataaggcaatctgctggctggtatttaagagtggccctctcttcatatcatcgaaaggaaagtgctgagagaggtggcatctagaggatgtcatgtcgaacgtgtgaagtttttttagaaatatgtatatttgtgtgaagctttttagaaacttggctccattttattttctatgttcctctcggctttgtttcctatcctttccaatgacttgctatgcatttgcactgtatttggcatgtctaaaactgctacacaaaacttgatatatattttgtctaaaaatactatatccttgttatgcttgattgatctttattttgtctgctcttctattcttgtgtgggtctatcaagaatgaggcaattagataaagatatatgctttgtcagtattagctgagtctttgagcgtagcaggaaaagtcttggcacatcattgttttagttattat

SEQ ID NO: 79056 - DNA, 3780 bp, Zea Mays
ctgccgcggccgtaccccgccccgcatgctgcccggaatcagcgcctccgccgccgcagcccttccagaaatctccatcccgaatcctccgcgcccccgcctgcccccgcgcatcccgcagcccccgcccccgcgcatcccgcagccttggcgtcgtggccgccgcctctgctccctcctccatcccgcgcaacaacgacgaccgtcggggcctcgcctggcagatcaagcggggaatccacccgccaggcgtctccctgacagtggtagacggtggcggcgatgggggccgagagcgaggatgccccttccccatcctctaccctcccttgcgattccagcattggtgcccgcatccccgccgtccgaagcatggcgctcttcgtctcctccctcgccgccgccctctcccacctctccctcccatcgacctccaaccccaagcctcacccagcctcgctcctgcgcctgcgctccacctaccgccgcgctgttagcctcgcggtggccggagcaagaacggcaataggatgaagctgctgctgtccaacccctacggcttcagcagcccccgacatcgtgtgtcgggatctgggactccagcggcaaggcgaccactatgccgcacgggcgcggtgcaggagctcctccagcggcgccgcaactgcctctgagccctcatggtccagctcgagtgctcgacgcacccgctccgcacccgcccttgtcccccaggtgtcggcgtgcgggattcggtaacggtgttggagctcatccagtggcgccgcaaccgcctccgatccctcaaggtttggctcaaggctgatggccaggtcgaccgtctcctccatgcgcaggggaagaggaaggagctggagcagacggtgaatagcttctctgatttctccctctccggtcctgttgcaaagagccacaaactggaaccgggcggtgtacgtgctggcgcagtgcacgctggacatgccgccggaccactgccgggcctcctcgatggagccatggcagagagcggcgacggaaggtcagcggcgacaagatggacgtggcggtcttcggggcgcggtgcaccctgcggtatgagatggacctgcagttcttcaatgtcactggcaacagcaagatgctgtccctatatttttacagatatttttaataatgacctcagtggaccctatgcatttcttgagccaccttttgttcaaagatcccttctatataagatacaggcaaggagaaaaaatagattaatcggtctcgaagcttctgatacactcagttctcacatgtcgcatgaaatggacctcactagaaaccaaacacccttgaatcgcagtcacccacgtcgccaacaggagtgacttcctcaccctgctccacgccctgccgccgcagagcgggagcggcggctgcgacggccgcggtgctggggaggaggatgcctccgcgctcgccaactccctcgacgcgctttgcaaggcctgcaagcctgagtttcatcgccacccccatgtgagcaatccgggacaccgcggagatgcctcgtgaggaaagcggtacggcgaggcagagcagcgtcggtggtcgtggaaggatggagcaacaaccccacatgttttgttctaatgtaagttattgcaacctaaatttaaattatgtgaatccttgaatttggagactaccgctgcaagctgatccattttagctgagaactcattactcctaaatgaagttaaaattgagttatatagttcaagggatgacaagttttgatattcttagattgatcgccttgggcgtggatgtttatttgttgttacaacaatataaactattgagtatgctctcattttttatagggtccataagtttgcaccacacaaccatttggttttatctgttgtcatttgaccttgatggaaaggagtgagatgaactatggaggaattctgatattatggatttccatttaacttcatcgtacttgcaagccatgcaatatgctattgttgttattgccctttataatctgtgattggactatactgtgtatttaaagcggacacagtggcgccaaggttccagactgtggcgggactgggctctgcagccgctgcaaaggagagtgcttcgtcttcaagcaactctcgaaggagacggccaccaggtcacacaaggccgccaagaacatggccaccggatacacttcggggctgtccaccaatggacctactgcaacaagtactcctccacccgcgtgcctgcataaaatggcaggggttctaccaacaatcaacacacatgtgaagcgaagctgggacgtgcatgtatgtggatccacgacacgtgcatctgtaggaaccctgattttggtatggtttctacactcaaattcatcagtatgatataaggcaatctgctggctggtatttaagagtggccctctcttcatatcatcgaaaggtaaaactattagtggcacacgttggttttttcctttgtttccaacatgtaacattatattaggggtatgtgcagtttagggtaagtaatatactcctttgtgctcagtaagtaattgatagaaggtagaagaaggtagaaacatatgtgcagtttagagtttacctctttatgatttctgggtagccacaatattttcacattgcaattcaagtccttagtaccctggtaatcaaactaacatgtcagagcatcaggcaaattcattgtgcacctgcctattgtatgctaaagaaatcagtttttttgcatgtgttagttgtctcctaacctgctgcattttcaatttttgtgttctgtgttttgtaatttgggagcaccttcaccattgtgttattagagctaggcaccttcaccattgtgttattgatgatctttcttggtctgaatggagtttttgcacctattcacatgccagagagtttatgcattgtcctccttttttggatacactttctgttaaaaaatgctacacagttgcattctacttaccttgtgattttgatggagctctgttgttgtgcttctttgacatttgtcggtcctttgagcattaggtctgcatcatgcattatgttgttatctattgatctatatatcccatattgtggagatcactaaaatcttagtaatttaagttctgttcaaactttcaattccatcgtccgtgaaaaattgataagtatgaatgtgttgacttgactccattttatcttctccttatttgagcttgtattcttattttttaatacattgctgccctgcactgagatttctattgtaaataaacaaagtgctatttaaattttgatttattccttacgaatgtctgttggtttcaggaaagtgctgagagaggtggcatctagaggatgtcatgtcgaacgtgtgaagtttttttagaaatatgtatatttgtgtgaagctttttagaaacttggctccattttattttctatgttcctctcggctttgtttcctatcctttccaatgacttgctatgcatttgcactgtatttggcatgtctaaaactgctacacaaaacttgatatatattttgtctaaaaatactatatccttgttatgcttgattgatctttattttgtctgctcttctattcttgtgtgggtctatcaagaatgaggcaattagataaagatatatgctttgtcagtattagctgagtctttgagcgtagcaggaaaagtcttggcacatcattgttttagttattat

SEQ ID NO: 79057 - DNA, 3434 bp, Zea Mays
ctgccgcggccgtaccccgccccgcatgctgcccggaatcagcgcctccgccgccgcagcccttccagaaatctccatcccgaatcctccgcgcccccgcctgcccccgcgcatcccgcagcccccgcccccgcgcatcccgcagccttggcgtcgtggccgccgcctctgctccctcctccatcccgcgcaacaacgacgaccgtcggggcctcgcctggcagatcaagcggggaatccacccgccaggcgtctccctgacagtggtagacggtggcggcgatgggggccgagagcgaggatgccccttccccatcctctaccctcccttgcgattccagcattggtgcccgcatccccgccgtccgaagcatggcgctcttcgtctcctccctcgccgccgccctctcccacctctccctcccatcgacctccaaccccaagcctcacccagcctcgctcctgcgcctgcgctccacctaccgccgcgctgttagcctcgcggtggccggagcaagaacggcaataggatgaagctgctgctgtccaacccctacggcttcagcagcccccgacatcgtgtgtcgggatctgggactccagcggcaaggcgaccactatgccgcacgggcgcggtgcaggagctcctccagcggcgccgcaactgcctctgagccctcatggtccagctcgagtgctcgacgcacccgctccgcacccgcccttgtcccccaggtgtcggcgtgcgggattcggtaacggtgttggagctcatccagtggcgccgcaaccgcctccgatccctcaaggtttggctcaaggctgatggccaggtcgaccgtctcctccatgcgcaggggaagaggaaggagctggagcagacggtgaatagcttctctgatttctccctctccggtcctgttgcaaagagccacaaactggaaccgggcggtgtacgtgctggcgcagtgcacgctggacatgccgccggaccactgccgggcctcctcgatggagccatggcagagagcggcgacggaaggtcagcggcgacaagatggacgtggcggtcttcggggcgcggtgcaccctgcggtatgagatggacctgcagttcttcaatgtcactggcaacagcaagatgctgtccctatatttttacagatatttttaataatgacctcagtggaccctatgcatttcttgagccaccttttgttcaaagatcccttctatataagatacaggcaaggagaaaaaatagattaatcggtctcgaagcttctgatacactcagttctcacatgtcgcatgaaatggacctcactagaaaccaaacacccttgaatcgcagtcacccacgtcgccaacaggagtgacttcctcaccctgctccacgccctgccgccgcagagcgggagcggcggctgcgacggccgcggtgctggggaggaggatgcctccgcgctcgccaactccctcgacgcgctttgcaaggcctgcaagcctgaggtgcgtgtactcactccttcactcgtgcgcaacttgttccttctccaacgtgttccagaacaccacagcatgcctctgtccacatacttcattggttcttcatttaattggaattcaaacaaggatttcggtaaatatgagtgtcaacttttgctttgcattcttctgtatagtacaacacacattgtttcttgcatttggaagttgttggtctcatgtaggacacagtggcgccaaggttccagactgtggcgggactgggctctgcagccgctgcaaaggagagtgcttcgtcttcaagcaactctcgaaggagacggccaccaggtcacacaaggccgccaagaacatggccaccggatacacttcggggctgtccaccaatggacctactgcaacaagtactcctccacccgcgtgcctgcataaaatggcaggggttctaccaacaatcaacacacatgtgaagcgaagctgggacgtgcatgtatgtggatccacgacacgtgcatctgtaggaaccctgattttggtatggtttctacactcaaattcatcagtatgatataaggcaatctgctggctggtatttaagagtggccctctcttcatatcatcgaaaggtaaaactattagtggcacacgttggttttttcctttgtttccaacatgtaacattatattaggggtatgtgcagtttagggtaagtaatatactcctttgtgctcagtaagtaattgatagaaggtagaagaaggtagaaacatatgtgcagtttagagtttacctctttatgatttctgggtagccacaatattttcacattgcaattcaagtccttagtaccctggtaatcaaactaacatgtcagagcatcaggcaaattcattgtgcacctgcctattgtatgctaaagaaatcagtttttttgcatgtgttagttgtctcctaacctgctgcattttcaatttttgtgttctgtgttttgtaatttgggagcaccttcaccattgtgttattagagctaggcaccttcaccattgtgttattgatgatctttcttggtctgaatggagtttttgcacctattcacatgccagagagtttatgcattgtcctccttttttggatacactttctgttaaaaaatgctacacagttgcattctacttaccttgtgattttgatggagctctgttgttgtgcttctttgacatttgtcggtcctttgagcattaggtctgcatcatgcattatgttgttatctattgatctatatatcccatattgtggagatcactaaaatcttagtaatttaagttctgttcaaactttcaattccatcgtccgtgaaaaattgataagtatgaatgtgttgacttgactccattttatcttctccttatttgagcttgtattcttattttttaatacattgctgccctgcactgagatttctattgtaaataaacaaagtgctatttaaattttgatttattccttacgaatgtctgttggtttcaggaaagtgctgagagaggtggcatctagaggatgtcatgtcgaacgtgtgaagtttttttagaaatatgtatatttgtgtgaagctttttagaaacttggctccattttattttctatgttcctctcggctttgtttcctatcctttccaatgacttgctatgcatttgcactgtatttggcatgtctaaaactgctacacaaaacttgatatatattttgtctaaaaatactatatccttgttatgcttgattgatctttattttgtctgctcttctattcttgtgtgggtctatcaagaatgaggcaattagataaagatatatgctttgtcagtattagctgagtctttgagcgtagcaggaaaagtcttggcacatcattgttttagttattat

SEQ ID NO: 79058 - DNA, 3627 bp, Zea Mays
ctgccgcggccgtaccccgccccgcatgctgcccggaatcagcgcctccgccgccgcagcccttccagaaatctccatcccgaatcctccgcgcccccgcctgcccccgcgcatcccgcagcccccgcccccgcgcatcccgcagccttggcgtcgtggccgccgcctctgctccctcctccatcccgcgcaacaacgacgaccgtcggggcctcgcctggcagatcaagcggggaatccacccgccaggcgtctccctgacagtggtagacggtggcggcgatgggggccgagagcgaggatgccccttccccatcctctaccctcccttgcgattccagcattggtgcccgcatccccgccgtccgaagcatggcgctcttcgtctcctccctcgccgccgccctctcccacctctccctcccatcgacctccaaccccaagcctcacccagcctcgctcctgcgcctgcgctccacctaccgccgcgctgttagcctcgcggtggccggagcaagaacggcaataggatgaagctgctgctgtccaacccctacggcttcagcagcccccgacatcgtgtgtcgggatctgggactccagcggcaaggcgaccactatgccgcacgggcgcggtgcaggagctcctccagcggcgccgcaactgcctctgagccctcatggtccagctcgagtgctcgacgcacccgctccgcacccgcccttgtcccccaggtgtcggcgtgcgggattcggtaacggtgttggagctcatccagtggcgccgcaaccgcctccgatccctcaaggtttggctcaaggctgatggccaggtcgaccgtctcctccatgcgcaggggaagaggaaggagctggagcagacggtgaatagcttctctgatttctccctctccggtcctgttgcaaagagccacaaactggttaggatgtcttggatcatcagacagatcagcatgacttgcaagcagctagctactgtttacagatgtcctctacttgccaaaaaataacaaaggggttctcgttcttgaaagctgcatagatagcacctcaacttggccactaaaacaactaagtttttttatggacatgtctgatgtttttctcaataattgtgcaaattttcctttcataattttcgtcgtcggggggcaggaaccgggcggtgtacgtgctggcgcagtgcacgctggacatgccgccggaccactgccgggcctcctcgatggagccatggcagagagcggcgacggaaggtcagcggcgacaagatggacgtggcggtcttcggggcgcggtgcaccctgcggtatgagatggacctgcagttcttcaatgtcactggcaacagcaagatgctgtccctatatttttacagatatttttaataatgacctcagtggaccctatgcatttcttgagccaccttttgttcaaagatcccttctatataagatacaggcaaggagaaaaaatagcattctccgatatatcgagtgggatgatgcttggtggacgtgtacatactaatattaatcggtctcgaagcttctgatacactcagttctcacatgtcgcatgaaatggacctcactagaaaccaaacacccttgaatcgcagtcacccacgtcgccaacaggagtgacttcctcaccctgctccacgccctgccgccgcagagcgggagcggcggctgcgacggccgcggtgctggggaggaggatgcctccgcgctcgccaactccctcgacgcgctttgcaaggcctgcaagcctgagtttcatcgccacccccatgtgagcaatccgggacaccgcggagatgcctcgtgaggaaagcggtacggcgaggcagagcagcgtcggtggtcgtggaaggatggagcaacaaccccacatgttttgttctaattggcgccaaggttccagactgtggcgggactgggctctgcagccgctgcaaaggagagtgcttcgtcttcaagcaactctcgaaggagacggccaccaggtcacacaaggccgccaagaacatggccaccggatacacttcggggctgtccaccaatggacctactgcaacaagtactcctccacccgcgtgcctgcataaaatggcaggggttctaccaacaatcaacacacatgtgaagcgaagctgggacgtgcatgtatgtggatccacgacacgtgcatctgtaggaaccctgattttggtatggtttctacactcaaattcatcagtatgatataaggcaatctgctggctggtatttaagagtggccctctcttcatatcatcgaaaggtaaaactattagtggcacacgttggttttttcctttgtttccaacatgtaacattatattaggggtatgtgcagtttagggtaagtaatatactcctttgtgctcagtaagtaattgatagaaggtagaagaaggtagaaacatatgtgcagtttagagtttacctctttatgatttctgggtagccacaatattttcacattgcaattcaagtccttagtaccctggtaatcaaactaacatgtcagagcatcaggcaaattcattgtgcacctgcctattgtatgctaaagaaatcagtttttttgcatgtgttagttgtctcctaacctgctgcattttcaatttttgtgttctgtgttttgtaatttgggagcaccttcaccattgtgttattagagctaggcaccttcaccattgtgttattgatgatctttcttggtctgaatggagtttttgcacctattcacatgccagagagtttatgcattgtcctccttttttggatacactttctgttaaaaaatgctacacagttgcattctacttaccttgtgattttgatggagctctgttgttgtgcttctttgacatttgtcggtcctttgagcattaggtctgcatcatgcattatgttgttatctattgatctatatatcccatattgtggagatcactaaaatcttagtaatttaagttctgttcaaactttcaattccatcgtccgtgaaaaattgataagtatgaatgtgttgacttgactccattttatcttctccttatttgagcttgtattcttattttttaatacattgctgccctgcactgagatttctattgtaaataaacaaagtgctatttaaattttgatttattccttacgaatgtctgttggtttcaggaaagtgctgagagaggtggcatctagaggatgtcatgtcgaacgtgtgaagtttttttagaaatatgtatatttgtgtgaagctttttagaaacttggctccattttattttctatgttcctctcggctttgtttcctatcctttccaatgacttgctatgcatttgcactgtatttggcatgtctaaaactgctacacaaaacttgatatatattttgtctaaaaatactatatccttgttatgcttgattgatctttattttgtctgctcttctattcttgtgtgggtctatcaagaatgaggcaattagataaagatatatgctttgtcagtattagctgagtctttgagcgtagcaggaaaagtcttggcacatcattgttttagttattat

SEQ ID NO: 79059 - DNA, 1916 bp, Zea Mays
gtgagtcacagagtcggttaggatgtcttggatcatcagacagatcagcatgacttgcaagcagctagctactgtttacagatgtcctctacttgccaaaaaataacaaaggggttctcgttcttgaaagctgcatagatagcacctcaacttggccactaaaacaactaagtttttttatggacatgtctgatgtttttctcaataattgtgcaaattttcctttcataattttcgtcgtcggggggcaggaaccgggcggtgtacgtgctggcgcagtgcacgctggacatgccgccggaccactgccgggcctcctcgatggagccatggcagagagcggcgacggaaggtcagcggcgacaagatggacgtggcggtcttcggggcgcggtgcaccctgcggtatgagatggacctgcagttcttcaatgtcactggcaacagcaagatgctgtccctattcaaagcaaggtggcaccccagtgttgatattggtaaatcatgcgtaaatgggtgtgctgaaatgatggagaacaatagggaacatagaattgctcttgttgctgctggattagctgctagaatcacttcagatatttttaataatgacctcagtggaccctatgcatttcttgagccaccttttgttcaaagatcccttctatataagatacaggcaaggagaaaaaatagattaatcggtctcgaagcttctgatacactcagttctcacatgtcgcatgaaatggacctcactagaaaccaaacacccttgaatcgcagtcacccacgtcgccaacaggagtgacttcctcaccctgctccacgccctgccgccgcagagcgggagcggcggctgcgacggccgcggtgctggggaggaggatgcctccgcgctcgccaactccctcgacgcgctttgcaaggcctgcaagcctgagtaagcaagagaacaaaacccgcgggactgtgaacaagcgcagaaagaaatacgaatgcaacaagtcctacattctgttctccttttttggggggccaaaacgttgaggtctcaactcactcgtgcaagcagtttcatcgccacccccatgtgagcaatccgggacaccgcggagatgcctcgtgaggaaagcggtacggcgaggcagagcagcgtcggtggtcgtggaaggatggagcaacaaccccacatgttttgttctaatgacacagtggcgccaaggttccagactgtggcgggactgggctctgcagccgctgcaaaggagagtgcttcgtcttcaagcaactctcgaaggagacggccaccaggtcacacaaggccgccaagaacatggccaccggatacacttcggggctgtccaccaatggacctactgcaacaagtactcctccacccgcgtgcctgcataaaatggcaggggttctaccaacaatcaacacacatgtgaagcgaagctgggacgtgcatgtatgtggatccacgacacgtgcatctgtaggaaccctgattttggaaagtgctgagagaggtggcatctagaggatgtcatgtcgaacgtgtgaagtttttttagaaatatgtatatttgtgtgaagctttttagaaacttggctccattttattttctatgttcctctcggctttgtttcctatcctttccaatgacttgctatgcatttgcactgtatttggcatgtctaaaactgctacacaaaacttgatatatattttgtctaaaaatactatatccttgttatgcttgattgatctttattttgtctgctcttctattcttgtgtgggtctatcaagaatgaggcaattagataaagatatatgctttgtcagtattagctgagtctttgagcgtagcaggaaaagtcttggcacatcattgttttagttattat

SEQ ID NO: 79060 - DNA, 1361 bp, Zea Mays
gggcattctccgatatatcgagtgggatgatgcttggtggacgtgtacatactaatgtgatgcaccttagccacatcgaggtggacggaaaacctaactctactagattctaatgtccactcatcttttgtcctcttgcagattaatcggtctcgaagcttctgatacactcagttctcacatgtcgcatgaaatggacctcactagaaaccaaacacccttgaatcgcagtcacccacgtcgccaacaggagtgacttcctcaccctgctccacgccctgccgccgcagagcgggagcggcggctgcgacggccgcggtgctggggaggaggatgcctccgcgctcgccaactccctcgacgcgctttgcaaggcctgcaagcctgagtaagcaagagaacaaaacccgcgggactgtgaacaagcgcagaaagaaatacgaatgcaacaagtcctacattctgttctccttttttggggggccaaaacgttgaggtctcaactcactcgtgcaagcagtttcatcgccacccccatgtgagcaatccgggacaccgcggagatgcctcgtgaggaaagcggtacggcgaggcagagcagcgtcggtggtcgtggaaggatggagcaacaaccccacatgttttgttctaatgacacagtggcgccaaggttccagactgtggcgggactgggctctgcagccgctgcaaaggagagtgcttcgtcttcaagcaactctcgaaggagacggccaccaggtcacacaaggccgccaagaacatggccaccggatacacttcggggctgtccaccaatggacctactgcaacaagtactcctccacccgcgtgcctgcataaaatggcaggggttctaccaacaatcaacacacatgtgaagcgaagctgggacgtgcatgtatgtggatccacgacacgtgcatctgtaggaaccctgattttggaaagtgctgagagaggtggcatctagaggatgtcatgtcgaacgtgtgaagtttttttagaaatatgtatatttgtgtgaagctttttagaaacttggctccattttattttctatgttcctctcggctttgtttcctatcctttccaatgacttgctatgcatttgcactgtatttggcatgtctaaaactgctacacaaaacttgatatatattttgtctaaaaatactatatccttgttatgcttgattgatctttattttgtctgctcttctattcttgtgtgggtctatcaagaatgaggcaattagataaagatatatgctttgtcagtattagctgagtctttgagcgtagcaggaaaagtcttggcacatcattgttttagttattat

SEQ ID NO: 79061 - DNA, 2251 bp, Zea Mays
gatatatcgagtgggatgatgcttggtggacgtgtacatactaatattaatcggtctcgaagcttctgatacactcagttctcacatgtcgcatgaaatggacctcactagaaaccaaacacccttgaatcgcagtcacccacgtcgccaacaggagtgacttcctcaccctgctccacgccctgccgccgcagagcgggagcggcggctgcgacggccgcggtgctggggaggaggatgcctccgcgctcgccaactccctcgacgcgctttgcaaggcctgcaagcctgagtaagcaagagaacaaaacccgcgggactgtgaacaagcgcagaaagaaatacgaatgcaacaagtcctacattctgttctccttttttggggggccaaaacgttgaggtctcaactcactcgtgcaagcagtttcatcgccacccccatgtgagcaatccgggacaccgcggagatgcctcgtgaggaaagcggtacggcgaggcagagcagcgtcggtggtcgtggaaggatggagcaacaaccccacatgttttgttctaattggcgccaaggttccagactgtggcgggactgggctctgcagccgctgcaaaggagagtgcttcgtcttcaagcaactctcgaaggagacggccaccaggtcacacaaggccgccaagaacatggccaccggatacacttcggggctgtccaccaatggacctactgcaacaagtactcctccacccgcgtgcctgcataaaatggcaggggttctaccaacaatcaacacacatgtgaagcgaagctgggacgtgcatgtatgtggatccacgacacgtgcatctgtaggaaccctgattttggtatggtttctacactcaaattcatcagtatgatataaggcaatctgctggctggtatttaagagtggccctctcttcatatcatcgaaaggtaaaactattagtggcacacgttggttttttcctttgtttccaacatgtaacattatattaggggtatgtgcagtttagggtaagtaatatactcctttgtgctcagtaagtaattgatagaaggtagaagaaggtagaaacatatgtgcagtttagagtttacctctttatgatttctgggtagccacaatattttcacattgcaattcaagtccttagtaccctggtaatcaaactaacatgtcagagcatcaggcaaattcattgtgcacctgcctattgtatgctaaagaaatcagtttttttgcatgtgttagttgtctcctaacctgctgcattttcaatttttgtgttctgtgttttgtaatttgggagcaccttcaccattgtgttattagagctaggcaccttcaccattgtgttattgatgatctttcttggtctgaatggagtttttgcacctattcacatgccagagagtttatgcattgtcctccttttttggatacactttctgttaaaaaatgctacacagttgcattctacttaccttgtgattttgatggagctctgttgttgtgcttctttgacatttgtcggtcctttgagcattaggtctgcatcatgcattatgttgttatctattgatctatatatcccatattgtggagatcactaaaatcttagtaatttaagttctgttcaaactttcaattccatcgtccgtgaaaaattgataagtatgaatgtgttgacttgactccattttatcttctccttatttgagcttgtattcttattttttaatacattgctgccctgcactgagatttctattgtaaataaacaaagtgctatttaaattttgatttattccttacgaatgtctgttggtttcaggaaagtgctgagagaggtggcatctagaggatgtcatgtcgaacgtgtgaagtttttttagaaatatgtatatttgtgtgaagctttttagaaacttggctccattttattttctatgttcctctcggctttgtttcctatcctttccaatgacttgctatgcatttgcactgtatttggcatgtctaaaactgctacacaaaacttgatatatattttgtctaaaaatactatatccttgttatgcttgattgatctttattttgtctgctcttctattcttgtgtgggtctatcaagaatgaggcaattagataaagatatatgctttgtcagtattagctgagtctttgagcgtagcaggaaaagtcttggcacatcattgttttagttattat

SEQ ID NO: 79062 - DNA, 1365 bp, Zea Mays
gagtgggatgatgcttggtggacgtgtacatactaatattaatcggtctcgaagcttctgatacactcagttctcacatgtcgcatgaaatggacctcactagaaaccaaacacccttgaatcgcagtcacccacgtcgccaacaggagtgacttcctcaccctgctccacgccctgccgccgcagagcgggagcggcggctgcgacggccgcggtgctggggaggaggatgcctccgcgctcgccaactccctcgacgcgctttgcaaggcctgcaagcctgagtaagcaagagaacaaaacccgcgggactgtgaacaagcgcagaaagaaatacgaatgcaacaagtcctacattctgttctccttttttggggggccaaaacgttgaggtctcaactcactcgtgcaagcagtttcatcgccacccccatgtgagcaatccgggacaccgcggagatgcctcgtgaggaaagcggtacggcgaggcagagcagcgtcggtggtcgtggaaggatggagcaacaaccccacatgttttgttctaatttgttggtctcatgtaggacacagtggcgccaaggttccagactgtggcgggactgggctctgcagccgctgcaaaggagagtgcttcgtcttcaagcaactctcgaaggagacggccaccaggtcacacaaggccgccaagaacatggccaccggatacacttcggggctgtccaccaatggacctactgcaacaagtactcctccacccgcgtgcctgcataaaatggcaggggttctaccaacaatcaacacacatgtgaagcgaagctgggacgtgcatgtatgtggatccacgacacgtgcatctgtaggaaccctgattttggtatggtttctacactcaaattcatcagtatgatataaggcaatctgctggctggtatttaagagtggccctctcttcatatcatcgaaaggaaagtgctgagagaggtggcatctagaggatgtcatgtcgaacgtgtgaagtttttttagaaatatgtatatttgtgtgaagctttttagaaacttggctccattttattttctatgttcctctcggctttgtttcctatcctttccaatgacttgctatgcatttgcactgtatttggcatgtctaaaactgctacacaaaacttgatatatattttgtctaaaaatactatatccttgttatgcttgattgatctttattttgtctgctcttctattcttgtgtgggtctatcaagaatgaggcaattagataaagatatatgctttgtcagtattagctgagtctttgagcgtagcaggaaaagtcttggcacatcattgttttagttattat

SEQ ID NO: 79063 - DNA, 3488 bp, Zea Mays
cagcaagggcgctgcgcgctagcagaggcgctgagctgagctctcagccatggaagtggtcgatctctcccccacgtcccgccccctctcaccgctcctctccaccgcacccgcccgccgcctccgcctcctccctccccgctgcgtcgtcggcctgcgcgcctctccccggacccgaggactcggctgcgttggaggtagtctcagcagaaggcattctttttgtaagaacggattcttcgcaacaagcagttcgtcagcctcagtagaacccgctacccaggaattgggaacagcggatgcagtggagtggagtggggatgccatacgtcggcgtttccttgaattttatgcagcccgtggccacaagatccttccgagctcgtcgcttgtgcctggcgacccaactgtgttccttaccatagcgggaatgcttcagttcaagcctatattcctcggcaaggaacctaggcgtgtgccacgcgccactacctctcagaagtgcatacggacaaacgacattgaaaacgtgggtcgcactgctcgacatcagaccttctttgaaatgcttgggaatttcagttttggtgattacttcaagaaggaagcaaccacatgggcatgggagctggcaaccaaggagtatggattgcctgcagaaaggttgtggattagtgtttttgaagatgacaatgaagcattcaacatctggcacaatgaggttggtgtgccaaaggagcggatacagaggatgggtgcagaagataacttttggactagtggcgcaactggaccttgtggaccttgctctgaaatttattatgatttctatcctgagagaggatcatcagatgtggatttgggcgatgatagccgattcattgaattctataatcttgtctttatgcaatataacaaaaaagacgatggatctctagaaccgttgaaacaaatgaacattgatacaggaatgggccttgagcgtatggcacgcattcttcaaaaggttccaaacaactatgagacagacttgattttcccaattatagaaaaggcagctagcatggcgatggtgtcctatgcaaaagctgatgatgccacaaagacaaatctcaagataattggagatcacatgagagcagttgtttatctcatatcagatggggtaattccctcaaatatcgggagaggatatgttgttcgaaggctaataagaagagtagttcggatgggtagattgataggaataagaggtgacgggcatggaaactctgaaggtgcatttttaccttcactagctgaggtagtgatcagccttagcactgagatagattcagatgttgaatcacgacggagatcgatccttggagaacttcaaagggaagagatgcgatttgttcagactttggaaagaggagaaaagttattagctgaacttctggatgaagctttattaaatgctggtaataatggaaacaagccttccttatctggaaaaaatgttttccttttgtacgatacatatggtttcccagtagagattacagctgaaatagccagtgaacaaggcgttactgttgatattgagggatttgatattgaaatggaaaaccagaggaaacaatctcaagctgctcataatgtagtcagactttctgtaggaaatgagaccgagatagtaaagaacatcccggatactgaatttttgggatatgattctctctctgcttctgctgtcattaaaggtctcctagttaatggaaacccagttaatgaagtttctcaaggttctgaagtagaaatattattagaccggacaccgttctatgctgaatcgggtggtcaagttggagataatggtttcttatatgtgaatggaggggaagatagaagacaaacaacagttatagaaatcaatgacgtccaaaagtctctgggaaatatatttgtgcacaaaggcatgattaagcaggggtctgtagaggttggcaaggaagtagatgcttctgttgatgcaaaattgaggcagggggctaaggctcatcacactgcaacacatctactacaatctgctcttaaaagcgtagttggttcagaaacttcacaggctggttcccttgtggcgtttgaccatctccgatttgacttcaatttccatcgcccactttctgaagaggaattaacaacaattgaagcacttataaaccaatggattggcaatgcagcacatgttgagacaaaagtcatggctttgcaagatgcaaaaaatgctggtgcgattgcaatgtttggagaaaaatacggtgaacaggtcagagtcgtagaggttcccgggatctcattggaactctgtggtgggactcacgtcagtaatactgctgagattcgtggtttcaagataatttcagaacaaggaatagcttctgggatcagaaggatagaagcagttgcaggtgacgcttttgttgactatgtgtgtgctcgggacaattacatgcggcgcttatgcttatcccttaaggttaaggctgaagatgtgaacagtagagtagaaacaattcttgaagagctaagagcaaccagaaacgtagcatcatctctacgcagcaaaattgcagtgctaaaagcagcttctcttgcaagtagagctacaactgtggagccccagaatgtcaggattgtggtcgagaacatgggtgatgtcgacgcagatgggctgaaaagcgccgcggagtatctcatagataccctcaaagaccctgctgcggtgattttaggatcaagcccaggggatggtaaagtcagcctggttgctgccttcagccctgcaatcgtcgaaatggggctgcaggccgggaagttcgtgagtggcatagccaaactctgcggcggaggcggtggaggcaagcccaatttcgcccaagctggggggcggaagccggagaacttgcccgacgcccttgagaaagcccgagctgaaattgtggcacgggtatcaggttcgagctgattctccgctgcctcacacctgatactggaagtatagggataggattcatatgaaatgtatatgtaattgtcattggcattctaagcgaaaacacttgtatttctccctaccttgccgtgtacgctttctgcagatgacggagcaaattttgtagcttgtaattgtaactagtggccgaacagaacggggaaaagatcaaatcttcacacagcaaaactactgctcatgtttaatctaatcttaaaaacataagaaattatttgtcacatgatcaactaatagtctaatacctagactagaccaaatacatctgatcaagtcagccagccacgtgcgtccaagcaaagattgagcacgtcctagacattcaactctgatttcagtcattttaactagtgaaattgctagatttagtgggacctaactgtgtccatagctagttaatccgagaggactttaagcaaaacagagaactgat

SEQ ID NO: 79064 - DNA, 3481 bp, Zea Mays
caagggcgctgcgcgctagcagaggcgctgagctgagctctcagccatggaagtggtcgatctctcccccacgtcccgccccctctcaccgctcctctccaccgcacccgcccgccgcctccgcctcctccctccccgctgcgtcgtcggcctgcgcgcctctccccggacccgagcctcagtagaacccgctacccaggaattgggaacagcggatgcagtggagtggagtggggatgccatacgtcggcgtttccttgaattttatgcagcccgtggccacaagatccttccgagctcgtcgcttgtgcctggcgacccaactgtgttccttaccatagcgggaatgcttcagttcaagcctatattcctcggcaaggaacctaggcgtgtgccacgcgccactacctctcagaagtgcatacggacaaacgacattgaaaacgtgggtcgcactgctcgacatcagaccttctttgaaatgcttgggaatttcagttttggtgattacttcaagaaggaagcaaccacatgggcatgggagctggcaaccaaggaggatgtcattcaaatttgtatgcctctacaatctcagactctcagtgttgtcctatcgcattgtcatgtcaggtatggattgcctgcagaaaggttgtggattagtgtttttgaagatgacaatgaagcattcaacatctggcacaatgaggttggtgtgccaaaggagcggatacagaggatgggtgcagaagataacttttggactagtggcgcaactggaccttgtggaccttgctctgaaatttattatgatttctatcctgagagaggatcatcagatgtgttgtttgcaggatttgggcgatgatagccgattcattgaattctataatcttgtctttatgcaatataacaaaaaagacgatggatctctagaaccgttgaaacaaatgaacattgatacaggaatgggccttgagcgtatggcacgcattcttcaaaaggttccaaacaactatgagacagacttgattttcccaattatagaaaaggcagctagcatggcgatggtgtcctatgcaaaagctgatgatgccacaaagacaaatctcaagataattggagatcacatgagagcagttgtttatctcatatcagatggggtaattccctcaaatatcgggagaggatatgttgttcgaaggctaataagaagagtagttcggatgggtagattgataggaataagaggtgacgggcatggaaactctgaaggtgcatttttaccttcactagctgaggtagtgatcagccttagcactgagatagattcagatgttgaatcacgacggagatcgatccttggagaacttcaaagggaagagatgcgatttgttcagactttggaaagaggagaaaagttattagctgaacttctggatgaagctttattaaatgctggtaataatggaaacaagccttccttatctggaaaaaatgttttccttttgtacgatacatatggtttcccagtagagattacagctgaaatagccagtgaacaaggcgttactgttgatattgagggatttgatattgaaatggaaaaccagaggaaacaatctcaagctgctcataatgtagtcagactttctgtaggaaatgagaccgagatagtaaagaacatcccggatactgaatttttgggatatgattctctctctgcttctgctgtcattaaaggtctcctagttaatggaaacccagttaatgaagtttctcaaggttctgaagtagaaatattattagaccggacaccgttctatgctgaatcgggtggtcaagttggagataatggtttcttatatgtgaatggaggggaagatagaagacaaacaacagttatagaaatcaatgacgtccaaaagtctctgggaaatatatttgtgcacaaaggcatgattaagcaggggtctgtagaggttggcaaggaagtagatgcttctgttgatgcaaaattgaggcagggggctaaggctcatcacactgcaacacatctactacaatctgctcttaaaagcgtagttggttcagaaacttcacaggctggttcccttgtggcgtttgaccatctccgatttgacttcaatttccatcgcccactttctgaagaggaattaacaacaattgaagcacttataaaccaatggattggcaatgcagcacatgttgagacaaaagtcatggctttgcaagatgcaaaaaatgctggtgcgattgcaatgtttggagaaaaatacggtgaacagagtcgtagaggttcccgggatctcattggaactctgtggtgggactcacgtcagtaatactgctgagattcgtggtttcaagataatttcagaacaaggaatagcttctgggatcagaaggatagaagcagttgcaggtgacgcttttgttgactatgtgtgtgctcgggacaattacatgcggcgcttatgcttatcccttaaggttaaggctgaagatgtgaacagtagagtagaaacaattcttgaagagctaagagcaaccagaaacgtagcatcatctctacgcagcaaaattgcagtgctaaaagcagcttctcttgcaagtagagctacaactgtggagccccagaatgtcaggattgtggtcgagaacatgggtgatgtcgacgcagatgggctgaaaagcgccgcggagtatctcatagataccctcaaagaccctgctgcggtgattttaggatcaagcccaggggatggtaaagtcagcctggttgctgccttcagccctgcaatcgtcgaaatggggctgcaggccgggaagttcgtgagtggcatagccaaactctgcggcggaggcggtggaggcaagcccaatttcgcccaagctggggggcggaagccggagaacttgcccgacgcccttgagaaagcccgagctgaaattgtggcacgggtatcaggttcgagctgattctccgctgcctcacacctgatactggaagtatagggataggattcatatgaaatgtatatgtaattgtcattggcattctaagcgaaaacacttgtatttctccctaccttgccgtgtacgctttctgcagatgacggagcaaattttgtagcttgtaattgtaactagtggccgaacagaacggggaaaagatcaaatcttcacacagcaaaactactgctcatgtttaatctaatcttaaaaacataagaaattatttgtcacatgatcaactaatagtctaatacctagactagaccaaatacatctgatcaagtcagccagccacgtgcgtccaagcaaagattgagcacgtcctagacattcaactctgatttcagtcattttaactagtgaaattgctagatttagtgggacctaactgtgtccatagctagttaatccgagaggactttaagcaaaacagagaactgat

SEQ ID NO: 79065 - DNA, 3482 bp, Zea Mays
cgctagcagaggcgctgagctgagctctcagccatggaagtggtcgatctctcccccacgtcccgccccctctcaccgctcctctccaccgcacccgcccgccgcctccgcctcctccctccccgctgcgtcgtcggcctgcgcgcctctccccggacccgaggactcggctgcgttggaggtagtctcagcagaaggcattctttttgtaagaacggattcttcgcaacaagcagttcgtcagcctcagtagaacccgctacccaggaattgggaacagcggatgcagtggagtggagtggggatgccatacgtcggcgtttccttgaattttatgcagcccgtggccacaagatccttccgagctcgtcgcttgtgcctggcgacccaactgtgttccttaccatagcgggaatgcttcagttcaagcctatattcctcggcaaggaacctaggcgtgtgccacgcgccactacctctcagaagtgcatacggacaaacgacattgaaaacgtgggtcgcactgctcgacatcagaccttctttgaaatgcttgggaatttcagttttggtgattacttcaagaaggaagcaaccacatgggcatgggagctggcaaccaaggagtatggattgcctgcagaaaggttgtggattagtgtttttgaagatgacaatgaagcattcaacatctggcacaatgaggttggtgtgccaaaggagcggatacagaggatgggtgcagaagataacttttggactagtggcgcaactggaccttgtggaccttgctctgaaatttattatgatttctatcctgagagaggatcatcagatgtgttgtttgcaggatttgggcgatgatagccgattcattgaattctataatcttgtctttatgcaatataacaaaaaagacgatggatctctagaaccgttgaaacaaatgaacattgatacaggaatgggccttgagcgtatggcacgcattcttcaaaaggttccaaacaactatgagacagacttgattttcccaattatagaaaaggcagctagcatggcgatggtgtcctatgcaaaagctgatgatgccacaaagacaaatctcaagataattggagatcacatgagagcagttgtttatctcatatcagatggggtaattccctcaaatatcgggagaggatatgttgttcgaaggctaataagaagagtagttcggatgggtagattgataggaataagaggtgacgggcatggaaactctgaaggtgcatttttaccttcactagctgaggtagtgatcagccttagcactgagatagattcagatgttgaatcacgacggagatcgatccttggagaacttcaaagggaagagatgcgatttgttcagactttggaaagaggagaaaagttattagctgaacttctggatgaagctttattaaatgctggtaataatggaaacaagccttccttatctggaaaaaatgttttccttttgtacgatacatatggtttcccagtagagattacagctgaaatagccagtgaacaaggcgttactgttgatattgagggatttgatattgaaatggaaaaccagaggaaacaatctcaagctgctcataatgtagtcagactttctgtaggaaatgagaccgagatagtaaagaacatcccggatactgaatttttgggatatgattctctctctgcttctgctgtcattaaaggtctcctagttaatggaaacccagttaatgaagtttctcaaggttctgaagtagaaatattattagaccggacaccgttctatgctgaatcgggtggtcaagttggagataatggtttcttatatgtgaatggaggggaagatagaagacaaacaacagttatagaaatcaatgacgtccaaaagtctctgggaaatatatttgtgcacaaaggcatgattaagcaggggtctgtagaggttggcaaggaagtagatgcttctgttgatgcaaaattgaggcagggggctaaggctcatcacactgcaacacatctactacaatctgctcttaaaagcgtagttggttcagaaacttcacaggctggttcccttgtggcgtttgaccatctccgatttgacttcaatttccatcgcccactttctgaagaggaattaacaacaattgaagcacttataaaccaatggattggcaatgcagcacatgttgagacaaaagtcatggctttgcaagatgcaaaaaatgctggtgcgattgcaatgtttggagaaaaatacggtgaacaggtcagagtcgtagaggttcccgggatctcattggaactctgtggtgggactcacgtcagtaatactgctgagattcgtggtttcaagataatttcagaacaaggaatagcttctgggatcagaaggatagaagcagttgcaggtgacgcttttgttgactatgtgtgtgctcgggacaattacatgcggcgcttatgcttatcccttaaggttaaggctgaagatgtgaacagtagagtagaaacaattcttgaagagctaagagcaaccagaaacgtagcatcatctctacgcagcaaaattgcagtgctaaaagcagcttctcttgcaagtagagctacaactgtggagccccagaatgtcaggattgtggtcgagaacatgggtgatgtcgacgcagatgggctgaaaagcgccgcggagtatctcatagataccctcaaagaccctgctgcggtgattttaggatcaagcccaggggatggtaaagtcagcctggttgctgccttcagccctgcaatcgtcgaaatggggctgcaggccgggaagttcgtgagtggcatagccaaactctgcggcggaggcggtggaggcaagcccaatttcgcccaagctggggggcggaagccggagaacttgcccgacgcccttgagaaagcccgagctgaaattgtggcacgggtatcaggttcgagctgattctccgctgcctcacacctgatactggaagtatagggataggattcatatgaaatgtatatgtaattgtcattggcattctaagcgaaaacacttgtatttctccctaccttgccgtgtacgctttctgcagatgacggagcaaattttgtagcttgtaattgtaactagtggccgaacagaacggggaaaagatcaaatcttcacacagcaaaactactgctcatgtttaatctaatcttaaaaacataagaaattatttgtcacatgatcaactaatagtctaatacctagactagaccaaatacatctgatcaagtcagccagccacgtgcgtccaagcaaagattgagcacgtcctagacattcaactctgatttcagtcattttaactagtgaaattgctagatttagtgggacctaactgtgtccatagctagttaatccgagaggactttaagcaaaacagagaactgat

SEQ ID NO: 79066 - DNA, 3390 bp, Zea Mays
gctagcagaggcgctgagctgagctctcagccatggaagtggtcgatctctcccccacgtcccgccccctctcaccgctcctctccaccgcacccgcccgccgcctccgcctcctccctccccgctgcgtcgtcggcctgcgcgcctctccccggacccgagcctcagtagaacccgctacccaggaattgggaacagcggatgcagtggagtggagtggggatgccatacgtcggcgtttccttgaattttatgcagcccgtggccacaagatccttccgagctcgtcgcttgtgcctggcgacccaactgtgttccttaccatagcgggaatgcttcagttcaagcctatattcctcggcaaggaacctaggcgtgtgccacgcgccactacctctcagaagtgcatacggacaaacgacattgaaaacgtgggtcgcactgctcgacatcagaccttctttgaaatgcttgggaatttcagttttggtgattacttcaagaaggaagcaaccacatgggcatgggagctggcaaccaaggagtatggattgcctgcagaaaggttgtggattagtgtttttgaagatgacaatgaagcattcaacatctggcacaatgaggttggtgtgccaaaggagcggatacagaggatgggtgcagaagataacttttggactagtggcgcaactggaccttgtggaccttgctctgaaatttattatgatttctatcctgagagaggatcatcagatgtggatttgggcgatgatagccgattcattgaattctataatcttgtctttatgcaatataacaaaaaagacgatggatctctagaaccgttgaaacaaatgaacattgatacaggaatgggccttgagcgtatggcacgcattcttcaaaaggttccaaacaactatgagacagacttgattttcccaattatagaaaaggcagctagcatggcgatggtgtcctatgcaaaagctgatgatgccacaaagacaaatctcaagataattggagatcacatgagagcagttgtttatctcatatcagatggggtaattccctcaaatatcgggagaggatatgttgttcgaaggctaataagaagagtagttcggatgggtagattgataggaataagaggtgacgggcatggaaactctgaaggtgcatttttaccttcactagctgaggtagtgatcagccttagcactgagatagattcagatgttgaatcacgacggagatcgatccttggagaacttcaaagggaagagatgcgatttgttcagactttggaaagaggagaaaagttattagctgaacttctggatgaagctttattaaatgctggtaataatggaaacaagccttccttatctggaaaaaatgttttccttttgtacgatacatatggtttcccagtagagattacagctgaaatagccagtgaacaaggcgttactgttgatattgagggatttgatattgaaatggaaaaccagaggaaacaatctcaagctgctcataatgtagtcagactttctgtaggaaatgagaccgagatagtaaagaacatcccggatactgaatttttgggatatgattctctctctgcttctgctgtcattaaaggtctcctagttaatggaaacccagttaatgaagtttctcaaggttctgaagtagaaatattattagaccggacaccgttctatgctgaatcgggtggtcaagttggagataatggtttcttatatgtgaatggaggggaagatagaagacaaacaacagttatagaaatcaatgacgtccaaaagtctctgggaaatatatttgtgcacaaaggcatgattaagcaggggtctgtagaggttggcaaggaagtagatgcttctgttgatgcaaaattgaggcagggggctaaggctcatcacactgcaacacatctactacaatctgctcttaaaagcgtagttggttcagaaacttcacaggctggttcccttgtggcgtttgaccatctccgatttgacttcaatttccatcgcccactttctgaagaggaattaacaacaattgaagcacttataaaccaatggattggcaatgcagcacatgttgagacaaaagtcatggctttgcaagatgcaaaaaatgctggtgcgattgcaatgtttggagaaaaatacggtgaacaggtcagagtcgtagaggttcccgggatctcattggaactctgtggtgggactcacgtcagtaatactgctgagattcgtggtttcaagataatttcagaacaaggaatagcttctgggatcagaaggatagaagcagttgcaggtgacgcttttgttgactatgtgtgtgctcgggacaattacatgcggcgcttatgcttatcccttaaggttaaggctgaagatgtgaacagtagagtagaaacaattcttgaagagctaagagcaaccagaaacgtagcatcatctctacgcagcaaaattgcagtgctaaaagcagcttctcttgcaagtagagctacaactgtggagccccagaatgtcaggattgtggtcgagaacatgggtgatgtcgacgcagatgggctgaaaagcgccgcggagtatctcatagataccctcaaagaccctgctgcggtgattttaggatcaagcccaggggatggtaaagtcagcctggttgctgccttcagccctgcaatcgtcgaaatggggctgcaggccgggaagttcgtgagtggcatagccaaactctgcggcggaggcggtggaggcaagcccaatttcgcccaagctggggggcggaagccggagaacttgcccgacgcccttgagaaagcccgagctgaaattgtggcacgggtatcaggttcgagctgattctccgctgcctcacacctgatactggaagtatagggataggattcatatgaaatgtatatgtaattgtcattggcattctaagcgaaaacacttgtatttctccctaccttgccgtgtacgctttctgcagatgacggagcaaattttgtagcttgtaattgtaactagtggccgaacagaacggggaaaagatcaaatcttcacacagcaaaactactgctcatgtttaatctaatcttaaaaacataagaaattatttgtcacatgatcaactaatagtctaatacctagactagaccaaatacatctgatcaagtcagccagccacgtgcgtccaagcaaagattgagcacgtcctagacattcaactctgatttcagtcattttaactagtgaaattgctagatttagtgggacctaactgtgtccatagctagttaatccgagaggactttaagcaaaacagagaactgat

SEQ ID NO: 79067 - DNA, 3376 bp, Zea Mays
gctgagctctcagccatggaagtggtcgatctctcccccacgtcccgccccctctcaccgctcctctccaccgcacccgcccgccgcctccgcctcctccctccccgctgcgtcgtcggcctgcgcgcctctccccggacccgagcctcagtagaacccgctacccaggaattgggaacagcggatgcagtggagtggagtggggatgccatacgtcggcgtttccttgaattttatgcagcccgtggccacaagatccttccgagctcgtcgcttgtgcctggcgacccaactgtgttccttaccatagcgggaatgcttcagttcaagcctatattcctcggcaaggaacctaggcgtgtgccacgcgccactacctctcagaagtgcatacggacaaacgacattgaaaacgtgggtcgcactgctcgacatcagaccttctttgaaatgcttgggaatttcagttttggtgattacttcaagaaggaagcaaccacatgggcatgggagctggcaaccaaggagtatggattgcctgcagaaaggttgtggattagtgtttttgaagatgacaatgaagcattcaacatctggcacaatgaggttggtgtgccaaaggagcggatacagaggatgggtgcagaagataacttttggactagtggcgcaactggaccttgtggaccttgctctgaaatttattatgatttctatcctgagagaggatcatcagatgtggtagatttgggcgatgatagccgattcattgaattctataatcttgtctttatgcaatataacaaaaaagacgatggatctctagaaccgttgaaacaaatgaacattgatacaggaatgggccttgagcgtatggcacgcattcttcaaaaggttccaaacaactatgagacagacttgattttcccaattatagaaaaggcagctagcatggcgatggtgtcctatgcaaaagctgatgatgccacaaagacaaatctcaagataattggagatcacatgagagcagttgtttatctcatatcagatggggtaattccctcaaatatcgggagaggatatgttgttcgaaggctaataagaagagtagttcggatgggtagattgataggaataagaggtgacgggcatggaaactctgaaggtgcatttttaccttcactagctgaggtagtgatcagccttagcactgagatagattcagatgttgaatcacgacggagatcgatccttggagaacttcaaagggaagagatgcgatttgttcagactttggaaagaggagaaaagttattagctgaacttctggatgaagctttattaaatgctggtaataatggaaacaagccttccttatctggaaaaaatgttttccttttgtacgatacatatggtttcccagtagagattacagctgaaatagccagtgaacaaggcgttactgttgatattgagggatttgatattgaaatggaaaaccagaggaaacaatctcaagctgctcataatgtagtcagactttctgtaggaaatgagaccgagatagtaaagaacatcccggatactgaatttttgggatatgattctctctctgcttctgctgtcattaaaggtctcctagttaatggaaacccagttaatgaagtttctcaaggttctgaagtagaaatattattagaccggacaccgttctatgctgaatcgggtggtcaagttggagataatggtttcttatatgtgaatggaggggaagatagaagacaaacaacagttatagaaatcaatgacgtccaaaagtctctgggaaatatatttgtgcacaaaggcatgattaagcaggggtctgtagaggttggcaaggaagtagatgcttctgttgatgcaaaattgaggcagggggctaaggctcatcacactgcaacacatctactacaatctgctcttaaaagcgtagttggttcagaaacttcacaggctggttcccttgtggcgtttgaccatctccgatttgacttcaatttccatcgcccactttctgaagaggaattaacaacaattgaagcacttataaaccaatggattggcaatgcagcacatgttgagacaaaagtcatggctttgcaagatgcaaaaaatgctggtgcgattgcaatgtttggagaaaaatacggtgaacaggtcagagtcgtagaggttcccgggatctcattggaactctgtggtgggactcacgtcagtaatactgctgagattcgtggtttcaagataatttcagaacaaggaatagcttctgggatcagaaggatagaagcagttgcaggtgacgcttttgttgactatgtgtgtgctcgggacaattacatgcggcgcttatgcttatcccttaaggttaaggctgaagatgtgaacagtagagtagaaacaattcttgaagagctaagagcaaccagaaacgtagcatcatctctacgcagcaaaattgcagtgctaaaagcagcttctcttgcaagtagagctacaactgtggagccccagaatgtcaggattgtggtcgagaacatgggtgatgtcgacgcagatgggctgaaaagcgccgcggagtatctcatagataccctcaaagaccctgctgcggtgattttaggatcaagcccaggggatggtaaagtcagcctggttgctgccttcagccctgcaatcgtcgaaatggggctgcaggccgggaagttcgtgagtggcatagccaaactctgcggcggaggcggtggaggcaagcccaatttcgcccaagctggggggcggaagccggagaacttgcccgacgcccttgagaaagcccgagctgaaattgtggcacgggtatcaggttcgagctgattctccgctgcctcacacctgatactggaagtatagggataggattcatatgaaatgtatatgtaattgtcattggcattctaagcgaaaacacttgtatttctccctaccttgccgtgtacgctttctgcagatgacggagcaaattttgtagcttgtaattgtaactagtggccgaacagaacggggaaaagatcaaatcttcacacagcaaaactactgctcatgtttaatctaatcttaaaaacataagaaattatttgtcacatgatcaactaatagtctaatacctagactagaccaaatacatctgatcaagtcagccagccacgtgcgtccaagcaaagattgagcacgtcctagacattcaactctgatttcagtcattttaactagtgaaattgctagatttagtgggacctaactgtgtccatagctagttaatccgagaggactttaagcaaaacagagaactgat

SEQ ID NO: 79068 - DNA, 3458 bp, Zea Mays
gctgagctctcagccatggaagtggtcgatctctcccccacgtcccgccccctctcaccgctcctctccaccgcacccgcccgccgcctccgcctcctccctccccgctgcgtcgtcggcctgcgcgcctctccccggacccgaggactcggctgcgttggaggtagtctcagcagaaggcattctttttgtaagaacggattcttcgcaacaagcagttcgtcagcctcagtagaacccgctacccaggaattgggaacagcggatgcagtggagtggagtggggatgccatacgtcggcgtttccttgaattttatgcagcccgtggccacaagatccttccgagctcgtcgcttgtgcctggcgacccaactgtgttccttaccatagcgggaatgcttcagttcaagcctatattcctcggcaaggaacctaggcgtgtgccacgcgccactacctctcagaagtgcatacggacaaacgacattgaaaacgtgggtcgcactgctcgacatcagaccttctttgaaatgcttgggaatttcagttttggtgattacttcaagaaggaagcaaccacatgggcatgggagctggcaaccaaggagtatggattgcctgcagaaaggttgtggattagtgtttttgaagatgacaatgaagcattcaacatctggcacaatgaggttggtgtgccaaaggagcggatacagaggatgggtgcagaagataacttttggactagtggcgcaactggaccttgtggaccttgctctgaaatttattatgatttctatcctgagagaggatcatcagatgtgttgtttgcaggatttgggcgatgatagccgattcattgaattctataatcttgtctttatgcaatataacaaaaaagacgatggatctctagaaccgttgaaacaaatgaacattgatacaggaatgggccttgagcgtatggcacgcattcttcaaaaggttccaaacaactatgagacagacttgattttcccaattatagaaaaggcagctagcatggcgatggtgtcctatgcaaaagctgatgatgccacaaagacaaatctcaagataattggagatcacatgagagcagttgtttatctcatatcagatggggtaattccctcaaatatcgggagaggatatgttgttcgaaggctaataagaagagtagttcggatgggtagattgataggaataagaggtgacgggcatggaaactctgaaggtgcatttttaccttcactagctgaggtagtgatcagccttagcactgagatagattcagatgttgaatcacgacggagatcgatccttggagaacttcaaagggaagagatgcgatttgttcagactttggaaagaggagaaaagttattagctgaacttctggatgaagctttattaaatgctggtaataatggaaacaagccttccttatctggaaaaaatgttttccttttgtacgatacatatggtttcccagtagagattacagctgaaatagccagtgaacaaggcgttactgttgatattgagggatttgatattgaaatggaaaaccagaggaaacaatctcaagctgctcataatgtagtcagactttctgtaggaaatgagaccgagatagtaaagaacatcccggatactgaatttttgggatatgattctctctctgcttctgctgtcattaaaggtctcctagttaatggaaacccagttaatgaagtttctcaaggttctgaagtagaaatattattagaccggacaccgttctatgctgaatcgggtggtcaagttggagataatggtttcttatatgtgaatggaggggaagatagaagacaaacaacagttatagaaatcaatgacgtccaaaagtctctgggaaatatatttgtgcacaaaggcatgattaagcaggggtctgtagaggttggcaaggaagtagatgcttctgttgatgcaaaattgaggcagggggctaaggctcatcacactgcaacacatctactacaatctgctcttaaaagcgtagttggttcagaaacttcacaggctggttcccttgtggcgtttgaccatctccgatttgacttcaatttccatcgcccactttctgaagaggaattaacaacaattgaagcacttataaaccaatggattggcaatgcagcacatgttgagacaaaagtcatggctttgcaagatgcaaaaaatgctggtgcgattgcaatgtttggagaaaaatacggtgaacaggtcagagtcgtagaggttcccgggatctcattggaactctgtggtgggactcacgtcagtaatactgctgagattcgtggtttcaagataatttcagaacaaggaatagcttctgggatcagaaggatagaagcagttgcaggtgacgcttttgttgactatgtgtgtgctcgggacaattacatgcggcgcttatgcttatcccttaaggctgaagatgtgaacagtagagtagaaacaattcttgaagagctaagagcaaccagaaacgtagcatcatctctacgcagcaaaattgcagtgctaaaagcagcttctcttgcaagtagagctacaactgtggagccccagaatgtcaggattgtggtcgagaacatgggtgatgtcgacgcagatgggctgaaaagcgccgcggagtatctcatagataccctcaaagaccctgctgcggtgattttaggatcaagcccaggggatggtaaagtcagcctggttgctgccttcagccctgcaatcgtcgaaatggggctgcaggccgggaagttcgtgagtggcatagccaaactctgcggcggaggcggtggaggcaagcccaatttcgcccaagctggggggcggaagccggagaacttgcccgacgcccttgagaaagcccgagctgaaattgtggcacgggtatcaggttcgagctgattctccgctgcctcacacctgatactggaagtatagggataggattcatatgaaatgtatatgtaattgtcattggcattctaagcgaaaacacttgtatttctccctaccttgccgtgtacgctttctgcagatgacggagcaaattttgtagcttgtaattgtaactagtggccgaacagaacggggaaaagatcaaatcttcacacagcaaaactactgctcatgtttaatctaatcttaaaaacataagaaattatttgtcacatgatcaactaatagtctaatacctagactagaccaaatacatctgatcaagtcagccagccacgtgcgtccaagcaaagattgagcacgtcctagacattcaactctgatttcagtcattttaactagtgaaattgctagatttagtgggacctaactgtgtccatagctagttaatccgagaggactttaagcaaaacagagaactgat

SEQ ID NO: 79069 - DNA, 3511 bp, Zea Mays
gctgagctctcagccatggaagtggtcgatctctcccccacgtcccgccccctctcaccgctcctctccaccgcacccgcccgccgcctccgcctcctccctccccgctgcgtcgtcggcctgcgcgcctctccccggacccgaggactcggctgcgttggaggtagtctcagcagaaggcattctttttcctcagtagaacccgctacccaggaattgggaacagcggatgcagtggagtggagtggggatgccatacgtcggcgtttccttgaattttatgcagcccgtggccacaagatccttccgagctcgtcgcttgtgcctggcgacccaactgtgttccttaccatagcgggaatgcttcagttcaagcctatattcctcggcaaggaacctaggcgtgtgccacgcgccactacctctcagaagtgcatacggacaaacgacattgaaaacgtgggtcgcactgctcgacatcagaccttctttgaaatgcttgggaatttcagttttggtgattacttcaagaaggaagcaaccacatgggcatgggagctggcaaccaaggagtatggattgcctgcagaaaggttgtggattagtgtttttgaagatgacaatgaagcattcaacatctggcacaatgaggttggtgtgccaaaggagcggatacagaggatgggtgcagaagataacttttggactagtggcgcaactggaccttgtggaccttgctctgaaatttattatgatttctatcctgagagaggatcatcagatgtgttgtttgcaggatttgggcgatgatagccgattcattgaattctataatcttgtctttatgcaatataacaaaaaagacgatggatctctagaaccgttgaaacaaatgaacattgatacaggaatgggccttgagcgtatggcacgcattcttcaaaaggttccaaacaactatgagacagacttgattttcccaattatagaaaaggcagctagcatggcgatggtgtcctatgcaaaagctgatgatgccacaaagacaaatctcaaggtggtttattcaagatgcagtgtttgctatatgacaaataagggggacacataaaatgtctgattgcatttctgttttttcagataattggagatcacatgagagcagttgtttatctcatatcagatggggtaattccctcaaatatcgggagaggatatgttgttcgaaggctaataagaagagtagttcggatgggtagattgataggaataagaggtgacgggcatggaaactctgaaggtgcatttttaccttcactagctgaggtagtgatcagccttagcactgagatagattcagatgttgaatcacgacggagatcgatccttggagaacttcaaagggaagagatgcgatttgttcagactttggaaagaggagaaaagttattagctgaacttctggatgaagctttattaaatgctggtaataatggaaacaagccttccttatctggaaaaaatgttttccttttgtacgatacatatggtttcccagtagagattacagctgaaatagccagtgaacaaggcgttactgttgatattgagggatttgatattgaaatggaaaaccagaggaaacaatctcaagctgctcataatgtagtcagactttctgtaggaaatgagaccgagatagtaaagaacatcccggatactgaatttttgggatatgattctctctctgcttctgctgtcattaaaggtctcctagttaatggaaacccagttaatgaagtttctcaaggttctgaagtagaaatattattagaccggacaccgttctatgctgaatcgggtggtcaagttggagataatggtttcttatatgtgaatggaggggaagatagaagacaaacaacagttatagaaatcaatgacgtccaaaagtctctgggaaatatatttgtgcacaaaggcatgattaagcaggggtctgtagaggttggcaaggaagtagatgcttctgttgatgcaaaattgaggcagggggctaaggctcatcacactgcaacacatctactacaatctgctcttaaaagcgtagttggttcagaaacttcacaggctggttcccttgtggcgtttgaccatctccgatttgacttcaatttccatcgcccactttctgaagaggaattaacaacaattgaagcacttataaaccaatggattggcaatgcagcacatgttgagacaaaagtcatggctttgcaagatgcaaaaaatgctggtgcgattgcaatgtttggagaaaaatacggtgaacaggtcagagtcgtagaggttcccgggatctcattggaactctgtggtgggactcacgtcagtaatactgctgagattcgtggtttcaagataatttcagaacaaggaatagcttctgggatcagaaggatagaagcagttgcaggtgacgcttttgttgactatgtgtgtgctcgggacaattacatgcggcgcttatgcttatcccttaaggttaaggctgaagatgtgaacagtagagtagaaacaattcttgaagagctaagagcaaccagaaacgtagcatcatctctacgcagcaaaattgcagtgctaaaagcagcttctcttgcaagtagagctacaactgtggagccccagaatgtcaggattgtggtcgagaacatgggtgatgtcgacgcagatgggctgaaaagcgccgcggagtatctcatagataccctcaaagaccctgctgcggtgattttaggatcaagcccaggggatggtaaagtcagcctggttgctgccttcagccctgcaatcgtcgaaatggggctgcaggccgggaagttcgtgagtggcatagccaaactctgcggcggaggcggtggaggcaagcccaatttcgcccaagctggggggcggaagccggagaacttgcccgacgcccttgagaaagcccgagctgaaattgtggcacgggtatcaggttcgagctgattctccgctgcctcacacctgatactggaagtatagggataggattcatatgaaatgtatatgtaattgtcattggcattctaagcgaaaacacttgtatttctccctaccttgccgtgtacgctttctgcagatgacggagcaaattttgtagcttgtaattgtaactagtggccgaacagaacggggaaaagatcaaatcttcacacagcaaaactactgctcatgtttaatctaatcttaaaaacataagaaattatttgtcacatgatcaactaatagtctaatacctagactagaccaaatacatctgatcaagtcagccagccacgtgcgtccaagcaaagattgagcacgtcctagacattcaactctgatttcagtcattttaactagtgaaattgctagatttagtgggacctaactgtgtccatagctagttaatccgagaggactttaagcaaaacagagaactgat

SEQ ID NO: 79070 - DNA, 4294 bp, Zea Mays
gctgagctctcagccatggaagtggtcgatctctcccccacgtcccgccccctctcaccgctcctctccaccgcacccgcccgccgcctccgcctcctccctccccgctgcgtcgtcggcctgcgcgcctctccccggacccgaggactcggctgcgttggaggtagtctcagcagaaggcattctttttgtaagaacggattcttcgcaacaagcagttcgtcagcctcagtagaacccgctacccaggaattgggaacagcggatgcagtggagtggagtggggatgccatacgtcggcgtttccttgaattttatgcagcccgtggccacaagatccttccgagctcgtcgcttgtgcctggcgacccaactgtgttccttaccatagcgggaatgcttcagttcaagcctatattcctcggcaaggtgcgacatgcattgtgttagtgaaggcttgtgtgcttgtgaaatgcggcaccacatgagacctaagggcatgtacaacctgagacttggttcggtttttaaaatacaagagacaactaagagactgcataatacaactgagactctgggatactaaatgtagctaagagacaacatgtacaaagagtcatgaagagccgttctcttgtatttttttcacttagccacttagaaacctcttaagagaccccatatttttttcacttatgatttatgaactccgctttgcatgtggtcaataaaattggaaatgttgcacaaaatggctaagtatcaatgcgatcgcctacagggacatctgatttttggggttgggtacacgaggacgagggcttgtttgggaattttctggaatatgaactaataatccttagacatcaaaatatgtcactgacccatctactcctggttcaaagttgccccacttatttttttctaggaaatggttaattgataactatctattcttgcctttcttttatgacacgtacaagttatttgcaaaaatttaaaagttgaaacttcacggttgcaagtgcatttctaattatttatacacaatcagttactagaatcagtagaataagccattgagcatgatcctatattttcttttgtacatctgtaacgataataatataccacctatgatcaatttcaatgcagtcgtgacattcagactcgaactaagattctgacctcgactggaacaggcactgtttcctgtttcattttacttcattccaggtcttttgtgttgctacttacaggaacctaggcgtgtgccacgcgccactacctctcagaagtgcatacggacaaacgacattgaaaacgtgggtcgcactgctcgacatcagaccttctttgaaatgcttgggaatttcagttttggtgattacttcaagaaggaagcaaccacatgggcatgggagctggcaaccaaggagtatggattgcctgcagaaaggttgtggattagtgtttttgaagatgacaatgaagcattcaacatctggcacaatgaggttggtgtgccaaaggagcggatacagaggatgggtgcagaagataacttttggactagtggcgcaactggaccttgtggaccttgctctgaaatttattatgatttctatcctgagagaggatcatcagatgtgttgtttgcaggatttgggcgatgatagccgattcattgaattctataatcttgtctttatgcaatataacaaaaaagacgatggatctctagaaccgttgaaacaaatgaacattgatacaggaatgggccttgagcgtatggcacgcattcttcaaaaggttccaaacaactatgagacagacttgattttcccaattatagaaaaggcagctagcatggcgatggtgtcctatgcaaaagctgatgatgccacaaagacaaatctcaagataattggagatcacatgagagcagttgtttatctcatatcagatggggtaattccctcaaatatcgggagaggatatgttgttcgaaggctaataagaagagtagttcggatgggtagattgataggaataagaggtgacgggcatggaaactctgaaggtgcatttttaccttcactagctgaggtagtgatcagccttagcactgagatagattcagatgttgaatcacgacggagatcgatccttggagaacttcaaagggaagagatgcgatttgttcagactttggaaagaggagaaaagttattagctgaacttctggatgaagctttattaaatgctggtaataatggaaacaagccttccttatctggaaaaaatgttttccttttgtacgatacatatggtttcccagtagagattacagctgaaatagccagtgaacaaggcgttactgttgatattgagggatttgatattgaaatggaaaaccagaggaaacaatctcaagctgctcataatgtagtcagactttctgtaggaaatgagaccgagatagtaaagaacatcccggatactgaatttttgggatatgattctctctctgcttctgctgtcattaaaggtctcctagttaatggaaacccagttaatgaagtttctcaaggttctgaagtagaaatattattagaccggacaccgttctatgctgaatcgggtggtcaagttggagataatggtttcttatatgtgaatggaggggaagatagaagacaaacaacagttatagaaatcaatgacgtccaaaagtctctgggaaatatatttgtgcacaaaggcatgattaagcaggggtctgtagaggttggcaaggaagtagatgcttctgttgatgcaaaattgaggcagggggctaaggctcatcacactgcaacacatctactacaatctgctcttaaaagcgtagttggttcagaaacttcacaggctggttcccttgtggcgtttgaccatctccgatttgacttcaatttccatcgcccactttctgaagaggaattaacaacaattgaagcacttataaaccaatggattggcaatgcagcacatgttgagacaaaagtcatggctttgcaagatgcaaaaaatgctggtgcgattgcaatgtttggagaaaaatacggtgaacaggtcagagtcgtagaggttcccgggatctcattggaactctgtggtgggactcacgtcagtaatactgctgagattcgtggtttcaagataatttcagaacaaggaatagcttctgggatcagaaggatagaagcagttgcaggtgacgcttttgttgactatgtgtgtgctcgggacaattacatgcggcgcttatgcttatcccttaaggttaaggctgaagatgtgaacagtagagtagaaacaattcttgaagagctaagagcaaccagaaacgtagcatcatctctacgcagcaaaattgcagtgctaaaagcagcttctcttgcaagtagagctacaactgtggagccccagaatgtcaggattgtggtcgagaacatgggtgatgtcgacgcagatgggctgaaaagcgccgcggagtatctcatagataccctcaaagaccctgctgcggtgattttaggatcaagcccaggggatggtaaagtcagcctggttgctgccttcagccctgcaatcgtcgaaatggggctgcaggccgggaagttcgtgagtggcatagccaaactctgcggcggaggcggtggaggcaagcccaatttcgcccaagctggggggcggaagccggagaacttgcccgacgcccttgagaaagcccgagctgaaattgtggcacgggtatcaggttcgagctgattctccgctgcctcacacctgatactggaagtatagggataggattcatatgaaatgtatatgtaattgtcattggcattctaagcgaaaacacttgtatttctccctaccttgccgtgtacgctttctgcagatgacggagcaaattttgtagcttgtaattgtaactagtggccgaacagaacggggaaaagatcaaatcttcacacagcaaaactactgctcatgtttaatctaatcttaaaaacataagaaattatttgtcacatgatcaactaatagtctaatacctagactagaccaaatacatctgatcaagtcagccagccacgtgcgtccaagcaaagattgagcacgtcctagacattcaactctgatttcagtcattttaactagtgaaattgctagatttagtgggacctaactgtgtccatagctagttaatccgagaggactttaagcaaaacagagaactgat

SEQ ID NO: 79071 - DNA, 4210 bp, Zea Mays
gctgagctctcagccatggaagtggtcgatctctcccccacgtcccgccccctctcaccgctcctctccaccgcacccgcccgccgcctccgcctcctccctccccgctgcgtcgtcggcctgcgcgcctctccccggacccgaggactcggctgcgttggaggtagtctcagcagaaggcattctttttgtaagaacggattcttcgcaacaagcagttcgtcagcctcagtagaacccgctacccaggaattgggaacagcggatgcagtggagtggagtggggatgccatacgtcggcgtttccttgaattttatgcagcccgtggccacaagatccttccgagctcgtcgcttgtgcctggcgacccaactgtgttccttaccatagcgggaatgcttcagttcaagcctatattcctcggcaaggaacctaggcgtgtgccacgcgccactacctctcagaagtgcatacggacaaacgacattgaaaacgtgggtcgcactgctcgacatcagaccttctttgaaatgcttgggaatttcagttttggtgattacttcaagaaggaagcaaccacatgggcatgggagctggcaaccaaggagtatggattgcctgcagaaaggttgtggattagtgtttttgaagatgacaatgaagcattcaacatctggcacaatgaggttggtgtgccaaaggagcggatacagaggatgggtgcagaagataacttttggactagtggcgcaactggaccttgtggaccttgctctgaaatttattatgatttctatcctgagagaggatcatcagatgtggatttgggcgatgatagccgattcattgaattctataatcttgtctttatgcaatataacaaaaaagacgatggatctctagaaccgttgaaacaaatgaacattgatacaggaatgggccttgagcgtatggcacgcattcttcaaaagctggtgagccgcggccctgtgctcctgcggtggcttgccgaggtccagcgcgggcggcgagtccggcaactcggcgacgggcgcggagccgatgcgctcgggcggcggcgcaggcgtgaggagctgcacgacctcgacgttccagagcacccagtcctgtgtggtggtgcggtggggcacgtcgtgggtgacggagttcctctagggcgggagccccccgttggcgcggaggaagtggcccgccttggtgcggaggcgcgcctggaagctgtcccgcaggggctcccagtccacagatgcgttggccaggcgcggcgcagcgggcgccgtttgcgtcaccttccgccccgtcatccccagcaggaacggctccccagaggcggtgaggttccaaacaactatgagacagacttgattttcccaattatagaaaaggcagctagcatggcgatggtgtcctatgcaaaagctgatgatgccacaaagacaaatctcaagataattggagatcacatgagagcagttgtttatctcatatcagatggggtaattccctcaaatatcgggagaggatatgttgttcgaaggctaataagaagagtagttcggatgggtagattgataggaataagaggtgacgggcatggaaactctgaaggtgcatttttaccttcactagctgaggtagtgatcagccttagcactgagatagattcagatgttgaatcacgacggagatcgatccttggagaacttcaaagggaagagatgcgatttgttcagactttggaaagaggagaaaagttattagctgaacttctggatgaagctttattaaatgctggtaataatggaaacaagccttccttatctggaaaaaatgttttccttttgtacgatacatatggtttcccagtagagattacagctgaaatagccagtgaacaaggcgttactgttgatattgagggatttgatattgaaatggaaaaccagaggaaacaatctcaagctgctcataatgtagtcagactttctgtaggaaatgagaccgagatagtaaagaacatcccggatactgaatttttgggatatgattctctctctgcttctgctgtcattaaaggtctcctagttaatggaaacccagttaatgaagtttctcaaggttctgaagtagaaatattattagaccggacaccgttctatgctgaatcgggtggtcaagttggagataatggtttcttatatgtgaatggaggggaagatagaagacaaacaacagttatagaaatcaatgacgtccaaaagtctctgggaaatatatttgtgcacaaaggcatgattaagcaggggtctgtagaggttggcaaggaagtagatgcttctgttgatgcaaaattgaggcagggggctaaggctcatcacactgcaacacatctactacaatctgctcttaaaagcgtagttggttcagaaacttcacaggctggttcccttgtggcgtttgaccatctccgatttgacttcaatttccatcgcccactttctgaagaggaattaacaacaattgaagcacttataaaccaatggattggcaatgcagcacatgttgagacaaaagtcatggctttgcaagatgcaaaaaatgctggtgcgattgcaatgtttggagaaaaatacggtgaacaggtcagagtcgtagaggttcccgggatctcattggaactctgtggtgggactcacgtcagtaatactgctgagattcgtggtttcaagataatttcagaacaaggaatagcttctgggatcagaaggatagaagcagttgcaggtgacgcttttgttgactatgtgtgtgctcgggacaattacatgcggcgcttatgcttatcccttaaggtatgtggtatgcatgctgtaaaaagcttgtatgttaccttgtgatttatcgtgcatttattggtgagtttggcaattggtcatgcatctgatggtatttgtgatctgttcaaatggactttgggttttctgtttcaagtgtttctaacccattgtacatgaaacctgcatgtctattcttccgattataggcacatttggtaaccgactccatgtcggttacaagtttacccacgaatcactggatttgagacatgttggttgatggcaatagccacccacaccacatttgatccaaattatgtttctccatttacagtttttctgttgatgttttaaccacatgaggtgtgacatatgtattttcaggttaaggctgaagatgtgaacagtagagtagaaacaattcttgaagagctaagagcaaccagaaacgtagcatcatctctacgcagcaaaattgcagtgctaaaagcagcttctcttgcaagtagagctacaactgtggagccccagaatgtcaggattgtggtcgagaacatgggtgatgtcgacgcagatgggctgaaaagcgccgcggagtatctcatagataccctcaaagaccctgctgcggtgattttaggatcaagcccaggggatggtaaagtcagcctggttgctgccttcagccctgcaatcgtcgaaatggggctgcaggccgggaagttcgtgagtggcatagccaaactctgcggcggaggcggtggaggcaagcccaatttcgcccaagctggggggcggaagccggagaacttgcccgacgcccttgagaaagcccgagctgaaattgtggcacgggtatcaggttcgagctgattctccgctgcctcacacctgatactggaagtatagggataggattcatatgaaatgtatatgtaattgtcattggcattctaagcgaaaacacttgtatttctccctaccttgccgtgtacgctttctgcagatgacggagcaaattttgtagcttgtaattgtaactagtggccgaacagaacggggaaaagatcaaatcttcacacagcaaaactactgctcatgtttaatctaatcttaaaaacataagaaattatttgtcacatgatcaactaatagtctaatacctagactagaccaaatacatctgatcaagtcagccagccacgtgcgtccaagcaaagattgagcacgtcctagacattcaactctgatttcagtcattttaactagtgaaattgctagatttagtgggacctaactgtgtccatagctagttaatccgagaggactttaagcaaaacagagaactgat

SEQ ID NO: 79072 - DNA, 2879 bp, Zea Mays
ctttattctccatggagcatgacctccatattggtatggattgcctgcagaaaggttgtggattagtgtttttgaagatgacaatgaagcattcaacatctggcacaatgaggttggtgtgccaaaggagcggatacagaggatgggtgcagaagataacttttggactagtggcgcaactggaccttgtggaccttgctctgaaatttattatgatttctatcctgagagaggatcatcagatgtggatttgggcgatgatagccgattcattgaattctataatcttgtctttatgcaatataacaaaaaagacgatggatctctagaaccgttgaaacaaatgaacattgatacaggaatgggccttgagcgtatggcacgcattcttcaaaaggttccaaacaactatgagacagacttgattttcccaattatagaaaaggcagctagcatggcgatggtgtcctatgcaaaagctgatgatgccacaaagacaaatctcaagataattggagatcacatgagagcagttgtttatctcatatcagatggggtaattccctcaaatatcgggagaggatatgttgttcgaaggctaataagaagagtagttcggatgggtagattgataggaataagaggtgacgggcatggaaactctgaaggtgcatttttaccttcactagctgaggtagtgatcagccttagcactgagatagattcagatgttgaatcacgacggagatcgatccttggagaacttcaaagggaagagatgcgatttgttcagactttggaaagaggagaaaagttattagctgaacttctggatgaagctttattaaatgctggtaataatggaaacaagccttccttatctggaaaaaatgttttccttttgtacgatacatatggtttcccagtagagattacagctgaaatagccagtgaacaaggcgttactgttgatattgagggatttgatattgaaatggaaaaccagaggaaacaatctcaagctgctcataatgtagtcagactttctgtaggaaatgagaccgagatagtaaagaacatcccggatactgaatttttgggatatgattctctctctgcttctgctgtcattaaaggtctcctagttaatggaaacccagttaatgaagtttctcaaggttctgaagtagaaatattattagaccggacaccgttctatgctgaatcgggtggtcaagttggagataatggtttcttatatgtgaatggaggggaagatagaagacaaacaacagttatagaaatcaatgacgtccaaaagtctctgggaaatatatttgtgcacaaaggcatgattaagcaggggtctgtagaggttggcaaggaagtagatgcttctgttgatgcaaaattgaggcagggggctaaggctcatcacactgcaacacatctactacaatctgctcttaaaagcgtagttggttcagaaacttcacaggctggttcccttgtggcgtttgaccatctccgatttgacttcaatttccatcgcccactttctgaagaggaattaacaacaattgaagcacttataaaccaatggattggcaatgcagcacatgttgagacaaaagtcatggctttgcaagatgcaaaaaatgctggtgcgattgcaatgtttggagaaaaatacggtgaacaggtcagagtcgtagaggttcccgggatctcattggaactctgtggtgggactcacgtcagtaatactgctgagattcgtggtttcaagataatttcagaacaaggaatagcttctgggatcagaaggatagaagcagttgcaggtgacgcttttgttgactatgtgtgtgctcgggacaattacatgcggcgcttatgcttatcccttaaggttaaggctgaagatgtgaacagtagagtagaaacaattcttgaagagctaagagcaaccagaaacgtagcatcatctctacgcagcaaaattgcagtgctaaaagcagcttctcttgcaagtagagctacaactgtggagccccagaatgtcaggattgtggtcgagaacatgggtgatgtcgacgcagatgggctgaaaagcgccgcggagtatctcatagataccctcaaagaccctgctgcggtgattttaggatcaagcccaggggatggtaaagtcagcctggttgctgccttcagccctgcaatcgtcgaaatggggctgcaggccgggaagttcgtgagtggcatagccaaactctgcggcggaggcggtggaggcaagcccaatttcgcccaagctggggggcggaagccggagaacttgcccgacgcccttgagaaagcccgagctgaaattgtggcacgggtatcaggttcgagctgattctccgctgcctcacacctgatactggaagtatagggataggattcatatgaaatgtatatgtaattgtcattggcattctaagcgaaaacacttgtatttctccctaccttgccgtgtacgctttctgcagatgacggagcaaattttgtagcttgtaattgtaactagtggccgaacagaacggggaaaagatcaaatcttcacacagcaaaactactgctcatgtttaatctaatcttaaaaacataagaaattatttgtcacatgatcaactaatagtctaatacctagactagaccaaatacatctgatcaagtcagccagccacgtgcgtccaagcaaagattgagcacgtcctagacattcaactctgatttcagtcattttaactagtgaaattgctagatttagtgggacctaactgtgtccatagctagttaatccgagaggactttaagcaaaacagagaactgat

SEQ ID NO: 79073 - DNA, 2873 bp, Zea Mays
atggagcatgacctccatattggtatggattgcctgcagaaaggttgtggattagtgtttttgaagatgacaatgaagcattcaacatctggcacaatgaggttggtgtgccaaaggagcggatacagaggatgggtgcagaagataacttttggactagtggcgcaactggaccttgtggaccttgctctgaaatttattatgatttctatcctgagagaggatcatcagatgtgttgtttgcaggatttgggcgatgatagccgattcattgaattctataatcttgtctttatgcaatataacaaaaaagacgatggatctctagaaccgttgaaacaaatgaacattgatacaggaatgggccttgagcgtatggcacgcattcttcaaaaggttccaaacaactatgagacagacttgattttcccaattatagaaaaggcagctagcatggcgatggtgtcctatgcaaaagctgatgatgccacaaagacaaatctcaagataattggagatcacatgagagcagttgtttatctcatatcagatggggtaattccctcaaatatcgggagaggatatgttgttcgaaggctaataagaagagtagttcggatgggtagattgataggaataagaggtgacgggcatggaaactctgaaggtgcatttttaccttcactagctgaggtagtgatcagccttagcactgagatagattcagatgttgaatcacgacggagatcgatccttggagaacttcaaagggaagagatgcgatttgttcagactttggaaagaggagaaaagttattagctgaacttctggatgaagctttattaaatgctggtaataatggaaacaagccttccttatctggaaaaaatgttttccttttgtacgatacatatggtttcccagtagagattacagctgaaatagccagtgaacaaggcgttactgttgatattgagggatttgatattgaaatggaaaaccagaggaaacaatctcaagctgctcataatgtagtcagactttctgtaggaaatgagaccgagatagtaaagaacatcccggatactgaatttttgggatatgattctctctctgcttctgctgtcattaaaggtctcctagttaatggaaacccagttaatgaagtttctcaaggttctgaagtagaaatattattagaccggacaccgttctatgctgaatcgggtggtcaagttggagataatggtttcttatatgtgaatggaggggaagatagaagacaaacaacagttatagaaatcaatgacgtccaaaagtctctgggaaatatatttgtgcacaaaggcatgattaagcaggggtctgtagaggttggcaaggaagtagatgcttctgttgatgcaaaattgaggcagggggctaaggctcatcacactgcaacacatctactacaatctgctcttaaaagcgtagttggttcagaaacttcacaggctggttcccttgtggcgtttgaccatctccgatttgacttcaatttccatcgcccactttctgaagaggaattaacaacaattgaagcacttataaaccaatggattggcaatgcagcacatgttgagacaaaagtcatggctttgcaagatgcaaaaaatgctggtgcgattgcaatgtttggagaaaaatacggtgaacagagtcgtagaggttcccgggatctcattggaactctgtggtgggactcacgtcagtaatactgctgagattcgtggtttcaagataatttcagaacaaggaatagcttctgggatcagaaggatagaagcagttgcaggtgacgcttttgttgactatgtgtgtgctcgggacaattacatgcggcgcttatgcttatcccttaaggttaaggctgaagatgtgaacagtagagtagaaacaattcttgaagagctaagagcaaccagaaacgtagcatcatctctacgcagcaaaattgcagtgctaaaagcagcttctcttgcaagtagagctacaactgtggagccccagaatgtcaggattgtggtcgagaacatgggtgatgtcgacgcagatgggctgaaaagcgccgcggagtatctcatagataccctcaaagaccctgctgcggtgattttaggatcaagcccaggggatggtaaagtcagcctggttgctgccttcagccctgcaatcgtcgaaatggggctgcaggccgggaagttcgtgagtggcatagccaaactctgcggcggaggcggtggaggcaagcccaatttcgcccaagctggggggcggaagccggagaacttgcccgacgcccttgagaaagcccgagctgaaattgtggcacgggtatcaggttcgagctgattctccgctgcctcacacctgatactggaagtatagggataggattcatatgaaatgtatatgtaattgtcattggcattctaagcgaaaacacttgtatttctccctaccttgccgtgtacgctttctgcagatgacggagcaaattttgtagcttgtaattgtaactagtggccgaacagaacggggaaaagatcaaatcttcacacagcaaaactactgctcatgtttaatctaatcttaaaaacataagaaattatttgtcacatgatcaactaatagtctaatacctagactagaccaaatacatctgatcaagtcagccagccacgtgcgtccaagcaaagattgagcacgtcctagacattcaactctgatttcagtcattttaactagtgaaattgctagatttagtgggacctaactgtgtccatagctagttaatccgagaggactttaagcaaaacagagaactgat

SEQ ID NO: 79074 - DNA, 2894 bp, Zea Mays
cagactctcagtgttgtcctatcgcattgtcatgtcaggtatggattgcctgcagaaaggttgtggattagtgtttttgaagatgacaatgaagcattcaacatctggcacaatgaggttggtgtgccaaaggagcggatacagaggatgggtgcagaagataacttttggactagtggcgcaactggaccttgtggaccttgctctgaaatttattatgatttctatcctgagagaggatcatcagatgtgttgtttgcaggatttgggcgatgatagccgattcattgaattctataatcttgtctttatgcaatataacaaaaaagacgatggatctctagaaccgttgaaacaaatgaacattgatacaggaatgggccttgagcgtatggcacgcattcttcaaaaggttccaaacaactatgagacagacttgattttcccaattatagaaaaggcagctagcatggcgatggtgtcctatgcaaaagctgatgatgccacaaagacaaatctcaagataattggagatcacatgagagcagttgtttatctcatatcagatggggtaattccctcaaatatcgggagaggatatgttgttcgaaggctaataagaagagtagttcggatgggtagattgataggaataagaggtgacgggcatggaaactctgaaggtgcatttttaccttcactagctgaggtagtgatcagccttagcactgagatagattcagatgttgaatcacgacggagatcgatccttggagaacttcaaagggaagagatgcgatttgttcagactttggaaagaggagaaaagttattagctgaacttctggatgaagctttattaaatgctggtaataatggaaacaagccttccttatctggaaaaaatgttttccttttgtacgatacatatggtttcccagtagagattacagctgaaatagccagtgaacaaggcgttactgttgatattgagggatttgatattgaaatggaaaaccagaggaaacaatctcaagctgctcataatgtagtcagactttctgtaggaaatgagaccgagatagtaaagaacatcccggatactgaatttttgggatatgattctctctctgcttctgctgtcattaaaggtctcctagttaatggaaacccagttaatgaagtttctcaaggttctgaagtagaaatattattagaccggacaccgttctatgctgaatcgggtggtcaagttggagataatggtttcttatatgtgaatggaggggaagatagaagacaaacaacagttatagaaatcaatgacgtccaaaagtctctgggaaatatatttgtgcacaaaggcatgattaagcaggggtctgtagaggttggcaaggaagtagatgcttctgttgatgcaaaattgaggcagggggctaaggctcatcacactgcaacacatctactacaatctgctcttaaaagcgtagttggttcagaaacttcacaggctggttcccttgtggcgtttgaccatctccgatttgacttcaatttccatcgcccactttctgaagaggaattaacaacaattgaagcacttataaaccaatggattggcaatgcagcacatgttgagacaaaagtcatggctttgcaagatgcaaaaaatgctggtgcgattgcaatgtttggagaaaaatacggtgaacaggtcagagtcgtagaggttcccgggatctcattggaactctgtggtgggactcacgtcagtaatactgctgagattcgtggtttcaagataatttcagaacaaggaatagcttctgggatcagaaggatagaagcagttgcaggtgacgcttttgttgactatgtgtgtgctcgggacaattacatgcggcgcttatgcttatcccttaaggttaaggctgaagatgtgaacagtagagtagaaacaattcttgaagagctaagagcaaccagaaacgtagcatcatctctacgcagcaaaattgcagtgctaaaagcagcttctcttgcaagtagagctacaactgtggagccccagaatgtcaggattgtggtcgagaacatgggtgatgtcgacgcagatgggctgaaaagcgccgcggagtatctcatagataccctcaaagaccctgctgcggtgattttaggatcaagcccaggggatggtaaagtcagcctggttgctgccttcagccctgcaatcgtcgaaatggggctgcaggccgggaagttcgtgagtggcatagccaaactctgcggcggaggcggtggaggcaagcccaatttcgcccaagctggggggcggaagccggagaacttgcccgacgcccttgagaaagcccgagctgaaattgtggcacgggtatcaggttcgagctgattctccgctgcctcacacctgatactggaagtatagggataggattcatatgaaatgtatatgtaattgtcattggcattctaagcgaaaacacttgtatttctccctaccttgccgtgtacgctttctgcagatgacggagcaaattttgtagcttgtaattgtaactagtggccgaacagaacggggaaaagatcaaatcttcacacagcaaaactactgctcatgtttaatctaatcttaaaaacataagaaattatttgtcacatgatcaactaatagtctaatacctagactagaccaaatacatctgatcaagtcagccagccacgtgcgtccaagcaaagattgagcacgtcctagacattcaactctgatttcagtcattttaactagtgaaattgctagatttagtgggacctaactgtgtccatagctagttaatccgagaggactttaagcaaaacagagaactgat

SEQ ID NO: 79075 - DNA, 2873 bp, Zea Mays
gtcctatcgcattgtcatgtcaggtatggattgcctgcagaaaggttgtggattagtgtttttgaagatgacaatgaagcattcaacatctggcacaatgaggttggtgtgccaaaggagcggatacagaggatgggtgcagaagataacttttggactagtggcgcaactggaccttgtggaccttgctctgaaatttattatgatttctatcctgagagaggatcatcagatgtgttgtttgcaggatttgggcgatgatagccgattcattgaattctataatcttgtctttatgcaatataacaaaaaagacgatggatctctagaaccgttgaaacaaatgaacattgatacaggaatgggccttgagcgtatggcacgcattcttcaaaaggttccaaacaactatgagacagacttgattttcccaattatagaaaaggcagctagcatggcgatggtgtcctatgcaaaagctgatgatgccacaaagacaaatctcaagataattggagatcacatgagagcagttgtttatctcatatcagatggggtaattccctcaaatatcgggagaggatatgttgttcgaaggctaataagaagagtagttcggatgggtagattgataggaataagaggtgacgggcatggaaactctgaaggtgcatttttaccttcactagctgaggtagtgatcagccttagcactgagatagattcagatgttgaatcacgacggagatcgatccttggagaacttcaaagggaagagatgcgatttgttcagactttggaaagaggagaaaagttattagctgaacttctggatgaagctttattaaatgctggtaataatggaaacaagccttccttatctggaaaaaatgttttccttttgtacgatacatatggtttcccagtagagattacagctgaaatagccagtgaacaaggcgttactgttgatattgagggatttgatattgaaatggaaaaccagaggaaacaatctcaagctgctcataatgtagtcagactttctgtaggaaatgagaccgagatagtaaagaacatcccggatactgaatttttgggatatgattctctctctgcttctgctgtcattaaaggtctcctagttaatggaaacccagttaatgaagtttctcaaggttctgaagtagaaatattattagaccggacaccgttctatgctgaatcgggtggtcaagttggagataatggtttcttatatgtgaatggaggggaagatagaagacaaacaacagttatagaaatcaatgacgtccaaaagtctctgggaaatatatttgtgcacaaaggcatgattaagcaggggtctgtagaggttggcaaggaagtagatgcttctgttgatgcaaaattgaggcagggggctaaggctcatcacactgcaacacatctactacaatctgctcttaaaagcgtagttggttcagaaacttcacaggctggttcccttgtggcgtttgaccatctccgatttgacttcaatttccatcgcccactttctgaagaggaattaacaacaattgaagcacttataaaccaatggattggcaatgcagcacatgttgagacaaaagtcatggctttgcaagatgcaaaaaatgctggtgcgattgcaatgtttggagaaaaatacggtgaacaggtcagagtcgtagaggttcccgggatctcattggaactctgtggtgggactcacgtcagtaatactgctgagattcgtggtttcaagataatttcagaacaaggaatagcttctgggatcagaaggatagaagcagttgcaggtgacgcttttgttgactatgtgtgtgctcgggacaattacatgcggcgcttatgcttatcccttaaggctgaagatgtgaacagtagagtagaaacaattcttgaagagctaagagcaaccagaaacgtagcatcatctctacgcagcaaaattgcagtgctaaaagcagcttctcttgcaagtagagctacaactgtggagccccagaatgtcaggattgtggtcgagaacatgggtgatgtcgacgcagatgggctgaaaagcgccgcggagtatctcatagataccctcaaagaccctgctgcggtgattttaggatcaagcccaggggatggtaaagtcagcctggttgctgccttcagccctgcaatcgtcgaaatggggctgcaggccgggaagttcgtgagtggcatagccaaactctgcggcggaggcggtggaggcaagcccaatttcgcccaagctggggggcggaagccggagaacttgcccgacgcccttgagaaagcccgagctgaaattgtggcacgggtatcaggttcgagctgattctccgctgcctcacacctgatactggaagtatagggataggattcatatgaaatgtatatgtaattgtcattggcattctaagcgaaaacacttgtatttctccctaccttgccgtgtacgctttctgcagatgacggagcaaattttgtagcttgtaattgtaactagtggccgaacagaacggggaaaagatcaaatcttcacacagcaaaactactgctcatgtttaatctaatcttaaaaacataagaaattatttgtcacatgatcaactaatagtctaatacctagactagaccaaatacatctgatcaagtcagccagccacgtgcgtccaagcaaagattgagcacgtcctagacattcaactctgatttcagtcattttaactagtgaaattgctagatttagtgggacctaactgtgtccatagctagttaatccgagaggactttaagcaaaacagagaactgat

SEQ ID NO: 79076 - DNA, 1590 bp, Zea Mays
ccaacagggtcatcaacaggccaaaaccgatcgccggcggcaccgcaccagcacggcagtcctgtgacatgttggctagtacgtacccgtaagcttttctgttggaaagtcgagctcacgtcactgcgtttgacacggcgcgcgcccgccgccctcgaggctcctgtccgtcgcgcgacgccacgacgcccccgggccaagccagtctgcaccacgcggcacacgggcacacggcccgcgagcgactgaaagccagcactgcccgtctgccccgccccccgccaggccgccactccgccgaacaccacccagcggctcgctcgacacctacacgtttcacgcacctcgcgtcctcgccccgctctgttcgagttcccgttgtaggcgcacgccatggccgcggccattctccgccgccttgtccccaccgccgccagccagctcgtggcgccgctgccgcttctcgcgcgtggggtctccgactccgcggacgcgggcaccgtcacgtttgacctctacggcgacggcgccgccaaccagggacagctcttcgaggcgcttaacatggccgcgctctggaagctgcctgtcatattggtctgcgagaacaaccactatgggatggggacggcagagtggagggcctccaagagcccggcttactacaagcgcggggactatgtgcctggcttaaaggtcgatggaatggatgttcttgctgtgaagcaagcttgcaaatttgccaaagaacatgcccttgaaaatgggccaattatccttgagatggacacctacagataccacgggcactcaatgtcagatccaggtagcacctaccgcacaagggatgagatcgctggcataaggcaggagcgtgatccaattgaaagggttaggaagctcatgttggtccatgagttcgcaacggcccaagagctaaaggacatggagaaggagatcaggaagcaagtcgacgctgccattgctaaagcgaaggagtgtccactgcctgatccatctgagctcttcacaaatgtttatgttaatgactgcggtttggagtcgtttggtgtagacaggaaggaggtgaggaccgttcttccgtaggctggcaaacaaaaaaaaggttctactgatacagtacgaagaagtttgctgcgtatgtatatggacgcatcacaccgcagtagtttcctcacttgtggttatggtcctatggaccccgggttataatttcctctgctcgtcgagctatcacaatgtgcagccgagattttgtcaggtgctcatgtcatgccgatgtttcgtcttctgctctactgcaacacttccacagatcccctttctgagcagtgcccccacgtaaacagtagtagttggctgcattagctagggggcggctaatagctttttattagttacaaaacagtttctttgttaactatagctgtttctgaacagtgcccccacgaaaacaatagtgatcacgttgtgtcgttgtgacacaccattgtcaagtccatcaagagctttttaaaccattctgtcttagtagtggttggtttggttgaagagccaaatagaacggag

SEQ ID NO: 79077 - DNA, 546 bp, Zea Mays
ttgagggcgtatagttcattcaagaatcaagacaggaaggaggtgaggaccgttcttccgtaggctggcaaacaaaaaaaaggttctactgatacagtacgaagaagtttgctgcgtatgtatatggacgcatcacaccgcagtagtttcctcacttgtggttatggtcctatggaccccgggttataatttcctctgctcgtcgagctatcacaatgtgcagccgagattttgtcaggtgctcatgtcatgccgatgtttcgtcttctgctctactgcaacacttccacagatcccctttctgagcagtgcccccacgtaaacagtagtagttggctgcattagctagggggcggctaatagctttttattagttacaaaacagtttctttgttaactatagctgtttctgaacagtgcccccacgaaaacaatagtgatcacgttgtgtcgttgtgacacaccattgtcaagtccatcaagagctttttaaaccattctgtcttagtagtggttggtttggttgaagagccaaatagaacggag

SEQ ID NO: 79078 - DNA, 1733 bp, Zea Mays
atgttgttcacgccgattgcagaactggatcctaggagtacaaatgctgcaataagagtgcgtatcattagaaagtgggaattccgaggcgcaacaaatgatgggcctctacgccatgtcaaccttatcttagctgatgaacagggcacaaccatccacgctgagattcaagccgccctagtagctgacaaagactcattaatccaaattgacaaagtctacgagctcaaacgctttcgtgttgccccatccagaaactattacaaacctgttgacaacagtatgatgatacaattcactctttacactcaagcaaaagtagtcaaggatccaccgcccaactttccaagatatgcctacaaactcacatctttcgaagatataagtgacaatgttgacaataaaacgtacttgattgatgttctaggaatcttgacagagattggatctttacatcatgttggttacaacaactcaaacatcatcagagacatatttctcaaggacataaacaatgcctctacaaaagtgacgctttggggacaccaagcatctagcttctctgtcgataacatctgcgatgagaatgataacaaacctgttgtcatactatttgttggatgccttgctaagagattcaaaggagaagcatatctaagtgccacagcagcatgtacatggtacttcaacccagacattcctgaagcccagatgtactacaacaagttgctaaacactaagctccatatgatacgcccccaagcaactgcggaagaattacaggcttctcaaacacccaacatcgaagacaaaaccattgaagaactacttcagctagatccagatatgttccccgaacaaggtttcagatgcactgtcactatatcacgcctcgtacaaaatggtagatggtggttcccatcctgtatcaagtgcaacaagtcttcatcccagacatctactgggtaccaatgcacatcatgcaatgggacagaaacagagttcagatataaactcagcttcattgccactgatggaacatccgaagcagaattcttttgctttgatactatagctagacgaatagtaggaaaatcttgtcaaaccctttttagtacatcagatgtttctcgaggtcctcctccagacctagctgccattgtctccctcaaattcacacttgcagttaccatcaacatgtctgcattctgtgtcacaaatcaaatcttttctatcctttctgtcctagcaagtcatggaagacaagcatcaataccatgtgccacacaaaacctttcccaacaacagatgtttacacaagagagcacagttgatgtcataaccacacaagaatctccagcaacatcgtttgccaaactatccacttctaccaaacaagaaaatgtggcacgacgcaaacttgcgtattctgaaactctacacgacacaaatgttgatgaacagattccagatgaggtcaacaaagacagcctcgcgtcacctcctaagaagatcaagactacccaactaggttctacacaccctgacaaccttaatcattagatcatcaatggtctcatgatattctcatgaaggtaatatgacgagcatcgtcacttttggagcacgaatgcttttgtgtatatataaccagaacgctgaaactttcgcagtgatgtatatattgaacagatctctagctgttgaatcttgctaatgatgtaatatataag

SEQ ID NO: 79079 - DNA, 534 bp, Zea Mays
gaggcagagggtcggaactgatcctattctgtcctattctagcgcgctctgacggaggcgtcgcgttcgatcctcacaatgcagtgaaatcactctgctctcctctgcttccttctataaatctaatagaataactccgtcaagaagcaacgagcatagaacaattcaacagaggaagaatcaggcagggagctctcccattcgcatcccaggccaacctcaaccccaatccaatccgttgcaggtcgcaggatggctccgcgtgagcaccaccagccccaggaggaggaggaggaggacaccgcaggcgtcgtcaagctcatcagcgccgagggcttcgaattcgtcgtcgacaagaaggccgccatggtctccaacaccctacgcaacatgctcacatcgccaggcggtttctccgagacgcgccagggcgaggttcgcttcccggagatccccaccaatatcctcgagaagatctgccagtacttctattggtcgctccattattccagggtgcttagtatttaagcccaa

SEQ ID NO: 79080 - DNA, 1012 bp, Zea Mays
gaggcagagggtcggaactgatcctattctgtcctattctagcgcgctctgacggaggcgtcgcgttcgatcctcacaatgcagtgaaatcactctgctctcctctgcttccttctataaatctaatagaataactccgtcaagaagcaacgagcatagaacaattcaacagaggaagaatcaggcagggagctctcccattcgcatcccaggccaacctcaaccccaatccaatccgttgcaggtcgcaggatggctccgcgtgagcaccaccagccccaggaggaggaggaggaggacaccgcaggcgtcgtcaagctcatcagcgccgagggcttcgaattcgtcgtcgacaagaaggccgccatggtctccaacaccctacgcaacatgctcacatcgccaggcggtttctccgagacgcgccagggcgaggttcgcttcccggagatccccaccaatatcctcgagaagatctgccagtacttctattggtcgctccattattccagtggcaaggaaacagcagagtttctgatcgaacccgagatcaccctggagctgatgatggccgcaaactacctggacacttgatgaggagcctgagggatctaaccctaggaaccgtttggttgtgaaatttgaaaagatttgatctgatccgatccattgtagttttgtgcaatgtaatagacgttgcagtttgaagtgtgtgctactatcaactctggtagaatatgcagtctccaaaatttagttaccagaacctacaaggtcgttgatgagaatcattcctgtgaaaatccgtccaagagtcaacataaatgtagaatccactgagttatcgtaacgagagaaatccgttgtttcctaaacctgaaaccatgcagatcctttaatctaagtccaggccagagtctcgcaagtttgtcagacttgtgtaaattatgtaaattgtaaatttgtcagacttgtataaatcgtcttctgggttctatggattaacttgagt

SEQ ID NO: 79081 - DNA, 688 bp, Zea Mays
gaggcagagggtcggaactgatcctattctgtcctattctagcgcgctctgacggaggcgtcgcgttcgatcctcacaatgcagtgaaatcactctgctctcctctgcttccttctataaatctaatagaataactccgtcaagaagcaacgagcatagaacaattcaacagaggaagaatcaggcagggagctctcccattcgcatcccaggccaacctcaaccccaatccaatccgttgcaggtcgcaggatggctccgcgtgagcaccaccagccccaggaggaggaggaggaggacaccgcaggcgtcgtcaagctcatcagcgccgagggcttcgaattcgtcgtcgacaagaaggccgccatggtctccaacaccctacgcaacatgctcacatcgccaggcggtttctccgagacgcgccagggcgaggttcgcttcccggagatccccaccaatatcctcgagaagatctgccagtacttctattggtcgctccattattccagtggcaaggaaacagcagagtttctgatcgaacccgagatcaccctggagctgatgatggccgcaaactacctggacacttgatgaggagcctgagggatctaaccctaggaaccgtttggttgtgaaatttgaaaagggtgctttgaggatcgtgcgagtctaggtccaaatctac

SEQ ID NO: 79082 - DNA, 2417 bp, Zea Mays
gtgatttcttgtagttgctctgagtctctctcgtctgtcgcccaaatccattttccacgtctcttccatcccatccccgtgacgccgtctagatttcaaatccgcgtcaagccagggcagagctcagggctcggtctcccccttcgccgccagttgccgcagcctccaacccctcgagatccgccgcgtgtgagaccgccgaccatggaggccatggaggagctgtcagagctcgccgagtcgatgcgccaggcggcgtcgctcctcgccgacgacgacccctccgacgccgccgcgccgcgccggcccaccaccttcctcaacgccgtcgccctcggcaacgtcagctctggcaagtcggccgtgctaaacagcctcatcggtcacccggttttgccgacgggggagaacggggcgacgcgggcgccaatagtggttgacctgcagagggatccggggctcagcagcaagtccatcgtgctgcagatcgacagcaagtcgcagcaggtttccgcaagtgccctccggcattcactgcaggacagactcagcaaggggacgtctggtggatcagggaggggccgtgctgatgagatttacctcaagctgcggacgagtacagctccctcattaaagctgattgatttacctgggatagaccagcgagctgttgatgattccatgatcaatgagtatgctgggcacaatgatgcaatactgctcgttgtcataccggcaatgcaagctgctgatgttgcatcatctcgagctctgaggttggccaaggatatcgattcagatgggacaagaactgttggtgttataagcaaagttgatcaagcagatggagatgcaaaagttatagcctgtgttcaggccctactatcaaacaagggtccaaaaaaccttcctgagattgattgggttgctctaattggacaatctgttgcgattgcgtcagcacaatcagctgggtctgaaaactctctagagacagcttggcgagccgaagctgaaagcttgaaaaacatcttaactggagctccgcagaataagcttggtagaattgctttggttgacacaattgctaagcaaatccgtaaaagaatgaaagtgcgggttcctaacctattgagtggccttcagggtaagtctcaaatggttcaggatgaattggcaaggctgggagaatctatggtacagagtcctgagggaacccgggcagttgctttggagctgtgccgagaatttgaggacaagtttcttgctcacataacatctggtgagggatctggttggaaaattgttgcaagttttgaaggcaagtttccagacagaatcaaacagctaccgttggaccgacatttcgatctcaacaatgtcaaaaggattgtcttggaagccgatggttatcaaccatatttgatatctccagagaaagggttgaaatccttaataaagttagtactggaaatggcaaaggagccatcacgactatgtgttgaggaggttcatcgtgtattgttagacatagtcaatgcctccgcaaatgccacaccaggactcggaaggtatcctccattcaagcgtgaggttgttgcaatagcatcaaatgcattggataccttcaaaaatgatgccaaaaagatggtcgtcgcgcttgttgatatggaacgtgcctttgttcctccccaacatttcatccgcttggtgcaaagaagaatggaaaggcagcgtcgagaggatgagttaagaaaccgatcttctaagaaaacacaggaagctgaacagtcaacatctaagagggccttcagtccccaaacagatgctgagcaaggtggtggcagcttaaaatcaatgaaagacaaatctggccagcaagataaagacgcaaaagagggatcgaatttgcaggttgctggtcctgctggtgaaattactgcaggttacctcttaaagaaaagcgcaaaaactaatgggtggagtaaaaggtggtttgttcttaatgagaagagtggaaagcttgggtacacagagaaacaagaggagagacattttcgtggtgtcatcactcttgaggagtgcaaccttgaggaggtagaggaggaagaaccatctaaaagctcaaaagactcaaaaaaggcaaatggatcagaaaaacccccaagtcttgtatttaagattactaacagggttgcatacaaaacagtcttaaaagctcacagtgctgttctgttaaaggctgagagcatgcctgacaaggttgagtgggtgaataagatcaaagctgttattcagagcaaagggggttctttcaagggtccaagtactgagggtggttcaatgaagcaaagcaattcggatggcgctttagttcccttgtatgttttggatgtgccaatataaatactgctcca

SEQ ID NO: 79083 - DNA, 2412 bp, Zea Mays
gtgatttcttgtagttgctctgagtctctctcgtctgtcgcccaaatccattttccacgtctcttccatcccatccccgtgacgccgtctagatttcaaatccgcgtcaagccagggcagagctcagggctcggtctcccccttcgccgccagttgccgcagcctccaacccctcgagatccgccgcgtgtgagaccgccgaccatggaggccatggaggagctgtcagagctcgccgagtcgatgcgccaggcggcgtcgctcctcgccgacgacgacccctccgacgccgccgcgccgcgccggcccaccaccttcctcaacgccgtcgccctcggcaacgtcagctctggcaagtcggccgtgctaaacagcctcatcggtcacccggttttgccgacgggggagaacggggcgacgcgggcgccaatagtggttgacctgcagagggatccggggctcagcagcaagtccatcgtgctgcagatcgacagcaagtcgcagcaggtttccgcaagtgccctccggcattcactgcaggacagactcagcaaggggacgtctggtggatcagggaggggccgtgctgatgagatttacctcaagctgcggacgagtacagctccctcattaaagctgattgatttacctgggatagaccagcgagctgttgatgattccatgatcaatgagtatgctgggcacaatgatgcaatactgctcgttgtcataccggcaatgcaagctgctgatgttgcatcatctcgagctctgaggttggccaaggatatcgattcagatgggacaagaactgttggtgttataagcaaagttgatcaagcagatggagatgcaaaagttatagcctgtgttcaggccctactatcaaacaagggtccaaaaaaccttcctgagattgattgggttgctctaattggacaatctgttgcgattgcgtcagcacaatcagctgggtctgaaaactctctagagacagcttggcgagccgaagctgaaagcttgaaaaacatcttaactggagctccgcagaataagcttggtagaattgctttggttgacacaattgctaagcaaatccgtaaaagaatgaaagtgcgggttcctaacctattgagtggccttcagggtaagtctcaaatggttcaggatgaattggcaaggctgggagaatctatggtacagagtcctgagggaacccgggcagttgctttggagctgtgccgagaatttgaggacaagtttcttgctcacataacatctgggatctggttggaaaattgttgcaagttttgaaggcaagtttccagacagaatcaaacagctaccgttggaccgacatttcgatctcaacaatgtcaaaaggattgtcttggaagccgatggttatcaaccatatttgatatctccagagaaagggttgaaatccttaataaagttagtactggaaatggcaaaggagccatcacgactatgtgttgaggaggttcatcgtgtattgttagacatagtcaatgcctccgcaaatgccacaccaggactcggaaggtatcctccattcaagcgtgaggttgttgcaatagcatcaaatgcattggataccttcaaaaatgatgccaaaaagatggtcgtcgcgcttgttgatatggaacgtgcctttgttcctccccaacatttcatccgcttggtgcaaagaagaatggaaaggcagcgtcgagaggatgagttaagaaaccgatcttctaagaaaacacaggaagctgaacagtcaacatctaagagggccttcagtccccaaacagatgctgagcaaggtggtggcagcttaaaatcaatgaaagacaaatctggccagcaagataaagacgcaaaagagggatcgaatttgcaggttgctggtcctgctggtgaaattactgcaggttacctcttaaagaaaagcgcaaaaactaatgggtggagtaaaaggtggtttgttcttaatgagaagagtggaaagcttgggtacacagagaaacaagaggagagacattttcgtggtgtcatcactcttgaggagtgcaaccttgaggaggtagaggaggaagaaccatctaaaagctcaaaagactcaaaaaaggcaaatggatcagaaaaacccccaagtcttgtatttaagattactaacagggttgcatacaaaacagtcttaaaagctcacagtgctgttctgttaaaggctgagagcatgcctgacaaggttgagtgggtgaataagatcaaagctgttattcagagcaaagggggttctttcaagggtccaagtactgagggtggttcaatgaagcaaagcaattcggatggcgctttagttcccttgtatgttttggatgtgccaatataaatactgctcca

SEQ ID NO: 79084 - DNA, 3434 bp, Zea Mays
gtgatttcttgtagttgctctgagtctctctcgtctgtcgcccaaatccattttccacgtctcttccatcccatccccgtgacgccgtctagatttcaaatccgcgtcaagccagggcagagctcagggctcggtctcccccttcgccgccagttgccgcagcctccaacccctcgagatccgccgcgtgtgagaccgccgaccatggaggccatggaggagctgtcagagctcgccgagtcgatgcgccaggcggcgtcgctcctcgccgacgacgacccctccgacgccgccgcgccgcgccggcccaccaccttcctcaacgccgtcgccctcggcaacgtcagctctggcaagtcggccgtgctaaacagcctcatcggtcacccggttttgccgacgggggagaacggggcgacgcgggcgccaatagtggttgacctgcagagggatccggggctcagcagcaagtccatcgtgctgcagatcgacagcaagtcgcagcaggtttccgcaagtgccctccggcattcactgcaggacagactcagcaaggggacgtctggtggatcagggaggggccgtgctgatgagatttacctcaagctgcggacgagtacagctccctcattaaagctgattgatttacctgggatagaccagcgagctgttgatgattccatgatcaatgagtatgctgggcacaatgatgcaatactgctcgttgtcataccggcaatgcaagctgctgatgttgcatcatctcgagctctgaggttggccaaggatatcgattcagatgggacaagaactgttggtgttataagcaaagttgatcaagcagatggagatgcaaaagttatagcctgtgttcaggccctactatcaaacaagggtccaaaaaaccttcctgagattgattgggttgctctaattggacaatctgttgcgattgcgtcagcacaatcagctgggtctgaaaactctctagagacagcttggcgagccgaagctgaaagcttgaaaaacatcttaactggagctccgcagaataagcttggtagaattgctttggttgacacaattgctaagcaaatccgtaaaagaatgaaagtgcgggttcctaacctattgagtggccttcagggtaagtctcaaatggttcaggatgaattggcaaggctgggagaatctatggtacagagtcctgagggaacccgggcagttgctttggagctgtgccgagaatttgaggacaagtttcttgctcacataacatctgggatctggttggaaaattgttgcaagttttgaaggcaagtttccagacagaatcaaacagctaccgttggaccgacatttcgatctcaacaatgtcaaaaggattgtcttggaagccgatggttatcaaccatatttgatatctccagagaaagggttgaaatccttaataaagttagtactggaaatggcaaaggagccatcacgactatgtgttgaggaggttcatcgtgtattgttagacatagtcaatgcctccgcaaatgccacaccaggactcggaaggtatcctccattcaagcgtgaggttgttgcaatagcatcaaatgcattggataccttcaaaaatgatgccaaaaagatggtcgtcgcgcttgttgatatggaacgtgcctttgttcctccccaacatttcatccgcttggtgcaaagaagaatggaaaggcagcgtcgagaggatgagttaagaaaccgatcttctaagaaaacacaggaagctgaacagtcaacatctaagagggccttcagtccccaaacagatgctgagcaaggtggtggcagcttaaaatcaatgaaagacaaatctggccagcaagataaagacgcaaaagagggatcgaatttgcaggttgctggtcctgctggtgaaattactgcaggttacctcttaaagaaaagcgcaaaaactaatgggtggagtaaaaggtggtttgttcttaatgagaagagtggaaagcttgggtacacagagaaacaagaggagagacattttcgtggtgtcatcactcttgaggagtgcaaccttgaggaggtagaggaggaagaaccatctaaaagctcaaaagactcaaaaaaggcaaatggatcagaaaaacccccaagtcttgtatttaagattactaacagggttgcatacaaaacagtcttaaaagctcacagtgctgttctgttaaaggctgagagcatgcctgacaaggttgagtgggtgaataagatcaaagctgttattcagagcaaagggggttctttcaagggtccaagtactgagggtggttcaatgaagcaaagcaattcggatggcgctttagatgctatggcgcggagaccagctgatcctgaagaagaacttagatggatgtctcaagaagttcgtggttatgttgaggctgttttgaatagtctggcagcaaatgttccgaaggctattgtgctgtgccaagtggagaaagcaaaggaagacatgcttaaccagctatacagctcgataagcgggcaaagcaacgctaagattgaagagcttcttcaagaggatcataatgctaagcgcagaagggagaagtaccaaaaacaatcatctctcctgtcaaaacttactcgtcaactcagtatccatgacaacagggcatctgtttcctcgtattctaatgacagcactgaagttgagagccctcgaacaccaagccgctcaggtgaggactggaggtctgcctttgattcatcttcaaatgggcctgttgctacaagcacaaacagtgaatcaaggtcgagaagtgctgatggtcgcagccggcgctatgagaacggggatgtgagctcaggtgccaactctggcagccggcgcacaccgaaccggttgccaccagcaccgccaaaatactaatcgtgctgattggtattcatgaacattatgtattcttgcctggcacacgccccttgcttgtcatatgggttattggagcgtatttcagatcggccgctagagattgtgttgtagtggagtctggtgattgcgtgaacattgtgttcgcaggtcgctgcgactcagatgagttgtttatagaaatatataggtaaccatggtctctatctttactgtttattatctccgcacatttcctggccctggtgccgtccctgccataggattttgttcgggcgatcgatcttgctttcgcacttggtcgttctgggacggcggctgtcagactaaaagatttatgttgcccctcccgcgcatattgttcggtaaccctgatgatccttactagtggatggggcgcgctcgatgttgaaatgtggttgtagattatagaatcttctatgacctttggagaggaatttgtaagatatatcccatcgggccacactctttc

SEQ ID NO: 79085 - DNA, 1161 bp, Zea Mays
gatttcttgtagttgctctgagtctctctcgtctgtcgcccaaatccattttccacgtctcttccatcccatccccgtgacgccgtctagatttcaaatccgcgtcaagccagggcagagctcagggctcggtctcccccttcgccgccagttgccgcagcctccaacccctcgagatccgccgcgtgtgagaccgccgaccatggaggccatggaggagctgtcagagctcgccgagtcgatgcgccaggcggcgtcgctcctcgccgacgacgacccctccgacgccgccgcgccgcgccggcccaccaccttcctcaacgccgtcgccctcggcaacgtcagctctggcaagtcggccgtgctaaacagcctcatcggtcacccggttttgccgacgggggagaacggggcgacgcgggcgccaatagtggttgacctgcagagggatccggggctcagcagcaagtccatcgtgctgcagatcgacagcaagtcgcagcaggtttccgcaagtgccctccggcattcactgcaggacagactcagcaaggggacgtctggtggatcagggaggggccgtgctgatgagatttacctcaagctgcggacgagtacagctccctcattaaagctgattgatttacctgggatagaccagcgagctgttgatgattccatgatcaatgagtatgctgggcacaatgatgcaatactgctcgttgtcataccggcaatgcaagctgctgatgttgcatcatctcgagctctgaggttggccaaggatatcgattcagatgggacaagaactgttggtgttataagcaaagttgatcaagcagatggagatgcaaaagttatagcctgtgttcaggccctactatcaaacaagggtccaaaaaaccttcctgagattgattgggttgctctaattggacaatctgttgcgattgcgtcagcacaatcagctgggtctgaaaactctctagagacagcttggcgagccgaagctgaaagcttgaaaaacatcttaactggagctccgcagaataagcttggtagaattgctttggttgacacaattgctaagcaaatccgtaaaagaatgaaagtgcgggttcctaacctattgagtggatataaatgctatatagtaccaca

SEQ ID NO: 79086 - DNA, 3292 bp, Zea Mays
ctcgtctgtcgcccaaatccattttccacgtctcttccatcccatccccgtgacgccgtctagatttcaaatccgcgtcaagccagggcagagctcagggctcggtctcccccttcgccgccagttgccgcagcctccaacccctcgagatccgccgcgtgtgagaccgccgaccatggaggccatggaggagctgtcagagctcgccgagtcgatgcgccaggcggcgtcgctcctcgccgacgacgacccctccgacgccgccgcgccgcgccggcccaccaccttcctcaacgccgtcgccctcggcaacgtcagctctggcaagtcggccgtgctaaacagcctcatcggtcacccggttttgccgacgggggagaacggggcgacgcgggcgccaatagtggttgacctgcagagggatccggggctcagcagcaagtccatcgtgctgcagatcgacagcaagtcgcagcaggtttccgcaagtgccctccggcattcactgcaggacagactcagcaaggggacgtctggtggatcagggaggggccgtgctgatgagatttacctcaagctgcggacgagtacagctccctcattaaagctgattgatttacctgggatagaccagcgagctgttgatgattccatgggacaagaactgttggtgttataagcaaagttgatcaagcagatggagatgcaaaagttatagcctgtgttcaggccctactatcaaacaagggtccaaaaaaccttcctgagattgattgggttgctctaattggacaatctgttgcgattgcgtcagcacaatcagctgggtctgaaaactctctagagacagcttggcgagccgaagctgaaagcttgaaaaacatcttaactggagctccgcagaataagcttggtagaattgctttggttgacacaattgctaagcaaatccgtaaaagaatgaaagtgcgggttcctaacctattgagtggccttcagggtaagtctcaaatggttcaggatgaattggcaaggctgggagaatctatggtacagagtcctgagggaacccgggcagttgctttggagctgtgccgagaatttgaggacaagtttcttgctcacataacatctggtgagggatctggttggaaaattgttgcaagttttgaaggcaagtttccagacagaatcaaacagctaccgttggaccgacatttcgatctcaacaatgtcaaaaggattgtcttggaagccgatggttatcaaccatatttgatatctccagagaaagggttgaaatccttaataaagttagtactggaaatggcaaaggagccatcacgactatgtgttgaggaggttcatcgtgtattgttagacatagtcaatgcctccgcaaatgccacaccaggactcggaaggtatcctccattcaagcgtgaggttgttgcaatagcatcaaatgcattggataccttcaaaaatgatgccaaaaagatggtcgtcgcgcttgttgatatggaacgtgcctttgttcctccccaacatttcatccgcttggtgcaaagaagaatggaaaggcagcgtcgagaggatgagttaagaaaccgatcttctaagaaaacacaggaagctgaacagtcaacatctaagagggccttcagtccccaaacagatgctgagcaaggtggtggcagcttaaaatcaatgaaagacaaatctggccagcaagataaagacgcaaaagagggatcgaatttgcaggttgctggtcctgctggtgaaattactgcaggttacctcttaaagaaaagcgcaaaaactaatgggtggagtaaaaggtggtttgttcttaatgagaagagtggaaagcttgggtacacagagaaacaagaggagagacattttcgtggtgtcatcactcttgaggagtgcaaccttgaggaggtagaggaggaagaaccatctaaaagctcaaaagactcaaaaaaggcaaatggatcagaaaaacccccaagtcttgtatttaagattactaacagggttgcatacaaaacagtcttaaaagctcacagtgctgttctgttaaaggctgagagcatgcctgacaaggttgagtgggtgaataagatcaaagctgttattcagagcaaagggggttctttcaagggtccaagtactgagggtggttcaatgaagcaaagcaattcggatggcgctttagatgctatggcgcggagaccagctgatcctgaagaagaacttagatggatgtctcaagaagttcgtggttatgttgaggctgttttgaatagtctggcagcaaatgttccgaaggctattgtgctgtgccaagtggagaaagcaaaggaagacatgcttaaccagctatacagctcgataagcgggcaaagcaacgctaagattgaagagcttcttcaagaggatcataatgctaagcgcagaagggagaagtaccaaaaacaatcatctctcctgtcaaaacttactcgtcaactcagtatccatgacaacagggcatctgtttcctcgtattctaatgacagcactgaagttgagagccctcgaacaccaagccgctcaggtgaggactggaggtctgcctttgattcatcttcaaatgggcctgttgctacaagcacaaacagtgaatcaaggtcgagaagtgctgatggtcgcagccggcgctatgagaacggggatgtgagctcaggtgccaactctggcagccggcgcacaccgaaccggttgccaccagcaccgccaaaatactaatcgtgctgattggtattcatgaacattatgtattcttgcctggcacacgccccttgcttgtcatatgggttattggagcgtatttcagatcggccgctagagattgtgttgtagtggagtctggtgattgcgtgaacattgtgttcgcaggtcgctgcgactcagatgagttgtttatagaaatatataggtaaccatggtctctatctttactgtttattatctccgcacatttcctggccctggtgccgtccctgccataggattttgttcgggcgatcgatcttgctttcgcacttggtcgttctgggacggcggctgtcagactaaaagatttatgttgcccctcccgcgcatattgttcggtaaccctgatgatccttactagtggatggggcgcgctcgatgttgaaatgtggttgtagattatagaatcttctatgacctttggagaggaatttgtaagatatatcccatcgggccacactctttc

SEQ ID NO: 79087 - DNA, 3012 bp, Zea Mays
gatccggggctcagcagcaagtccatcgtgctgcagatcgacagcaagtcgcagcaggtttccgcaagtgccctccggcattcactgcaggacagactcagcaaggggacgtctggtggatcagggaggggccgtgctgatgagatttacctcaagctgcggacgagtacagtacttttcctgcttcttgttcagctccctcattaaagctgattgatttacctgggatagaccagcgagctgttgatgattccatgatcaatgagtatgctgggcacaatgatgcaatactgctcgttgtcataccggcaatgcaagctgctgatgttgcatcatctcgagctctgaggttggccaaggatatcgattcagatgggacaagaactgttggtgttataagcaaagttgatcaagcagatggagatgcaaaagttatagcctgtgttcaggccctactatcaaacaagggtccaaaaaaccttcctgagattgattgggttgctctaattggacaatctgttgcgattgcgtcagcacaatcagctgggtctgaaaactctctagagacagcttggcgagccgaagctgaaagcttgaaaaacatcttaactggagctccgcagaataagcttggtagaattgctttggttgacacaattgctaagcaaatccgtaaaagaatgaaagtgcgggttcctaacctattgagtggccttcagggtaagtctcaaatggttcaggatgaattggcaaggctgggagaatctatggtacagagtcctgagggaacccgggcagttgctttggagctgtgccgagaatttgaggacaagtttcttgctcacataacatctggtgagggatctggttggaaaattgttgcaagttttgaaggcaagtttccagacagaatcaaacagctaccgttggaccgacatttcgatctcaacaatgtcaaaaggattgtcttggaagccgatggttatcaaccatatttgatatctccagagaaagggttgaaatccttaataaagttagtactggaaatggcaaaggagccatcacgactatgtgttgaggaggttcatcgtgtattgttagacatagtcaatgcctccgcaaatgccacaccaggactcggaaggtatcctccattcaagcgtgaggttgttgcaatagcatcaaatgcattggataccttcaaaaatgatgccaaaaagatggtcgtcgcgcttgttgatatggaacgtgcctttgttcctccccaacatttcatccgcttggtgcaaagaagaatggaaaggcagcgtcgagaggatgagttaagaaaccgatcttctaagaaaacacaggaagctgaacagtcaacatctaagagggccttcagtccccaaacagatgctgagcaaggtggtggcagcttaaaatcaatgaaagacaaatctggccagcaagataaagacgcaaaagagggatcgaatttgcaggttgctggtcctgctggtgaaattactgcaggttacctcttaaagaaaagcgcaaaaactaatgggtggagtaaaaggtggtttgttcttaatgagaagagtggaaagcttgggtacacagagaaacaagaggagagacattttcgtggtgtcatcactcttgaggagtgcaaccttgaggaggtagaggaggaagaaccatctaaaagctcaaaagactcaaaaaaggcaaatggatcagaaaaacccccaagtcttgtatttaagattactaacagggttgcatacaaaacagtcttaaaagctcacagtgctgttctgttaaaggctgagagcatgcctgacaaggttgagtgggtgaataagatcaaagctgttattcagagcaaagggggttctttcaagggtccaagtactgagggtggttcaatgaagcaaagcaattcggatggcgctttagatgctatggcgcggagaccagctgatcctgaagaagaacttagatggatgtctcaagaagttcgtggttatgttgaggctgttttgaatagtctggcagcaaatgttccgaaggctattgtgctgtgccaagtggagaaagcaaaggaagacatgcttaaccagctatacagctcgataagcgggcaaagcaacgctaagattgaagagcttcttcaagaggatcataatgctaagcgcagaagggagaagtaccaaaaacaatcatctctcctgtcaaaacttactcgtcaactcagtatccatgacaacagggcatctgtttcctcgtattctaatgacagcactgaagttgagagccctcgaacaccaagccgctcaggtgaggactggaggtctgcctttgattcatcttcaaatgggcctgttgctacaagcacaaacagtgaatcaaggtcgagaagtgctgatggtcgcagccggcgctatgagaacggggatgtgagctcaggtgccaactctggcagccggcgcacaccgaaccggttgccaccagcaccgccaaaatactaatcgtgctgattggtattcatgaacattatgtattcttgcctggcacacgccccttgcttgtcatatgggttattggagcgtatttcagatcggccgctagagattgtgttgtagtggagtctggtgattgcgtgaacattgtgttcgcaggtcgctgcgactcagatgagttgtttatagaaatatataggtaaccatggtctctatctttactgtttattatctccgcacatttcctggccctggtgccgtccctgccataggattttgttcgggcgatcgatcttgctttcgcacttggtcgttctgggacggcggctgtcagactaaaagatttatgttgcccctcccgcgcatattgttcggtaaccctgatgatccttactagtggatggggcgcgctcgatgttgaaatgtggttgtagattatagaatcttctatgacctttggagaggaatttgtaagatatatcccatcgggccacactctttc

SEQ ID NO: 79088 - DNA, 138 bp, Zea Mays
cgggaagcctacggcactggccttcagggtaagtctcaaatggttcaggatgaattggcaaggctgggagaatctatggtacagagtcctgagggaacccgggcagttgctttggagctgtgccgagaatttgaggac

SEQ ID NO: 79089 - DNA, 2029 bp, Zea Mays
tctggttggaaaattgttgcaagttttgaaggcaagtttccagacagaatcaaacagctaccgttggaccgacatttcgatctcaacaatgtcaaaagggttcatcgtgtattgttagacatagtcaatgcctccgcaaatgccacaccaggactcggaaggtatcctccattcaagcgtgaggttgttgcaatagcatcaaatgcattggataccttcaaaaatgatgccaaaaagatggtcgtcgcgcttgttgatatggaacgtgcctttgttcctccccaacatttcatccgcttggtgcaaagaagaatggaaaggcagcgtcgagaggatgagttaagaaaccgatcttctaagaaaacacaggaagctgaacagtcaacatctaagagggccttcagtccccaaacagatgctgagcaaggtggtggcagcttaaaatcaatgaaagacaaatctggccagcaagataaagacgcaaaagagggatcgaatttgcaggttgctggtcctgctggtgaaattactgcaggttacctcttaaagaaaagcgcaaaaactaatgggtggagtaaaaggtggtttgttcttaatgagaagagtggaaagcttgggtacacagagaaacaagaggagagacattttcgtggtgtcatcactcttgaggagtgcaaccttgaggaggtagaggaggaagaaccatctaaaagctcaaaagactcaaaaaaggcaaatggatcagaaaaacccccaagtcttgtatttaagattactaacagggttgcatacaaaacagtcttaaaagctcacagtgctgttctgttaaaggctgagagcatgcctgacaaggttgagtgggtgaataagatcaaagctgttattcagagcaaagggggttctttcaagggtccaagtactgagggtggttcaatgaagcaaagcaattcggatggcgctttagatgctatggcgcggagaccagctgatcctgaagaagaacttagatggatgtctcaagaagttcgtggttatgttgaggctgttttgaatagtctggcagcaaatgttccgaaggctattgtgctgtgccaagtggagaaagcaaaggaagacatgcttaaccagctatacagctcgataagcgggcaaagcaacgctaagattgaagagcttcttcaagaggatcataatgctaagcgcagaagggagaagtaccaaaaacaatcatctctcctgtcaaaacttactcgtcaactcagtatccatgacaacagggcatctgtttcctcgtattctaatgacagcactgaagttgagagccctcgaacaccaagccgctcaggtgaggactggaggtctgcctttgattcatcttcaaatgggcctgttgctacaagcacaaacagtgaatcaaggtcgagaagtgctgatggtcgcagccggcgctatgagaacggggatgtgagctcaggtgccaactctggcagccggcgcacaccgaaccggttgccaccagcaccgccaaaatactaatcgtgctgattggtattcatgaacattatgtattcttgcctggcacacgccccttgcttgtcatatgggttattggagcgtatttcagatcggccgctagagattgtgttgtagtggagtctggtgattgcgtgaacattgtgttcgcaggtcgctgcgactcagatgagttgtttatagaaatatataggtaaccatggtctctatctttactgtttattatctccgcacatttcctggccctggtgccgtccctgccataggattttgttcgggcgatcgatcttgctttcgcacttggtcgttctgggacggcggctgtcagactaaaagatttatgttgcccctcccgcgcatattgttcggtaaccctgatgatccttactagtggatggggcgcgctcgatgttgaaatgtggttgtagattatagaatcttctatgacctttggagaggaatttgtaagatatatcccatcgggccacactctttc

SEQ ID NO: 79090 - DNA, 150 bp, Zea Mays
atgggatcgaggaacgagaacgtggtacgcggtacgctacaaaatctaggatttaacactactggaacgagattgttcccacattcccggaacggaacgaacgttcccggaacgaggaacgtggccaagttcctggttcccggttactaa

SEQ ID NO: 79091 - DNA, 658 bp, Zea Mays
gttagacatgcacaacagttaatgtacgcatgaaaatatataagttagttgatgtagtcatcaccaacgaagtctaaatatcctgtagtagcgtatatgttttaaggacaacatgtaatgcatggtggtatgacaaaacaaatgtcgggacattttgtcgaacaacctaggtgcacggctgacaacagatctactttgatgtcctagacgagcaaaaaaaatattgttggcacatttcatcgaacaacctgagtgtgcggagtgcttaccatttacacagcaggcatacgagacaagatggtgaacgtaagttttgagagtcgcaaaccaacgtgtggcgggcgagcacatgtgaactagaaacgaaagcagtggccacgtctgcacgacaacgacgtcagcggagccacgacatcagcggagccacgatagagtagaagaacgagcgaacaaattacatgcgaggcgaggcaacgggaacgaacctggcgcgatcggagatgctgttgatgaccgcgggatgggttgcgtcttggccgggacaaaacccttgtcgccctatccagattcctcgttggtgagtggagctgagtctcgagtccgacgtcgcttccagaaagaccgagagaggaggctcgctgctgatatcagagaggtt

SEQ ID NO: 79092 - DNA, 3890 bp, Zea Mays
cggcagcccgcgcgaggtcagtcaggccactccatcccgatcccgaaaccggcggcgatgcatttcttctccggcagcggcggggcccgctccggcgcactactccccaccacctccaagccgaaggcgcaccaccacctccgttccaagtcctccctctctgcgcccgcctcctcccgccgccgcgggagcctccactccgcgtccactccctactcccgccgcgccctctgcctcgccacgactgccttcgcggtgctgtttatcctggcctttctccgtctcggcttcccctcatcccgctccgccgcgctgtctgcgcccgtccgttcccgcgcgcgcctcagccgcaggcccgccttccgcctccgggactcggccgcggccgaggccgcagcggccgctgtggcgaaccggatcggacgtgaggcgcccgtggatattacgacgagggacctttacgaccggatcgagttcagcgacgtcgacggcggtgcgtggaagcaggggtgggaggtcaagtacaggggcgacgagtgggataccgagaagctcaaggtcttcgtcgcgccgcactcgcacaacgaccccgggtggatccgcaccgtcgaggagtactaccagcgccagtcgcgccacatcctcgataccatcgtcgagtccctctccaaggattcgcggaggaagttcatatgggaggagatgtcatacctggagagatggtggcgcgacgcgccgcccaaaaagcaagaggcactggctaagcttgtccgtgataggcagctcgaaatcgtgagtggtggatgggtcatgaacgatgaggcaaactcccactactttgccatcatagaacagttatgaatcctgtccatggagagttgatcctgttgagacaaatcctgacaatgtgaaagagagagcaacaaagcttctagatcagtataggaaaaaatcaaccctgtacagaacgaatacacttctcattcctttgggtgatgatttccgatatgttagtatggatgaagcagaggtacaattccgcaattatgagaaactctttgattacataaactcgaatccacatcttaatgctgaagtcaaatttggtaccctggaggattacttctctacattgagagatgaagctgaaaagataaactattcacggtcaggtcaattgggttctgctgagctgcaaggtttcccaacactttcaggagatttctttacctatgcggatagaaatcaggattactggagtggttactatgtatcaaggccattcttcaaagctgttgaccgtgtactagaacagacactccgtgcctcagagattttgggttcatttgttctaggatactgtcagaagtttcagtgtgcaaaactccccatcagtttctcacacaaactgacagcagcaaggaggaatttggctctttttcagcatcatgatggggtaactggcacagctaaagatcatgttgtggtagactatgggacgcgaatgcacacttcactgcaagatctacagttatttatgtccagggcaatcgaagttcttttaggagatttccacgatagatctgaccctacattattatcacattttgagcctgtgcaggaacggtcaaagtatgatgttcagccggtacataaggttcttcttcctcatgaagggaaggcacagtcagttgtattttttaacccattagagcagacaagggatgagattgttatggttgttgtaagtagtccagatgtttctgttattaattcaaatgggtcctgtttgccaagtcaactttcccctgagtggcagtttgtcagcgatgaaaagatttcgactggtcggcaccgcctttattggagagcttctgttcctccactaggtttggagacctactatgtggttactgggcaggattgtgaaaaggctattcctgctgtagtgaaaacatacacagctgcacaggaatttccttgccctgaaccatatgaatgttcaaagctggaaggcaaaacagtggagatgaagaactccaattacactctttcttttgatacatgtcatggtctcctccagacagtaactcgtcacaagtatggggaacaaactgtggtaggtgaagaaattggcatgtatagaagccatggaagcggggcatacttgttcaaaccacttggggaagctcgctcaattgttgaggaaggaggatatttcatccttactgaagggccattggttcaagaagcccattctctaccaaagacagagtggcctaagtcacctctctcacatagtacacgcatgtacaattgtggagattctatacaggacatgctgatagagaaggaataccatgttgatcttgttggccatgcttttaatgatagggaactgattgtcagatacaagacagatattgacaaccaaaggatcttctattctgatctaaatggctttcagacgagtaggaggcagacatatgataagattcctctacagggaaattattacccaatgccatcacttgccttcttgcaggattcacatggtaatcgattttctgtacactctaaacagtcattgggcgcagcaagcttgaaaaatggatggctagagattatgttggatcgtaggttggttcaggatgatggccgtggtctggggcagggagtaatggacaacaagcccatgaatgttatatttcatctcctcatggagtccaatgtctcagctttgccccaaacccatagcttgcttactcttcaaccttctctcctctcgcaccgtgttggggcgcacctgaactacccaatgcatgcttttatgagcaaaaaacctcatgaaaaatccttcaagctggttcaacagtcatttgctccattaactgcttctttgccctgtgatgtacatattgtgaacctgaaggtcccacagcccctaagattttctcacacagaagcagcagagccaagatttgctgttctgttgcacaggagaggctgggacgcatcatactgcaaaaggggtggactggagtgtacaacagttggggaagagccagtaaatctgttctacatgttcaaagatttgtcagctgtgaatgtgaaggcgacttcgctgaacctcttatatgatgaccctgaaatgctaggttaccttcagcagatcggtgatgttggtcaggagggaaacgttcttatctcaccaatggagattcaggcgtacaagttagacttacagccaccatcatcgcaggaagagtagtttgtggaatcagtacatgcatattgaacagttctacaagacagtgaagatggatcttcccgaaatactttaatagtggcagctagtaccggaacagcagtgttgcatgtatatatgtcattttcttggcatacagttagtgattggacctatggaagttgctggaagttgtcgttgaggcatttggttgcagccttgttatccacgaaggtgcatgcccttgttcttggtatcatgctcaacagattggaaagatctggagcacattgaagcagagctaatttgatttgggtagacctatgtgttcacacgaccagtgttgattcgtccaatgctaacacgacaataacttgtatcagagcaagttttgtaattctgtcttgtttgcatcctttttgtaggtgccatcatcccgctgaccaaaaaaaactcggtttatactgtgtgtacaaaattttgcttgtaagcatgcgaggattgcaggaaatgctttctttttcgaggcattttcatgggtcctggctacaaagctcaccagctttaacgttgtttgatcctgtattgtttgctgcaatatattgccaaaccagagcacctaaaattccgcttgctactgtat

SEQ ID NO: 79093 - DNA, 1073 bp, Zea Mays
ccatcccgatcccgaaaccggcggcgatgcatttcttctccggcagcggcggggcccgctccggcgcactactccccaccacctccaagccgaaggcgcaccaccacctccgttccaagtcctccctctctgcgcccgcctcctcccgccgccgcgggagcctccactccgcgtccactccctactcccgccgcgccctctgcctcgccacgactgccttcgcggtgctgtttatcctggcctttctccgtctcggcttcccctcatcccgctccgccgcgctgtctgcgcccgtccgttcccgcgcgcgcctcagccgcaggcccgccttccgcctccgggactcggccgcggccgaggccgcagcggccgctgtggcgaaccggatcggacgtgaggcgcccgtggatattacgacgagggacctttacgaccggatcgagttcagcgacgtcgacggcggtgcgtggaagcaggggtgggaggtcaagtacaggggcgacgagtgggataccgagaagctcaaggtcttcgtcgcgccgcactcgcacaacgaccccgggtggatccgcaccgtcgaggagtactaccagcgccagtcgcgccacatcctcgataccatcgtcgagtccctctccaaggattcgcggaggaagttcatatgggaggagatgtcatacctggagagatggtggcgcgacgcgccgcccaaaaagcaagaggcactggctaagcttgtccgtgataggcagctcgaaatcgtgagtggtggatgggtcatgaacgatgaggcaaactcccactactttgccatcatagaacagtaacaatgttggaagagatgttctattttgggcaaaacgagaatagcgagtgtcctacctcctccagactccaaaactgatggcgtgagcacaacccccgacaatggagccagttgtgcgacactccctctctagattcccgcgagaaagcaatccaacactcatgaaggatgcgatgccacagcagggtcaaatgcacaaatcactttttttcaaaacattgatctgataaaaagagaagagagagag

SEQ ID NO: 79094 - DNA, 4090 bp, Zea Mays
ccatcccgatcccgaaaccggcggcgatgcatttcttctccggcagcggcggggcccgctccggcgcactactccccaccacctccaagccgaaggcgcaccaccacctccgttccaagtcctccctctctgcgcccgcctcctcccgccgccgcgggagcctccactccgcgtccactccctactcccgccgcgccctctgcctcgccacgactgccttcgcggtgctgtttatcctggcctttctccgtctcggcttcccctcatcccgctccgccgcgctgtctgcgcccgtccgttcccgcgcgcgcctcagccgcaggcccgccttccgcctccgggactcggccgcggccgaggccgcagcggccgctgtggcgaaccggatcggacgtgaggcgcccgtggatattacgacgagggacctttacgaccggatcgagttcagcgacgtcgacggcggtgcgtggaagcaggggtgggaggtcaagtacaggggcgacgagtgggataccgagaagctcaaggtcttcgtcgcgccgcactcgcacaacgaccccgggtggatccgcaccgtcgaggagtactaccagcgccagtcgcgccacatcctcgataccatcgtcgagtccctctccaaggattcgcggaggaagttcatatgggaggagatgtcatacctggagagatggtggcgcgacgcgccgcccaaaaagcaagaggcactggctaagcttgtccgtgataggcagctcgaaatcgtgagtggtggatgggtcatgaacgatgaggcaaactcccactactttgccatcatagaacaggagaatgggtttccgtaacatgttaatccagagaacacactacgaggtgaaaaaggagcttgcaatgaaaaagaatcttgaatatttgtggagacagaactgggatattgaagaaacaactgacatatttgttcacatgatgcccttctattcttatgatattccacacacatgtggaccagaaccagctatctgctgccagtttgactttgctcgaatgcgtggtttcagttatgaatcctgtccatggagagttgatcctgttgagacaaatcctgacaatgtgaaagagagagcaacaaagcttctagatcagtataggaaaaaatcaaccctgtacagaacgaatacacttctcattcctttgggtgatgatttccgatatgttagtatggatgaagcagaggtacaattccgcaattatgagaaactctttgattacataaactcgaatccacatcttaatgctgaagtcaaatttggtaccctggaggattacttctctacattgagagatgaagctgaaaagataaactattcacggtcaggtcaattgggttctgctgagctgcaaggtttcccaacactttcaggagatttctttacctatgcggatagaaatcaggattactggagtggttactatgtatcaaggccattcttcaaagctgttgaccgtgtactagaacagacactccgtgcctcagagattttgggttcatttgttctaggatactgtcagaagtttcagtgtgcaaaactccccatcagtttctcacacaaactgacagcagcaaggaggaatttggctctttttcagcatcatgatggggtaactggcacagctaaagatcatgttgtggtagactatgggacgcgaatgcacacttcactgcaagatctacagttatttatgtccagggcaatcgaagttcttttaggagatttccacgatagatctgaccctacattattatcacattttgagcctgtgcaggaacggtcaaagtatgatgttcagccggtacataaggttcttcttcctcatgaagggaaggcacagtcagttgtattttttaacccattagagcagacaagggatgagattgttatggttgttgtaagtagtccagatgtttctgttattaattcaaatgggtcctgtttgccaagtcaactttcccctgagtggcagtttgtcagcgatgaaaagatttcgactggtcggcaccgcctttattggagagcttctgttcctccactaggtttggagacctactatgtggttactgggcaggattgtgaaaaggctattcctgctgtagtgaaaacatacacagctgcacaggaatttccttgccctgaaccatatgaatgttcaaagctggaaggcaaaacagtggagatgaagaactccaattacactctttcttttgatacatgtcatggtctcctccagacagtaactcgtcacaagtatggggaacaaactgtggtaggtgaagaaattggcatgtatagaagccatggaagcggggcatacttgttcaaaccacttggggaagctcgctcaattgttgaggaaggaggatatttcatccttactgaagggccattggttcaagaagcccattctctaccaaagacagagtggcctaagtcacctctctcacatagtacacgcatgtacaattgtggagattctatacaggacatgctgatagagaaggaataccatgttgatcttgttggccatgcttttaatgatagggaactgattgtcagatacaagacagatattgacaaccaaaggatcttctattctgatctaaatggctttcagacgagtaggaggcagacatatgataagattcctctacagggaaattattacccaatgccatcacttgccttcttgcaggattcacatggtaatcgattttctgtacactctaaacagtcattgggcgcagcaagcttgaaaaatggatggctagagattatgttggatcgtaggttggttcaggatgatggccgtggtctggggcagggagtaatggacaacaagcccatgaatgttatatttcatctcctcatggagtccaatgtctcagctttgccccaaacccatagcttgcttactcttcaaccttctctcctctcgcaccgtgttggggcgcacctgaactacccaatgcatgcttttatgagcaaaaaacctcatgaaaaatccttcaagctggttcaacagtcatttgctccattaactgcttctttgccctgtgatgtacatattgtgaacctgaaggtcccacagcccctaagattttctcacacagaagcagcagagccaagatttgctgttctgttgcacaggagaggctgggacgcatcatactgcaaaaggggtggactggagtgtacaacagttggggaagagccagtaaatctgttctacatgttcaaagatttgtcagctgtgaatgtgaaggcgacttcgctgaacctcttatatgatgaccctgaaatgctaggttaccttcagcagatcggtgatgttggtcaggagggaaacgttcttatctcaccaatggagattcaggcgtacaagttagacttacagccaccatcatcgcaggaagagtagtttgtggaatcagtacatgcatattgaacagttctacaagacagtgaagatggatcttcccgaaatactttaatagtggcagctagtaccggaacagcagtgttgcatgtatatatgtcattttcttggcatacagttagtgattggacctatggaagttgctggaagttgtcgttgaggcatttggttgcagccttgttatccacgaaggtgcatgcccttgttcttggtatcatgctcaacagattggaaagatctggagcacattgaagcagagctaatttgatttgggtagacctatgtgttcacacgaccagtgttgattcgtccaatgctaacacgacaataacttgtatcagagcaagttttgtaattctgtcttgtttgcatcctttttgtaggtgccatcatcccgctgaccaaaaaaaactcggtttatactgtgtgtacaaaattttgcttgtaagcatgcgaggattgcaggaaatgctttctttttcgaggcattttcatgggtcctggctacaaagctcaccagctttaacgttgtttgatcctgtattgtttgctgcaatatattgccaaaccagagcacctaaaattccgcttgctactgtat

SEQ ID NO: 79095 - DNA, 2773 bp, Zea Mays
cacaggggcagcggggccatccatgtccatagtccattcccctgccgagcaacgaaaccccttttgtttcgctggaaagccagagccggccaggaggaggagggccggtcacttggtgttggcggtggtggattccacttcctccggcgcgcgcggcagggccaggggctggccgtagaaacgtatcgccggaggagactgtcgtcgtcgtcgcctcatttatttgctagcttttgcgctggtttctgtccgagtgcgggatgtgtaagccaaaagaagctgcgtttcttggggatcgggcgctgtatataagcatgtgattcgcgcaagaagcagccgagaggagttgccagagcgtcaagtctggttcgccgcacggcgtcgcgacgccgacggtcatgtcggggaagacgacgccgacgaaggcgacgctgagccggccatgcgttctggtcatagtgatggcgggcgtggagaggttcgcgaacaagggggtggggtcgaacctggtgacgtacctcaccagcgtcgtgggcatgagcacggcggcggcggccaagagcgtcatcgcctggaacggcgtcagcttcatgctgccgctcgtcagcgccgtcctggctgactccgcccactgggaccgctactgcaccatcgccgcctcctccttgctctacgtcttggtaactccatcatcgtcgtagcctcttaattaattcattcattacatgtccgataatctttatgacatattattagctgtctggcttagagtgcatgccaatcaggagttctggaacaagtatgaaatctagaattaatggctcctatgtccgtttctgaacattgtaataattaattacggtggaaccaaaatgagcaaatgcgatgcgatccttaaaaacacttctgaacctctgtttttttcatagcaaaacggaggtgaagcccactttgagggctagtttggaaactctatttttctaaaaaaaaaatctattttttctcagaaaaatagaaaatctttaaaaaatagggttccaaaccaaccctcaattattattactttgtctaaaaaacaggttaccaccactgtccctccttgtccagggaatggtagcgctcacgacatgggcgctgctggggacacggatgccgcgctccacgctcttcttcccgctctacctcatgtccatcgggcaaggcggataccagccttcgctgcaagcgttcggcgccgaccagctgagcatcggggacgacgacgacgacggtgacggcgacaccgagcccggcgcgtcgtcgacgccggaggagaaggccaaggtgaagagcatgttcttccggtggtggtacttcggcatgtgcagcggcagcctgctggggaactccaccatgtcgtacgtccaggacaacctgggctggggcctcggtttcgccatcccctgcgccgtcatggctctgtccgtcgcggcctttttctgctgcacccctctgtacaagcggcaccggcaggtgcagcagccgaagggcaccggtattaggccgtccccgagtagcgtcttcaacttcaagtcggttctcggcgctagccgaaagatcagtctgccgccgtcgagatcatcagacgacaatggcgacgccatttctgagcttgagttgcaagagaagccactgaaaactgatgaagcatcagagtcctcccctgacgaggctgccgctgctcccggcgtggccaaggtcatactcggcctcctgccgatctgggcgatcctgctcgtcttcgcggtgatcttccagcagccgatgaccttcttcaccaagcaaggcatgctgatgaaccacacgatcggcgtcggcgtcggctccggctccctggtgatcccgccggcgatgctgcagagctcgatcaccgtctccatcatcctgctcgtgcccatgtacgatcggatgatcgtcccgctgaccaacgccgtcacggggggcagcgacggcatcacggtgctccagcggatcggcgtcggcatggtcctctccgtggtggccatggtcgccgcggcgctcgtcgagtcgcggcggctccgcgcggagcccgccctgctgagcatcttctggctcctgccgcagtacgtcctgctgggggtctccgacgtgttcaccgtggtggggatgcaggagttcttctactcgcaggtgccggcctccatgaggaccaccggcatcgggctctacctcagcgtcttcggcgtcggcggattcctcggcgcgtccctcatcaccctgctcgagatggccacggcgaggcccggcaacgcccgcggatggttctctgacgacccgcgggaggcgcggatagataacttctactggttcttggctctcctctgcttcgtcagctttgtcgtcttcacgcacttgtgcaagtactacaacgacagatctgcgtcagggaggtaggatcgacccgagtaattaagctgggggtggacgagaggatcttcgatcttgattttgcttgacaccttgagtgaaaactcattacttgtattttcagggcgattctagctagagatagttcgtctgtgtaatgttttcagaaagacatgtaattcaggactctagacgtaatggttgtgttccaacacttgtacaaagcttgtcttgtgatttgataggcaaaagataatactctctccgattcttcgttcttttttatttgtcgccgttcagttcaaaaataactagtgaacggcaaatattcgaaaactgaggtagt

SEQ ID NO: 79096 - DNA, 2313 bp, Zea Mays
ttttgtttcgctggaaagccagagccggccaggaggaggagggccggtcacttggtgttggcggtggtggattccacttcctccggcgcgcgcggcagggccaggggctggccgtagaaacgtatcgccggaggagactgtcgtcgtcgtcgcctcatttatttgctagcttttgcgctggtttctgtccgagtgcgggatgtgtaagccaaaagaagctgcgtttcttggggatcgggcgctgtatataagcatgtgattcgcgcaagaagcagccgagaggagttgccagagcgtcaagtctggttcgccgcacggcgtcgcgacgccgacggtcatgtcggggaagacgacgccgacgaaggcgacgctgagccggccatgcgttctggtcatagtgatggcgggcgtggagaggttcgcgaacaagggggtggggtcgaacctggtgacgtacctcaccagcgtcgtgggcatgagcacggcggcggcggccaagagcgtcatcgcctggaacggcgtcagcttcatgctgccgctcgtcagcgccgtcctggctgactccgcccactgggaccgctactgcaccatcgccgcctcctccttgctctacgtcttggttaccaccactgtccctccttgtccagggaatggtagcgctcacgacatgggcgctgctggggacacggatgccgcgctccacgctcttcttcccgctctacctcatgtccatcgggcaaggcggataccagccttcgctgcaagcgttcggcgccgaccagctgagcatcggggacgacgacgacgacggtgacggcgacaccgagcccggcgcgtcgtcgacgccggaggagaaggccaaggtgaagagcatgttcttccggtggtggtacttcggcatgtgcagcggcagcctgctggggaactccaccatgtcgtacgtccaggacaacctgggctggggcctcggtttcgccatcccctgcgccgtcatggctctgtccgtcgcggcctttttctgctgcacccctctgtacaagcggcaccggcaggtgcagcagccgaagggcaccggtattaggccgtccccgagtagcgtcttcaacttcaagtcggttctcggcgctagccgaaagatcagtctgccgccgtcgagatcatcagacgacaatggcgacgccatttctgagcttgagttgcaagagaagccactgaaaactgatgaagcatcagagtcctcccctgacgaggctgccgctgctcccggcgtggccaaggtcatactcggcctcctgccgatctgggcgatcctgctcgtcttcgcggtgatcttccagcagccgatgaccttcttcaccaagcaaggcatgctgatgaaccacacgatcggcgtcggcgtcggctccggctccctggtgatcccgccggcgatgctgcagagctcgatcaccgtctccatcatcctgctcgtgcccatgtacgatcggatgatcgtcccgctgaccaacgccgtcacggggggcagcgacggcatcacggtgctccagcggatcggcgtcggcatggtcctctccgtggtggccatggtcgccgcggcgctcgtcgagtcgcggcggctccgcgcggagcccgccctgctgagcatcttctggctcctgccgcagtacgtcctgctgggggtctccgacgtgttcaccgtggtggggatgcaggagttcttctactcgcaggtgccggcctccatgaggaccaccggcatcgggctctacctcagcgtcttcggcgtcggcggattcctcggcgcgtccctcatcaccctgctcgagatggccacggcgaggcccggcaacgcccgcggatggttctctgacgacccgcgggaggcgcggatagataacttctactggttcttggctctcctctgcttcgtcagctttgtcgtcttcacgcacttgtgcaagtactacaacgacagatctgcgtcagggaggtaggatcgacccgagtaattaagctgggggtggacgagaggatcttcgatcttgattttgcttgacaccttgagtgaaaactcattacttgtattttcagggcgattctagctagagatagttcgtctgtgtaatgttttcagaaagacatgtaattcaggactctagacgtaatggttgtgttccaacacttgtacaaagcttgtcttgtgatttgataggcaaaagataatactctctccgattcttcgttcttttttatttgtcgccgttcagttcaaaaataactagtgaacggcaaatattcgaaaactgaggtagt

SEQ ID NO: 79097 - DNA, 2390 bp, Zea Mays
ggtaaaggccaaaaccggcccgacatgatccagaaccttacctctccacgcatcaacaaatgctccccctctcaaagcccgcctccggtttccgtcccccatcctcctccgccccccagccgccgcatccaatggagtcctcgctcctcctctctaccccgcgcccgctcaagcccttccatccgcatcacttccccaccgctcgtcgtcgcgacgcgtccttccgcgggaagccccctccgccgccgcccctgccaccgctcggacgcggcagccgccggttgggtcgggcggtgccgcgcgcctcgagcgaggcgttcggcgacggattccgcagccaggacaggcctcccggggttagcagcgggggtgttcgccggaggacctaccgcgaggcgcagggcgaggcggccgtgccacccgtggccgcggccgcgagagcagtcgcgccctacgtcgccccggtcggggcagtactcatgctgagctttgtcatatggaaggtggttcagaatatgattccagggaagaaaaaggatcatggttctggaaaacatgcgccttctggtatcatgtggtccttcgctgctggctccaatttggcaacatctaccctcagtgctgaaaaggagtcgcggaaaaatctgaacaagttctacaaagaacttcgaactttgaaaactgttaacatggctggtcgtcagtttggagatgagggcctgttttttctagcagaaagcttagcctatgacaagagtgcagaagaggtggacttttctggcaatgggataacagctgtggggatagaagcctttgatggagttcttcagataaacacaactttgaaaactctcaatttatctggaaatgacatcggggatgaaggagctaagatatattggttgaaaatgtgggtatccagaaactcctcctgaacagtatcaatattggggacgagggtgccaaggcactttcgaacatgctgaaaaagaataaatcaatacgtattctacagttcagcaataatgcaattgaatacagtggttttgcaagtattgcagaagcccttttagagaataatacgatacggagcttgtatctcaatggcaactatggtggtccccttggtgcatgcagcctagctcaaggaattctagggaataagtctttaagggaaattcacttgcatggtaatgggattgggaatgagggaatacgtgagttgatgtctgcattatctgctcacaaagggaagatcacagttgtggatattggcaacaacaacattagcccggaaggtttacatcctgtagccgagttcctcaaaaggacaaagtccttacagtggttcagtctctacatgaacgatattagtgatgagggagctgaaaaggttgctgaggctctgaaagataacaaaacaatttctaccatagacttgggtggcaataacattcactccaaagctgttagtgcagtagcggaaactttgaaggataatgcagtgctgacaacactggatttgagctacaatccaattggatcagacggagtaaaggctttgtgcgatgtcctcaagttccatgggaagatccaaacccttaagctcggctggtgccagataggcatggaaggtgcagagtgtattgccgactgtctcaagtacaacacaacgttatcgacattggatctgcgggcaaacgggcttggaaacgatggtgctatatgcttggcgcgaagtttcaagataatcaacgaatcgttgacgtcccttgacctgggtttcaatgagattcgagacgacggagcattcgcattggcacaggcgctcaaggctaacgaggatctggcggtcacgtcattaaatctcgcaaacaacttcttcacgaaattcggacaggtcgctctttctgaggcgcgggaccatgtgtacgagatgaccgaacgggagatagacatttatttttaggggggtaccggttcccctgtgcacacagttagcacaggacatgaccgatgcttgtttgtcgagtaggttgaagaataaggtcgcgcggtagagcgatggtttatcctttgtataggaaaattttggtgggttagttaaatatttttagttactatgtaggttagccattcgatcaggtgtctatatgcaagttttgctggaaacgtcggtgtcgttttgaaccattcgtattattggttgaaaatggaatggatatgacgggcatcacatgcaaactgattcttttttgtggaggacttcactgatgtggtggtgtgtgttcctcggaagttgaaatgtattctcatgccatccatgtgggatggtgttggtaacctcagacctgtcgtaggctgttgtgaatgtcacacaaagatttcgc

SEQ ID NO: 79098 - DNA, 3039 bp, Zea Mays
gtaaaggccaaaaccggcccgacatgatccagaaccttacctctccacgcatcaacaaatgctccccctctcaaagcccgcctccggtttccgtcccccatcctcctccgccccccagccgccgcatccaatggagtcctcgctcctcctctctaccccgcgcccgctcaagcccttccatccgcatcacttccccaccgctcgtcgtcgcgacgcgtccttccgcgggaagccccctccgccgccgcccctgccaccgctcggacgcggcagccgccggttgggtcgggcggtgccgcgcgcctcgagcgaggcgttcggcgacggattccgcagccaggacaggcctcccggggttagcagcgggggtgttcgccggaggacctaccgcgaggcgcagggcgaggcggccgtgccacccgtggccgcggccgcgagagcagtcgcgccctacgtcgccccggtcggggcagtactcatgctgagctttgtcatatggaaggtggttcagaatatgattccagggaagaaaaaggatcatggttctggaaaacatgcgccttctggtatcatgtggtccttcgctgctggctccaatttggcaacatctaccctcagtgctgaaaaggagtcgcggaaaaatctgaacaagttctacaaagaacttcgaactttgaaaactgttaacatggctggtcgtcagtttggagatgagggcctgttttttctagcagaaagcttagcctatgacaagagtgcagaagaggtggacttttctggcaatgggataacagctgtggggatagaagcctttgatggagttcttcagataaacacaactttgaaaactctcaatttatctggaaatgacatcggggatgaaggagctaagatatattggttgaaaatgtgggtatccagaaactcctcctgaacagtatcaatattggggacgagggtgccaaggcactttcgaacatgctgaaaaagaataaatcaatacgtattctacagttcagcaataatgcaattgaatacagtggttttgcaagtattgcagaagcccttttagagaataatacgatacggagcttgtatctcaatggcaactatggtggtccccttggtgcatgcagcctagctcaaggaattctagggaataagtctttaagggtactacttaagacacttggttatatacttccagtcttccacatagttttaatgtttttttttttgtaaaattttaaatgtttgaaagtgaagcagattgaattccatctttgcttatgcatcaagttatggagaagtgtctgtttcagctttctgaaggggtagtagtattttgaaactttcaggtttggctatatgtccaaagcgtatggatcaatttgccttctcactactttatgctaaccgcacaatatggttggatttcaggatacatatctgtaaagcatggagtgtatagtaggacttgcacacaaagagcattttattaacttttcttgcttagatgataaaaacctattggtaatctgtaagtcttgctgtggcaatattggtagaatgattaccaatagaagtatagaactcttctgtaccaatgtgctacctatgaccaaatggaactatttattatttaagactgtaggttcgaaattaatgtgtttgaagttcttcgatctctgttcatagccccccccccccccccccccaaaaaaaaatgtttattactgtttggtatttttgtctatttctaactttgtatattatattcaatttacctatcatggttatgatatgtaagcatttaaccttcactaggaaattcacttgcatggtaatgggattgggaatgagggaatacgtgagttgatgtctgcattatctgctcacaaagggaagatcacagttgtggatattggcaacaacaacattagcccggaaggtttacatcctgtagccgagttcctcaaaaggacaaagtccttacagtggttcagtctctacatgaacgatattagtgatgagggagctgaaaaggttgctgaggctctgaaagataacaaaacaatttctaccatagacttgggtggcaataacattcactccaaagctgttagtgcagtagcggaaactttgaaggataatgcagtgctgacaacactggatttgagctacaatccaattggatcagacggagtaaaggctttgtgcgatgtcctcaagttccatgggaagatccaaacccttaagctcggctggtgccaggcatggaaggtgcagagtgtattgccgactgtctcaagtacaacacaacgttatcgacattggatctgcgggcaaacgggcttggaaacgatggtgctatatgcttggcgcgaagtttcaagataatcaacgaatcgttgacgtcccttgacctgggtttcaatgagattcgagacgacggagcattcgcattggcacaggcgctcaaggctaacgaggatctggcggtcacgtcattaaatctcgcaaacaacttcttcacgaaattcggacaggtcgctctttctgaggcgcgggaccatgtgtacgagatgaccgaacgggagatagacatttatttttaggggggtaccggttcccctgtgcacacagttagcacaggacatgaccgatgcttgtttgtcgagtaggttgaagaataaggtcgcgcggtagagcgatggtttatcctttgtataggaaaattttggtgggttagttaaatatttttagttactatgtaggttagccattcgatcaggtgtctatatgcaagttttgctggaaacgtcggtgtcgttttgaaccattcgtattattggttgaaaatggaatggatatgacgggcatcacatgcaaactgattcttttttgtggaggacttcactgatgtggtggtgtgtgttcctcggaagttgaaatgtattctcatgccatccatgtgggatggtgttggtaacctcagacctgtcgtaggctgttgtgaatgtcacacaaagatttcgc

SEQ ID NO: 79099 - DNA, 2955 bp, Zea Mays
gtaaaggccaaaaccggcccgacatgatccagaaccttacctctccacgcatcaacaaatgctccccctctcaaagcccgcctccggtttccgtcccccatcctcctccgccccccagccgccgcatccaatggagtcctcgctcctcctctctaccccgcgcccgctcaagcccttccatccgcatcacttccccaccgctcgtcgtcgcgacgcgtccttccgcgggaagccccctccgccgccgcccctgccaccgctcggacgcggcagccgccggttgggtcgggcggtgccgcgcgcctcgagcgaggcgttcggcgacggattccgcagccaggacaggcctcccggggttagcagcgggggtgttcgccggaggacctaccgcgaggcgcagggcgaggcggccgtgccacccgtggccgcggccgcgagagcagtcgcgccctacgtcgccccggtcggggcagtactcatgctgagctttgtcatatggaaggtggttcagaatatgattccagggaagaaaaaggatcatggttctggaaaacatgcgccttctggtatcatgtggtccttcgctgctggctccaatttggcaacatctaccctcagtgctgaaaaggagtcgcggaaaaatctgaacaagttctacaaagaacttcgaactttgaaaactgttaacatggctggtcgtcagtttggagatgagggcctgttttttctagcagaaagcttagcctatgacaagagtgcagaagaggtggacttttctggcaatgggataacagctgtggggatagaagcctttgatggagttcttcagataaacacaactttgaaaactctcaatttatctggaaatgacatcggggatgaaggagctaagatatattggttgaaaatgtgggtatccagaaactcctcctgaacagtatcaatattggggacgagggtgccaaggcactttcgaacatgctgaaaaagaataaatcaatacgtattctacagttcagcaataatgcaattgaatacagtggttttgcaagtattgcagaagcccttttagagaataatacgatacggagcttgtatctcaatggcaactatggtggtccccttggtgcatgcagcctagctcaaggaattctagggaataagtctttaaggtgaagcagattgaattccatctttgcttatgcatcaagttatggagaagtgtctgtttcagctttctgaaggggtagtagtattttgaaactttcaggtttggctatatgtccaaagcgtatggatcaatttgccttctcactactttatgctaaccgcacaatatggttggatttcaggatacatatctgtaaagcatggagtgtatagtaggacttgcacacaaagagcattttattaacttttcttgcttagatgataaaaacctattggtaatctgtaagtcttgctgtggcaatattggtagaatgattaccaatagaagtatagaactcttctgtaccaatgtgctacctatgaccaaatggaactatttattatttaagactgtaggttcgaaattaatgtgtttgaagttcttcgatctctgttcatagccccccccccccccccccccaaaaaaaaatgtttattactgtttggtatttttgtctatttctaactttgtatattatattcaatttacctatcatggttatgatatgtaagcatttaaccttcactaggaaattcacttgcatggtaatgggattgggaatgagggaatacgtgagttgatgtctgcattatctgctcacaaagggaagatcacagttgtggatattggcaacaacaacattagcccggaaggtttacatcctgtagccgagttcctcaaaaggacaaagtccttacagtggttcagtctctacatgaacgatattagtgatgagggagctgaaaaggttgctgaggctctgaaagataacaaaacaatttctaccatagacttgggtggcaataacattcactccaaagctgttagtgcagtagcggaaactttgaaggataatgcagtgctgacaacactggatttgagctacaatccaattggatcagacggagtaaaggctttgtgcgatgtcctcaagttccatgggaagatccaaacccttaagctcggctggtgccagataggcatggaaggtgcagagtgtattgccgactgtctcaagtacaacacaacgttatcgacattggatctgcgggcaaacgggcttggaaacgatggtgctatatgcttggcgcgaagtttcaagataatcaacgaatcgttgacgtcccttgacctgggtttcaatgagattcgagacgacggagcattcgcattggcacaggcgctcaaggctaacgaggatctggcggtcacgtcattaaatctcgcaaacaacttcttcacgaaattcggacaggtcgctctttctgaggcgcgggaccatgtgtacgagatgaccgaacgggagatagacatttatttttaggggggtaccggttcccctgtgcacacagttagcacaggacatgaccgatgcttgtttgtcgagtaggttgaagaataaggtcgcgcggtagagcgatggtttatcctttgtataggaaaattttggtgggttagttaaatatttttagttactatgtaggttagccattcgatcaggtgtctatatgcaagttttgctggaaacgtcggtgtcgttttgaaccattcgtattattggttgaaaatggaatggatatgacgggcatcacatgcaaactgattcttttttgtggaggacttcactgatgtggtggtgtgtgttcctcggaagttgaaatgtattctcatgccatccatgtgggatggtgttggtaacctcagacctgtcgtaggctgttgtgaatgtcacacaaagatttcgc

SEQ ID NO: 79100 - DNA, 2315 bp, Zea Mays
caaaaccggcccgacatgatccagaaccttacctctccacgcatcaacaaatgctccccctctcaaagcccgcctccggtttccgtcccccatcctcctccgccccccagccgccgcatccaatggagtcctcgctcctcctctctaccccgcgcccgctcaagcccttccatccgcatcacttccccaccgctcgtcgtcgcgacgcgtccttccgcgggaagccccctccgccgccgcccctgccaccgctcggacgcggcagccgccggttgggtcgggcggtgccgcgcgcctcgagcgaggcgttcggcgacggattccgcagccaggacaggcctcccggggttagcagcgggggtgttcgccggaggacctaccgcgaggcgcagggcgaggcggccgtgccacccgtggccgcggccgcgagagcagtcgcgccctacgtcgccccggtcggggcagtactcatgctgagctttgtcatatggaaggtggttcagaatatgattccagggaagaaaaaggatcatggttctggaaaacatgcgccttctggtatcatgtggtccttcgctgctggctccaatttggcaacatctaccctcagtgctgaaaaggagtcgcggaaaaatctgaacaagttctacaaagaacttcgaactttgaaaactgttaacatggctggtcgtcagtttggagatgagggcctgttttttctagcagaaagcttagcctatgacaagagtgcagaagaggtggacttttctggcaatgggataacagctgtggggatagaagcctttgatggagttcttcagataaacacaactttgaaaactctcaatttatctggaaatgacatcggggatgaaggagctaagtgtctttcagatatattggttgaaaatgtgggtatccagaaactcctcctgaacagtatcaatattggggacgagggtgccaaggcactttcgaacatgctgaaaaagaataaatcaatacgtattctacagttcagcaataatgcaattgaatacagtggttttgcaagtattgcagaagcccttttagagaataatacgatacggagcttgtatctcaatggcaactatggtggtccccttggtgcatgcagcctagctcaaggaattctagggaataagtctttaaggggaagatcacagttgtggatattggcaacaacaacattagcccggaaggtttacatcctgtagccgagttcctcaaaaggacaaagtccttacagtggttcagtctctacatgaacgatattagtgatgagggagctgaaaaggttgctgaggctctgaaagataacaaaacaatttctaccatagacttgggtggcaataacattcactccaaagctgttagtgcagtagcggaaactttgaaggataatgcagtgctgacaacactggatttgagctacaatccaattggatcagacggagtaaaggctttgtgcgatgtcctcaagttccatgggaagatccaaacccttaagctcggctggtgccagataggcatggaaggtgcagagtgtattgccgactgtctcaagtacaacacaacgttatcgacattggatctgcgggcaaacgggcttggaaacgatggtgctatatgcttggcgcgaagtttcaagataatcaacgaatcgttgacgtcccttgacctgggtttcaatgagattcgagacgacggagcattcgcattggcacaggcgctcaaggctaacgaggatctggcggtcacgtcattaaatctcgcaaacaacttcttcacgaaattcggacaggtcgctctttctgaggcgcgggaccatgtgtacgagatgaccgaacgggagatagacatttatttttaggggggtaccggttcccctgtgcacacagttagcacaggacatgaccgatgcttgtttgtcgagtaggttgaagaataaggtcgcgcggtagagcgatggtttatcctttgtataggaaaattttggtgggttagttaaatatttttagttactatgtaggttagccattcgatcaggtgtctatatgcaagttttgctggaaacgtcggtgtcgttttgaaccattcgtattattggttgaaaatggaatggatatgacgggcatcacatgcaaactgattcttttttgtggaggacttcactgatgtggtggtgtgtgttcctcggaagttgaaatgtattctcatgccatccatgtgggatggtgttggtaacctcagacctgtcgtaggctgttgtgaatgtcacacaaagatttcgc

SEQ ID NO: 79101 - DNA, 2830 bp, Zea Mays
ccagaaccttacctctccacgcatcaacaaatgctccccctctcaaagcccgcctccggtttccgtcccccatcctcctccgccccccagccgccgcatccaatggagtcctcgctcctcctctctaccccgcgcccgctcaagcccttccatccgcatcacttccccaccgctcgtcgtcgcgacgcgtccttccgcgggaagccccctccgccgccgcccctgccaccgctcggacgcggcagccgccggttgggtcgggcggtgccgcgcgcctcgagcgaggcgttcggcgacggattccgcagccaggacaggcctcccggggttagcagcgggggtgttcgccggaggacctaccgcgaggcgcagggcgaggcggccgtgccacccgtggccgcggccgcgagagcagtcgcgccctacgtcgccccggtcggggcagtactcatgctgagctttgtcatatggaaggtggttcagaatatgattccagggaagaaaaaggatcatggttctggaaaacatgcgccttctggtatcatgtggtccttcgctgctggctccaatttggcaacatctaccctcagtgctgaaaaggagtcgcggaaaaatctgaacaagttctacaaagaacttcgaactttgaaaactgttaacatggctggtcgtcagtttggagatgagggcctgttttttctagcagaaagcttagcctatgacaagagtgcagaagaggtggacttttctggcaatgggataacagctgtggggatagaagcctttgatggagttcttcagataaacacaactttgaaaactctcaatttatctggaaatgacatcggggatgaaggagctaagatatattggttgaaaatgtgggtatccagaaactcctcctgaacagtatcaatattggggacgagggtgccaaggcactttcgaacatgctgaaaaagaataaatcaatacgtattctacagttcagcaataatgcaattgaatacagtggttttgcaagtattgcagaagcccttttagagaataatacgatacggagcttgtatctcaatggcaactatggtggtccccttggtgcatgcagcctagctcaaggaattctagggaataagtctttaagggtttggctatatgtccaaagcgtatggatcaatttgccttctcactactttatgctaaccgcacaatatggttggatttcaggatacatatctgtaaagcatggagtgtatagtaggacttgcacacaaagagcattttattaacttttcttgcttagatgataaaaacctattggtaatctgtaagtcttgctgtggcaatattggtagaatgattaccaatagaagtatagaactcttctgtaccaatgtgctacctatgaccaaatggaactatttattatttaagactgtaggttcgaaattaatgtgtttgaagttcttcgatctctgttcatagccccccccccccccccccccaaaaaaaaatgtttattactgtttggtatttttgtctatttctaactttgtatattatattcaatttacctatcatggttatgatatgtaagcatttaaccttcactaggaaattcacttgcatggtaatgggattgggaatgagggaatacgtgagttgatgtctgcattatctgctcacaaagggaagatcacagttgtggatattggcaacaacaacattagcccggaaggtttacatcctgtagccgagttcctcaaaaggacaaagtccttacagtggttcagtctctacatgaacgatattagtgatgagggagctgaaaaggttgctgaggctctgaaagataacaaaacaatttctaccatagacttgggtggcaataacattcactccaaagctgttagtgcagtagcggaaactttgaaggataatgcagtgctgacaacactggatttgagctacaatccaattggatcagacggagtaaaggctttgtgcgatgtcctcaagttccatgggaagatccaaacccttaagctcggctggtgccagataggcatggaaggtgcagagtgtattgccgactgtctcaagtacaacacaacgttatcgacattggatctgcgggcaaacgggcttggaaacgatggtgctatatgcttggcgcgaagtttcaagataatcaacgaatcgttgacgtcccttgacctgggtttcaatgagattcgagacgacggagcattcgcattggcacaggcgctcaaggctaacgaggatctggcggtcacgtcattaaatctcgcaaacaacttcttcacgaaattcggacaggtcgctctttctgaggcgcgggaccatgtgtacgagatgaccgaacgggagatagacatttatttttaggggggtaccggttcccctgtgcacacagttagcacaggacatgaccgatgcttgtttgtcgagtaggttgaagaataaggtcgcgcggtagagcgatggtttatcctttgtataggaaaattttggtgggttagttaaatatttttagttactatgtaggttagccattcgatcaggtgtctatatgcaagttttgctggaaacgtcggtgtcgttttgaaccattcgtattattggttgaaaatggaatggatatgacgggcatcacatgcaaactgattcttttttgtggaggacttcactgatgtggtggtgtgtgttcctcggaagttgaaatgtattctcatgccatccatgtgggatggtgttggtaacctcagacctgtcgtaggctgttgtgaatgtcacacaaagatttcgc

SEQ ID NO: 79102 - DNA, 2943 bp, Zea Mays
ccagaaccttacctctccacgcatcaacaaatgctccccctctcaaagcccgcctccggtttccgtcccccatcctcctccgccccccagccgccgcatccaatggagtcctcgctcctcctctctaccccgcgcccgctcaagcccttccatccgcatcacttccccaccgctcgtcgtcgcgacgcgtccttccgcgggaagccccctccgccgccgcccctgccaccgctcggacgcggcagccgccggttgggtcgggcggtgccgcgcgcctcgagcgaggcgttcggcgacggattccgcagccaggacaggcctcccggggttagcagcgggggtgttcgccggaggacctaccgcgaggcgcagggcgaggcggccgtgccacccgtggccgcggccgcgagagcagtcgcgccctacgtcgccccggtcggggcagtactcatgctgagctttgtcatatggaaggtggttcagaatatgattccagggaagaaaaaggatcatggttctggaaaacatgcgccttctggtatcatgtggtccttcgctgctggctccaatttggcaacatctaccctcagtgctgaaaaggagtcgcggaaaaatctgaacaagttctacaaagaacttcgaactttgaaaactgttaacatggctggtcgtcagtttggagatgagggcctgttttttctagcagaaagcttagcctatgacaagagtgcagaagaggtggacttttctggcaatgggataacagctgtggggatagaagcctttgatggagttcttcagataaacacaactttgaaaactctcaatttatctggaaatgacatcggggatgaaggagctaagtgtctttcagatatattggttgaaaatgtgggtatccagaaactcctcctgaacagtatcaatattggggacgagggtgccaaggcactttcgaacatgctgaaaaagaataaatcaatacgtattctacagttcagcaataatgcaattgaatacagtggttttgcaagtattgcagaagcccttttagagaataatacgatacggagcttgtatctcaatggcaactatggtggtccccttggtgcatgcagcctagctcaaggaattctagggaataagtctttaagggtactacttaagacacttggttatatacttccagtcttccacatagttttaatgtttttttttttgtaaaattttaaatgtttgaaagtgaagcagattgaattccatctttgcttatgcatcaagttatggagaagtgtctgtttcagctttctgaaggggtagtagtattttgaaactttcaggatacatatctgtaaagcatggagtgtatagtaggacttgcacacaaagagcattttattaacttttcttgcttagatgataaaaacctattggtaatctgtaagtcttgctgtggcaatattggtagaatgattaccaatagaagtatagaactcttctgtaccaatgtgctacctatgaccaaatggaactatttattatttaagactgtaggttcgaaattaatgtgtttgaagttcttcgatctctgttcatagccccccccccccccccccccaaaaaaaaatgtttattactgtttggtatttttgtctatttctaactttgtatattatattcaatttacctatcatggttatgatatgtaagcatttaaccttcactaggaaattcacttgcatggtaatgggattgggaatgagggaatacgtgagttgatgtctgcattatctgctcacaaagggaagatcacagttgtggatattggcaacaacaacattagcccggaaggtttacatcctgtagccgagttcctcaaaaggacaaagtccttacagtggttcagtctctacatgaacgatattagtgatgagggagctgaaaaggttgctgaggctctgaaagataacaaaacaatttctaccatagacttgggtggcaataacattcactccaaagctgttagtgcagtagcggaaactttgaaggataatgcagtgctgacaacactggatttgagctacaatccaattggatcagacggagtaaaggctttgtgcgatgtcctcaagttccatgggaagatccaaacccttaagctcggctggtgccagataggcatggaaggtgcagagtgtattgccgactgtctcaagtacaacacaacgttatcgacattggatctgcgggcaaacgggcttggaaacgatggtgctatatgcttggcgcgaagtttcaagataatcaacgaatcgttgacgtcccttgacctgggtttcaatgagattcgagacgacggagcattcgcattggcacaggcgctcaaggctaacgaggatctggcggtcacgtcattaaatctcgcaaacaacttcttcacgaaattcggacaggtcgctctttctgaggcgcgggaccatgtgtacgagatgaccgaacgggagatagacatttatttttaggggggtaccggttcccctgtgcacacagttagcacaggacatgaccgatgcttgtttgtcgagtaggttgaagaataaggtcgcgcggtagagcgatggtttatcctttgtataggaaaattttggtgggttagttaaatatttttagttactatgtaggttagccattcgatcaggtgtctatatgcaagttttgctggaaacgtcggtgtcgttttgaaccattcgtattattggttgaaaatggaatggatatgacgggcatcacatgcaaactgattcttttttgtggaggacttcactgatgtggtggtgtgtgttcctcggaagttgaaatgtattctcatgccatccatgtgggatggtgttggtaacctcagacctgtcgtaggctgttgtgaatgtcacacaaagatttcgc

SEQ ID NO: 79103 - DNA, 2361 bp, Zea Mays
cacgcatcaacaaatgctccccctctcaaagcccgcctccggtttccgtcccccatcctcctccgccccccagccgccgcatccaatggagtcctcgctcctcctctctaccccgcgcccgctcaagcccttccatccgcatcacttccccaccgctcgtcgtcgcgacgcgtccttccgcgggaagccccctccgccgccgcccctgccaccgctcggacgcggcagccgccggttgggtcgggcggtgccgcgcgcctcgagcgaggcgttcggcgacggattccgcagccaggacaggcctcccggggttagcagcgggggtgttcgccggaggacctaccgcgaggcgcagggcgaggcggccgtgccacccgtggccgcggccgcgagagcagtcgcgccctacgtcgccccggtcggggcagtactcatgctgagctttgaggacagtcatatggaaggtggttcagaatatgattccagggaagaaaaaggatcatggttctggaaaacatgcgccttctggtatcatgtggtccttcgctgctggctccaatttggcaacatctaccctcagtgctgaaaaggagtcgcggaaaaatctgaacaagttctacaaagaacttcgaactttgaaaactgttaacatggctggtcgtcagtttggagatgagggcctgttttttctagcagaaagcttagcctatgacaagagtgcagaagaggtggacttttctggcaatgggataacagctgtggggatagaagcctttgatggagttcttcagataaacacaactttgaaaactctcaatttatctggaaatgacatcggggatgaaggagctaagtgtctttcagatatattggttgaaaatgtgggtatccagaaactcctcctgaacagtatcaatattggggacgagggtgccaaggcactttcgaacatgctgaaaaagaataaatcaatacgtattctacagttcagcaataatgcaattgaatacagtggttttgcaagtattgcagaagcccttttagagaataatacgatacggagcttgtatctcaatggcaactatggtggtccccttggtgcatgcagcctagctcaaggaattctagggaataagtctttaagggaaattcacttgcatggtaatgggattgggaatgagggaatacgtgagttgatgtctgcattatctgctcacaaagggaagatcacagttgtggatattggcaacaacaacattagcccggaaggtttacatcctgtagccgagttcctcaaaaggacaaagtccttacagtggttcagtctctacatgaacgatattagtgatgagggagctgaaaaggttgctgaggctctgaaagataacaaaacaatttctaccatagacttgggtggcaataacattcactccaaagctgttagtgcagtagcggaaactttgaaggataatgcagtgctgacaacactggatttgagctacaatccaattggatcagacggagtaaaggctttgtgcgatgtcctcaagttccatgggaagatccaaacccttaagctcggctggtgccagataggcatggaaggtgcagagtgtattgccgactgtctcaagtacaacacaacgttatcgacattggatctgcgggcaaacgggcttggaaacgatggtgctatatgcttggcgcgaagtttcaagataatcaacgaatcgttgacgtcccttgacctgggtttcaatgagattcgagacgacggagcattcgcattggcacaggcgctcaaggctaacgaggatctggcggtcacgtcattaaatctcgcaaacaacttcttcacgaaattcggacaggtcgctctttctgaggcgcgggaccatgtgtacgagatgaccgaacgggagatagacatttatttttaggggggtaccggttcccctgtgcacacagttagcacaggacatgaccgatgcttgtttgtcgagtaggttgaagaataaggtcgcgcggtagagcgatggtttatcctttgtataggaaaattttggtgggttagttaaatatttttagttactatgtaggttagccattcgatcaggtgtctatatgcaagttttgctggaaacgtcggtgtcgttttgaaccattcgtattattggttgaaaatggaatggatatgacgggcatcacatgcaaactgattcttttttgtggaggacttcactgatgtggtggtgtgtgttcctcggaagttgaaatgtattctcatgccatccatgtgggatggtgttggtaacctcagacctgtcgtaggctgttgtgaatgtcacacaaagatttcgc

SEQ ID NO: 79104 - DNA, 2440 bp, Zea Mays
aacaaatgctccccctctcaaagcccgcctccggtttccgtcccccatcctcctccgccccccagccgccgcatccaatggagtcctcgctcctcctctctaccccgcgcccgctcaagcccttccatccgcatcacttccccaccgctcgtcgtcgcgacgcgtccttccgcgggaagccccctccgccgccgcccctgccaccgctcggacgcggcagccgccggttgggtcgggcggtgccgcgcgcctcgagcgaggcgttcggcgacggattccgcagccaggacaggcctcccggggttagcagcgggggtgttcgccggaggacctaccgcgaggcgcagggcgaggcggccgtgccacccgtggccgcggccgcgagagcagtcgcgccctacgtcgccccggtcggggcagtactcatgctgagctttgaggacagtcatatggaaggtggttcagaatatgattccagggaagaaaaaggatcatggttctggaaaacatgcgccttctggtatcatgtggtccttcgctgctggctccaatttggcaacatctaccctcagtgctgaaaaggagtcgcggaaaaatctgaacaagttctacaaagaacttcgaactttgaaaactgttaacatggctggtaactcaagggactaaagtttgaatacattgtctggaaatgttgggctaaagctccaacattgtgagtgataactacatctcaatttgcttgacaggtcgtcagtttggagatgagggcctgttttttctagcagaaagcttagcctatgacaagagtgcagaagaggtggacttttctggcaatgggataacagctgtggggatagaagcctttgatggagttcttcagataaacacaactttgaaaactctcaatttatctggaaatgacatcggggatgaaggagctaagatatattggttgaaaatgtgggtatccagaaactcctcctgaacagtatcaatattggggacgagggtgccaaggcactttcgaacatgctgaaaaagaataaatcaatacgtattctacagttcagcaataatgcaattgaatacagtggttttgcaagtattgcagaagcccttttagagaataatacgatacggagcttgtatctcaatggcaactatggtggtccccttggtgcatgcagcctagctcaaggaattctagggaataagtctttaagggaaattcacttgcatggtaatgggattgggaatgagggaatacgtgagttgatgtctgcattatctgctcacaaagggaagatcacagttgtggatattggcaacaacaacattagcccggaaggtttacatcctgtagccgagttcctcaaaaggacaaagtccttacagtggttcagtctctacatgaacgatattagtgatgagggagctgaaaaggttgctgaggctctgaaagataacaaaacaatttctaccatagacttgggtggcaataacattcactccaaagctgttagtgcagtagcggaaactttgaaggataatgcagtgctgacaacactggatttgagctacaatccaattggatcagacggagtaaaggctttgtgcgatgtcctcaagttccatgggaagatccaaacccttaagctcggctggtgccagataggcatggaaggtgcagagtgtattgccgactgtctcaagtacaacacaacgttatcgacattggatctgcgggcaaacgggcttggaaacgatggtgctatatgcttggcgcgaagtttcaagataatcaacgaatcgttgacgtcccttgacctgggtttcaatgagattcgagacgacggagcattcgcattggcacaggcgctcaaggctaacgaggatctggcggtcacgtcattaaatctcgcaaacaacttcttcacgaaattcggacaggtcgctctttctgaggcgcgggaccatgtgtacgagatgaccgaacgggagatagacatttatttttaggggggtaccggttcccctgtgcacacagttagcacaggacatgaccgatgcttgtttgtcgagtaggttgaagaataaggtcgcgcggtagagcgatggtttatcctttgtataggaaaattttggtgggttagttaaatatttttagttactatgtaggttagccattcgatcaggtgtctatatgcaagttttgctggaaacgtcggtgtcgttttgaaccattcgtattattggttgaaaatggaatggatatgacgggcatcacatgcaaactgattcttttttgtggaggacttcactgatgtggtggtgtgtgttcctcggaagttgaaatgtattctcatgccatccatgtgggatggtgttggtaacctcagacctgtcgtaggctgttgtgaatgtcacacaaagatttcgc

SEQ ID NO: 79105 - DNA, 2902 bp, Zea Mays
ccctctcaaagcccgcctccggtttccgtcccccatcctcctccgccccccagccgccgcatccaatggagtcctcgctcctcctctctaccccgcgcccgctcaagcccttccatccgcatcacttccccaccgctcgtcgtcgcgacgcgtccttccgcgggaagccccctccgccgccgcccctgccaccgctcggacgcggcagccgccggttgggtcgggcggtgccgcgcgcctcgagcgaggcgttcggcgacggattccgcagccaggacaggcctcccggggttagcagcgggggtgttcgccggaggacctaccgcgaggcgcagggcgaggcggccgtgccacccgtggccgcggccgcgagagcagtcgcgccctacgtcgccccggtcggggcagtactcatgctgagctttgtcatatggaaggtggttcagaatatgattccagggaagaaaaaggatcatggttctggaaaacatgcgccttctggtatcatgtggtccttcgctgctggctccaatttggcaacatctaccctcagtgctgaaaaggagtcgcggaaaaatctgaacaagttctacaaagaacttcgaactttgaaaactgttaacatggctggtcgtcagtttggagatgagggcctgttttttctagcagaaagcttagcctatgacaagagtgcagaagaggtggacttttctggcaatgggataacagctgtggggatagaagcctttgatggagttcttcagataaacacaactttgaaaactctcaatttatctggaaatgacatcggggatgaaggagctaagtgtctttcagatatattggttgaaaatgtgggtatccagaaactcctcctgaacagtatcaatattggggacgagggtgccaaggcactttcgaacatgctgaaaaagaataaatcaatacgtattctacagttcagcaataatgcaattgaatacagtggttttgcaagtattgcagaagcccttttagagaataatacgatacggagcttgtatctcaatggcaactatggtggtccccttggtgcatgcagcctagctcaaggaattctagggaataagtctttaagggtactacttaagacacttggttatatacttccagtcttccacatagttttaatgtttttttttttgtaaaattttaaatgtttgaaagtgaagcagattgaattccatctttgcttatgcatcaagttatggagaagtgtctgtttcagctttctgaaggggtagtagtattttgaaactttcaggatacatatctgtaaagcatggagtgtatagtaggacttgcacacaaagagcattttattaacttttcttgcttagatgataaaaacctattggtaatctgtaagtcttgctgtggcaatattggtagaatgattaccaatagaagtatagaactcttctgtaccaatgtgctacctatgaccaaatggaactatttattatttaagactgtaggttcgaaattaatgtgtttgaagttcttcgatctctgttcatagccccccccccccccccccccaaaaaaaaatgtttattactgtttggtatttttgtctatttctaactttgtatattatattcaatttacctatcatggttatgatatgtaagcatttaaccttcactaggaaattcacttgcatggtaatgggattgggaatgagggaatacgtgagttgatgtctgcattatctgctcacaaagggaagatcacagttgtggatattggcaacaacaacattagcccggaaggtttacatcctgtagccgagttcctcaaaaggacaaagtccttacagtggttcagtctctacatgaacgatattagtgatgagggagctgaaaaggttgctgaggctctgaaagataacaaaacaatttctaccatagacttgggtggcaataacattcactccaaagctgttagtgcagtagcggaaactttgaaggataatgcagtgctgacaacactggatttgagctacaatccaattggatcagacggagtaaaggctttgtgcgatgtcctcaagttccatgggaagatccaaacccttaagctcggctggtgccaggcatggaaggtgcagagtgtattgccgactgtctcaagtacaacacaacgttatcgacattggatctgcgggcaaacgggcttggaaacgatggtgctatatgcttggcgcgaagtttcaagataatcaacgaatcgttgacgtcccttgacctgggtttcaatgagattcgagacgacggagcattcgcattggcacaggcgctcaaggctaacgaggatctggcggtcacgtcattaaatctcgcaaacaacttcttcacgaaattcggacaggtcgctctttctgaggcgcgggaccatgtgtacgagatgaccgaacgggagatagacatttatttttaggggggtaccggttcccctgtgcacacagttagcacaggacatgaccgatgcttgtttgtcgagtaggttgaagaataaggtcgcgcggtagagcgatggtttatcctttgtataggaaaattttggtgggttagttaaatatttttagttactatgtaggttagccattcgatcaggtgtctatatgcaagttttgctggaaacgtcggtgtcgttttgaaccattcgtattattggttgaaaatggaatggatatgacgggcatcacatgcaaactgattcttttttgtggaggacttcactgatgtggtggtgtgtgttcctcggaagttgaaatgtattctcatgccatccatgtgggatggtgttggtaacctcagacctgtcgtaggctgttgtgaatgtcacacaaagatttcgc

SEQ ID NO: 79106 - DNA, 1210 bp, Zea Mays
gtttgtgatgaagcactgtcgtcgcccatgacgggaaaacggctccatatacgtactactaacgtacacaccacagcgactctccggccatgcagttgccggctgcacaacttgtgcaagtgcatgcatgcatggatttggatccatgcatggccacagcccacagcccacaggggaggggaaggtgaggccgcgccgcgaggaaccgcgtcgaccttgtcgtcgatgttggcttgcaaggcgagcccgagccggccgtgcgtcgtcccccttgtttgcctgctggtggtggcggccgcagtcgtcgtcgtcgctgcctcggcgccgccggcggaggcggcgttcgacgacaactacgtggcgcagtggggtagagatggttatcaccttgtcgtccggggcacggaggcgaatgtcaccatggaccagagctctggtgccgggttccggtccaagtccacgtacggctcagggttcttccacatgaggatgaagctgccctccgggtacacggccggcgtcgtcacgaccttctacctcatctcgcagccggaggatgggagccgcgacgaggtggacttggagttcctgggcgacaaggccggcgtgcccatcaccctccagaccaacgtcttcgtcgacggccgcggcgacagggagcagcggacgcgcctctggatgttcgtggacgacacgccggtccgggtgctgaggaacctgacgggcgccgtgccggggtacccgttcccggggaagcagacgatgctgatccgcgcgagcgtgtgggacggctccgactgggccacggacggcggccggaccaaggtggactggtccaggggccccttcaccgccggctaccggggcttcgacgtcgacggctgcgccaacaacgggagcgacgcgtgccaatcgcccgacctatggtggaacgccgccgagtaccggaacatcaccgcggagcagcgggcggcgtacgaggacgtgaagaggagttacatgaactacgattactgcgccgataaggccaggttcaacagcaccaccgtacccattgaatgcaactacgcttgataagccagctaggagtggcgttgtatattatacatacacgaaaagatatgtctgcttatttgttgcattgcaagggtttaaatatgcaaatgcttataaggactacaaaaatatattactttgtcactaaatttat

SEQ ID NO: 79107 - DNA, 2106 bp, Zea Mays
gcaaggggacaaagcgggaggggtttctgatggcgccgaagcggaagcctgccgcggcggcgaagtcggaccctgatggcatattccgcggcgtctccgctttcatcgttcccaacggcgtccaggctcgccgcctcgtggtcgcgctctgtcttcccccacccccctctcgttggcgcctcgagtcgttattgtgcgcttaggcatttgggggatggtcgatgcaggtgtggaagcagaggctggtgcagatggggggccgagtcgtggagaagcccacgaagggcgagctggcgggggtcaaccacgtgttggccatggacgccaaggcgctactccgggagcttgacgccgcttggctccaccgcttccgcgggagtgtggtgtccttcgaatggattgaggagtgcctcaagtctggggagaggctgcccatccacaactttgcaatcaattacgaaaaggaatttaagccaaagaatgcggtttgcactggaaatctagttgcgtcacggccctctaaaaggaccaaaatgtcgtctgagtatcctggggaccaccagataattagtggaggggatagggagaaggaactagcagctggagggcctccaggtgcaagtgcacatgtggttgaaggatcaagtgcggggaagcagcctaaccagtatgcaagtagccaaagtagctcagcagattccaaggacaccataggttcgcatggtacatttggcatagaggaagcctcttctggaggacccagcatatatgctccagcagacttgaacaagaacatcaccaaaatttttggaaggcttatcgatatatatagggccctgggagatgacagaagatcatttagttattacaaggccataccggtgattgagaaattgccattcaaaatcgaaagtgctgatcaagttaaaggtctccctactatcgggaaatctttgaaagaccatataaatgaaatagtcaccactggaaaactttccaagctggaacactttgagaatgatgaaaaggtacgaacgatcagtttattcggtgaagtttggggagttggtcctgcaactgcgctcaagttatatgagaagggacaccgtactcttgatgatctacagagagatgagtcacttacaaatgcacagaggattggattaaagttttttgatgatatcaagcaaagaataccccgacatgacgttagcgagatggagaaacttttacaagatgttgggactgatatcttgcctggggtaacaattgtttgtggaggatcatatagacgcggtaaagcatcttgtggtgacatggatattattataactcatcctgatggagaaagccatgtaggatttttatccaagtttgttcaacggctgaaggaaattaactttttgagggaggatcttatctttagcatacacagtgttgatgggactgatagcggggttgacacatactttggtctttgcacataccctgggcgtgagctgcggcaccgcatcgacttaaaggtgtacccgaggaacagatatgcatgtggtctgcttgcatggactggaaatgatgtactaaatcggcgatttaggctactagcagaatccaaaggatatgtacttgacgatactggattatacctagctacacgcggcagtggtggaaagcatatcagacgccatagttaactgtcacaccgagaaggatgtgtttgagacgcttggattcccttggctggaaccacatgagcgcaacctttagggcttgtttggaaactcaaacccctagggatcccaacctttactaggtaagcaatccatggggatgtcatttggataagccatttagttctccttataggacttctcattcctagggttgcctccctcttgcttccaaattaggccctagctgtttttgaacgttcatctagagaatgtgttttgtacagttagttatatatgttacctgtatctttaacctacctcgactttctgggtactaacagccttttgtactgattgttgttcatacttcccctttttgtgctgtcactagtaggcagtttttgttcagcttcgctttctatgcttctcccaa

SEQ ID NO: 79108 - DNA, 751 bp, Zea Mays
gcgggaggggtttctgatggcgccgaagcggaagcctgccgcggcggcgaagtcggaccctgatggcatattccgcggcgtctccgctttcatcgttcccaacggcgtccaggctcgccgcctcgtggtcgcgctctgtcttcccccacccccctctcgttggcgcctcgagtcgttattgtgcgcttaggcatttgggggatggtcgatgcaggtgtggaagcagaggctggtgcagatggggggccgagtcgtggagaagcccacgaagggcgagctggcgggggtcaaccacgtgttggccatggacgccaaggcgctactccgggagcttgacgccgcttggctccaccgcttccgcgggagtgtggtgtccttcgaatggattgaggagtgcctcaagtctggggagaggctgcccatccacaactttgcaatcaattacgaaaaggaatttaagccaaagaatgcggtttgcactggaaatctagttgcgtcacggccctctaaaaggaccaaaatgtcgtctgagtatcctggggaccaccagataattagtggaggggatagggagaaggaactagcagctggagggcctccaggtgcaagtgcacatgtggttgaaggatcaagtgcggggaagcagcctaaccagtatgcaagtagccaaagtagctcagcagattccaaggacaccataggttcgcatggtacatttggcatagagataatgtgaatgtgaacaaaagca

SEQ ID NO: 79109 - DNA, 1986 bp, Zea Mays
gcgggaggggtttctgatggcgccgaagcggaagcctgccgcggcggcgaagtcggaccctgatggcatattccgcggcgtctccgctttcatcgttcccaacggcgtccaggctcgccgcctcgtggtgtggaagcagaggctggtgcagatggggggccgagtcgtggagaagcccacgaagggcgagctggcgggggtcaaccacgtgttggccatggacgccaaggcgctactccgggagcttgacgccgcttggctccaccgcttccgcgggagtgtggtgtccttcgaatggattgaggagtgcctcaagtctggggagaggctgcccatccacaactttgcaatcaattacgaaaaggaatttaagccaaagaatgcggtttgcactggaaatctagttgcgtcacggccctctaaaaggaccaaaatgtcgtctgagtatcctggggaccaccagataattagtggaggggatagggagaaggaactagcagctggagggcctccaggtgcaagtgcacatgtggttgaaggatcaagtgcggggaagcagcctaaccagtatgcaagtagccaaagtagctcagcagattccaaggacaccataggttcgcatggtacatttggcatagaggaagcctcttctggaggacccagcatatatgctccagcagacttgaacaagaacatcaccaaaatttttggaaggcttatcgatatatatagggccctgggagatgacagaagatcatttagttattacaaggccataccggtgattgagaaattgccattcaaaatcgaaagtgctgatcaagttaaaggtctccctactatcgggaaatctttgaaagaccatataaatgaaatagtcaccactggaaaactttccaagctggaacactttgagaatgatgaaaagtttggggagttggtcctgcaactgcgctcaagttatatgagaagggacaccgtactcttgatgatctacagagagatgagtcacttacaaatgcacagaggattggattaaagttttttgatgatatcaagcaaagaataccccgacatgacgttagcgagatggagaaacttttacaagatgttgggactgatatcttgcctggggtaacaattgtttgtggaggatcatatagacgcggtaaagcatcttgtggtgacatggatattattataactcatcctgatggagaaagccatgtaggatttttatccaagtttgttcaacggctgaaggaaattaactttttgagggaggatcttatctttagcatacacagtgttgatgggactgatagcggggttgacacatactttggtctttgcacataccctgggcgtgagctgcggcaccgcatcgacttaaaggtgtacccgaggaacagatatgcatgtggtctgcttgcatggactggaaatgatgtactaaatcggcgatttaggctactagcagaatccaaaggatatgtacttgacgatactggattatacctagctacacgcggcagtggtggaaagcatgctggcagatcagacgccatagttaactgtcacaccgagaaggatgtgtttgagacgcttggattcccttggctggaaccacatgagcgcaacctttagggcttgtttggaaactcaaacccctagggatcccaacctttactaggtaagcaatccatggggatgtcatttggataagccatttagttctccttataggacttctcattcctagggttgcctccctcttgcttccaaattaggccctagctgtttttgaacgttcatctagagaatgtgttttgtacagttagttatatatgttacctgtatctttaacctacctcgactttctgggtactaacagccttttgtactgattgttgttcatacttcccctttttgtgctgtcactagtaggcagtttttgttcagcttcgctttctatgcttctcccaa

SEQ ID NO: 79110 - DNA, 2000 bp, Zea Mays
gcgggaggggtttctgatggcgccgaagcggaagcctgccgcggcggcgaagtcggaccctgatggcatattccgcggcgtctccgctttcatcgttcccaacggcgtccaggctcgccgcctcgtggtgtggaagcagaggctggtgcagatggggggccgagtcgtggagaagcccacgaagggcgagctggcgggggtcaaccacgtgttggccatggacgccaaggcgctactccgggagcttgacgccgcttggctccaccgcttccgcgggagtgtggtgtccttcgaatggattgaggagtgcctcaagtctggggagaggctgcccatccacaactttgcaatcaattacgaaaaggaatttaagccaaagaatgcggtttgcactggaaatctagttgcgtcacggccctctaaaaggaccaaaatgtcgtctgagtatcctggggaccaccagataattagtggaggggatagggagaaggaactagcagctggagggcctccaggtgcaagtgcacatgtggttgaaggatcaagtgcggggaagcagcctaaccagtatgcaagtagccaaagtagctcagcagattccaaggacaccataggttcgcatggtacatttggcatagaggaagcctcttctggaggacccagcatatatgctccagcagacttgaacaagaacatcaccaaaatttttggaaggcttatcgatatatatagggccctgggagatgacagaagatcatttagttattacaaggccataccggtgattgagaaattgccattcaaaatcgaaagtgctgatcaagttaaaggtctccctactatcgggaaatctttgaaagaccatataaatgaaatagtcaccactggaaaactttccaagctggaacactttgagaatgatgaaaagtttattcggtgaagtttggggagttggtcctgcaactgcgctcaagttatatgagaagggacaccgtactcttgatgatctacagagagatgagtcacttacaaatgcacagaggattggattaaagttttttgatgatatcaagcaaagaataccccgacatgacgttagcgagatggagaaacttttacaagatgttgggactgatatcttgcctggggtaacaattgtttgtggaggatcatatagacgcggtaaagcatcttgtggtgacatggatattattataactcatcctgatggagaaagccatgtaggatttttatccaagtttgttcaacggctgaaggaaattaactttttgagggaggatcttatctttagcatacacagtgttgatgggactgatagcggggttgacacatactttggtctttgcacataccctgggcgtgagctgcggcaccgcatcgacttaaaggtgtacccgaggaacagatatgcatgtggtctgcttgcatggactggaaatgatgtactaaatcggcgatttaggctactagcagaatccaaaggatatgtacttgacgatactggattatacctagctacacgcggcagtggtggaaagcatgctggcagatcagacgccatagttaactgtcacaccgagaaggatgtgtttgagacgcttggattcccttggctggaaccacatgagcgcaacctttagggcttgtttggaaactcaaacccctagggatcccaacctttactaggtaagcaatccatggggatgtcatttggataagccatttagttctccttataggacttctcattcctagggttgcctccctcttgcttccaaattaggccctagctgtttttgaacgttcatctagagaatgtgttttgtacagttagttatatatgttacctgtatctttaacctacctcgactttctgggtactaacagccttttgtactgattgttgttcatacttcccctttttgtgctgtcactagtaggcagtttttgttcagcttcgctttctatgcttctcccaa

SEQ ID NO: 79111 - DNA, 2079 bp, Zea Mays
gcgggaggggtttctgatggcgccgaagcggaagcctgccgcggcggcgaagtcggaccctgatggcatattccgcggcgtctccgctttcatcgttcccaacggcgtccaggctcgccgcctcgtggtcgcgctctgtcttcccccacccccctctcgttggcgcctcgagtcgttattgtgcgcttaggcatttgggggatggtcgatgcaggtgtggaagcagaggctggtgcagatggggggccgagtcgtggagaagcccacgaagggcgagctggcgggggtcaaccacgtgttggccatggacgccaaggcgctactccgggagcttgacgccgcttggctccaccgcttccgcgggagtgtggtgtccttcgaatggattgaggagtgcctcaagtctggggagaggctgcccatccacaactttgcaatcaattacgaaaaggaatttaagccaaagaatgcggtttgcactggaaatctagttgcgtcacggccctctaaaaggaccaaaatgtcgtctgagtatcctggggaccaccagataattagtggaggggatagggagaaggaactagcagctggagggcctccaggtgcaagtgcacatgtggttgaaggatcaagtgcggggaagcagcctaaccagtatgcaagtagccaaagtagctcagcagattccaaggacaccataggttcgcatggtacatttggcatagaggaagcctcttctggaggacccagcatatatgctccagcagacttgaacaagaacatcaccaaaatttttggaaggcttatcgatatatatagggccctgggagatgacagaagatcatttagttattacaaggccataccggtgattgagaaattgccattcaaaatcgaaagtgctgatcaagttaaaggtctccctactatcgggaaatctttgaaagaccatataaatgaaatagtcaccactggaaaactttccaagctggaacactttgagaatgatgaaaagtttattcggtgaagtttggggagttggtcctgcaactgcgctcaagttatatgagaagggacaccgtactcttgatgatctacagagagatgagtcacttacaaatgcacagaggattggattaaagttttttgatgatatcaagcaaagaataccccgacatgacgttagcgagatggagaaacttttacaagatgttgggactgatatcttgcctggggtaacaattgtttgtggaggatcatatagacgcggtaaagcatcttgtggtgacatggatattattataactcatcctgatggagaaaggatttttatccaagtttgttcaacggctgaaggaaattaactttttgagggaggatcttatctttagcatacacagtgttgatgggactgatagcggggttgacacatactttggtctttgcacataccctgggcgtgagctgcggcaccgcatcgacttaaaggtgtacccgaggaacagatatgcatgtggtctgcttgcatggactggaaatgatgtactaaatcggcgatttaggctactagcagaatccaaaggatatgtacttgacgatactggattatacctagctacacgcggcagtggtggaaagcatgctggcagatcagacgccatagttaactgtcacaccgagaaggatgtgtttgagacgcttggattcccttggctggaaccacatgagcgcaacctttagggcttgtttggaaactcaaacccctagggatcccaacctttactaggtaagcaatccatggggatgtcatttggataagccatttagttctccttataggacttctcattcctagggttgcctccctcttgcttccaaattaggccctagctgtttttgaacgttcatctagagaatgtgttttgtacagttagttatatatgttacctgtatctttaacctacctcgactttctgggtactaacagccttttgtactgattgttgttcatacttcccctttttgtgctgtcactagtaggcagtttttgttcagcttcgctttctatgcttctcccaa

SEQ ID NO: 79112 - DNA, 1923 bp, Zea Mays
gcgggaggggtttctgatggcgccgaagcggaagcctgccgcggcggcgaagtcggaccctgatggcatattccgcggcgtctccgctttcatcgttcccaacggcgtccaggctcgccgcctcgtggtgtggaagcagaggctggtgcagatggggggccgagtcgtggagaagcccacgaagggcgagctggcgggggtcaaccacgtgttggccatggacgccaaggcgctactccgggagcttgacgccgcttggctccaccgcttccgcgggagtgtggtgtccttcgaatggattgaggagtgcctcaagtctggggagaggctgcccatccacaactttgcaatcaattacgaaaaggaatttaagccaaagaatgcggtttgcactggaaatctagttgcgtcacggccctctaaaaggaccaaaatgtcgtctgagtatcctggggaccaccagataattagtggaggggatagggagaaggaactagcagctggagggcctccaggtgcaagtgcacatgtggttgaaggatcaagtgcggggaagcagcctaaccagtatgcaagtagccaaagtagctcagcagattccaaggacaccataggttcgcatggtacatttggcatagaggaagcctcttctggaggacccagcatatatgctccagcagacttgaacaagaacatcaccaaaatttttggaaggcttatcgatatatatagggccctgggagatgacagaagatcatttagttattacaaggccataccggtgattgagaaattgccattcaaaatcgaaagtgctgatcaagttaaaggtctccctactatcgggaaatctttgaaagaccatataaatgaaatagtcaccactggaaaactttccaagctggaacactttgagaatgatgaaaaggtacgaacgatcagtttattcggtgaagtttggggagttggtcctgcaactgcgctcaagttatatgagaagggacaccgtactcttgatgatctacagagagatgagtcacttacaaatgcacagaggattggattaaagttttttgatgatatcaagcaaagaataccccgacatgacgttagcgagatggagaaacttttacaagatgttgggactgatatcttgcctggggtaacaattgtttgtggaggatcatatagacgcggtaaagcatcttgtggtgacatggatattattataactcatcctgatggagaaaggggactgatagcggggttgacacatactttggtctttgcacataccctgggcgtgagctgcggcaccgcatcgacttaaaggtgtacccgaggaacagatatgcatgtggtctgcttgcatggactggaaatgatgtactaaatcggcgatttaggctactagcagaatccaaaggatatgtacttgacgatactggattatacctagctacacgcggcagtggtggaaagcatgctggcagatcagacgccatagttaactgtcacaccgagaaggatgtgtttgagacgcttggattcccttggctggaaccacatgagcgcaacctttagggcttgtttggaaactcaaacccctagggatcccaacctttactaggtaagcaatccatggggatgtcatttggataagccatttagttctccttataggacttctcattcctagggttgcctccctcttgcttccaaattaggccctagctgtttttgaacgttcatctagagaatgtgttttgtacagttagttatatatgttacctgtatctttaacctacctcgactttctgggtactaacagccttttgtactgattgttgttcatacttcccctttttgtgctgtcactagtaggcagtttttgttcagcttcgctttctatgcttctcccaa

SEQ ID NO: 79113 - DNA, 2157 bp, Zea Mays
gcgggaggggtttctgatggcgccgaagcggaagcctgccgcggcggcgaagtcggaccctgatggcatattccgcggcgtctccgctttcatcgttcccaacggcgtccaggctcgccgcctcgtggtcgcgctctgtcttcccccacccccctctcgttggcgcctcgagtcgttattgtgcgcttaggcatttgggggatggtcgatgcaggtgtggaagcagaggctggtgcagatggggggccgagtcgtggagaagcccacgaagggcgagctggcgggggtcaaccacgtgttggccatggacgccaaggcgctactccgggagcttgacgccgcttggctccaccgcttccgcgggagtgtggtgtccttcgaatggattgaggagtgcctcaagtctggggagaggctgcccatccacaactttgcaatcaattacgaaaaggaatttaagccaaagaatgcggtttgcactggaaatctagttgcgtcacggccctctaaaaggaccaaaatgtcgtctgagtatcctggggaccaccagataattagtggaggggatagggagaaggaactagcagctggagggcctccaggtgcaagtgcacatgtggttgaaggatcaagtgcggggaagcagcctaaccagtatgcaagtagccaaagtagctcagcagattccaaggacaccataggttcgcatggtacatttggcatagaggaagcctcttctggaggacccagcatatatgctccagcagacttgaacaagaacatcaccaaaatttttggaaggcttatcgatatatatagggccctgggagatgacagaagatcatttagttattacaaggccataccggtgattgagaaattgccattcaaaatcgaaagtgctgatcaagttaaaggtctccctactatcgggaaatctttgaaagaccatgtatataaatgaaatagtcaccactggaaaactttccaagctggaacactttgagaatgatgaaaaggtaacgtacaaagttgttcatgatttagacatgttcagctacctttttcaatatcaacataattcactttgaaggtacgaacgatcagtttattcggtgaagtttggggagttggtcctgcaactgcgctcaagttatatgagaagggacaccgtactcttgatgatctacagagagatgagtcacttacaaatgcacagaggattggattaaagttttttgatgatatcaagcaaagaataccccgacatgacgttagcgagatggagaaacttttacaagatgttgggactgatatcttgcctggggtaacaattgtttgtggaggatcatatagacgcggtaaagcatcttgtggtgacatggatattattataactcatcctgatggagaaaggggactgatagcggggttgacacatactttggtctttgcacataccctgggcgtgagctgcggcaccgcatcgacttaaaggtgtacccgaggaacagatatgcatgtggtctgcttgcatggactggaaatgatgtactaaatcggcgatttaggctactagcagaatccaaaggatatgtacttgacgatactggattatacctagctacacgcggcagtggtggaaagcatgtacgtttattcatatctagctgcacccttttctacagtttggtttgatttgttataaattttttacaggctggcagatcagacgccatagttaactgtcacaccgagaaggatgtgtttgagacgcttggattcccttggctggaaccacatgagcgcaacctttagggcttgtttggaaactcaaacccctagggatcccaacctttactaggtaagcaatccatggggatgtcatttggataagccatttagttctccttataggacttctcattcctagggttgcctccctcttgcttccaaattaggccctagctgtttttgaacgttcatctagagaatgtgttttgtacagttagttatatatgttacctgtatctttaacctacctcgactttctgggtactaacagccttttgtactgattgttgttcatacttcccctttttgtgctgtcactagtaggcagtttttgttcagcttcgctttctatgcttctcccaa

SEQ ID NO: 79114 - DNA, 2094 bp, Zea Mays
gcgggaggggtttctgatggcgccgaagcggaagcctgccgcggcggcgaagtcggaccctgatggcatattccgcggcgtctccgctttcatcgttcccaacggcgtccaggctcgccgcctcgtggtgtggaagcagaggctggtgcagatggggggccgagtcgtggagaagcccacgaagggcgagctggcgggggtcaaccacgtgttggccatggacgccaaggcgctactccgggagcttgacgccgcttggctccaccgcttccgcgggagtgtggtgtccttcgaatggattgaggagtgcctcaagtctggggagaggctgcccatccacaactttgcaatcaattacgaaaaggaatttaagccaaagaatgcggtttgcactggaaatctagttgcgtcacggccctctaaaaggaccaaaatgtcgtctgagtatcctggggaccaccagataattagtggaggggatagggagaaggaactagcagctggagggcctccaggtgcaagtgcacatgtggttgaaggatcaagtgcggggaagcagcctaaccagtatgcaagtagccaaagtagctcagcagattccaaggacaccataggttcgcatggtacatttggcatagaggaagcctcttctggaggacccagcatatatgctccagcagacttgaacaagaacatcaccaaaatttttggaaggcttatcgatatatatagggccctgggagatgacagaagatcatttagttattacaaggccataccggtgattgagaaattgccattcaaaatcgaaagtgctgatcaagttaaaggtctccctactatcgggaaatctttgaaagaccatataaatgaaatagtcaccactggaaaactttccaagctggaacactttgagaatgatgaaaagtttattcggtgaagtttggggagttggtcctgcaactgcgctcaagttatatgagaagggacaccgtactcttgatgatctacagagagatgagtcacttacaaatgcacagaggattggattaaagttttttgatgatatcaagcaaagaataccccgacatgacgttagcgagatggagaaacttttacaagatgttgggactgatatcttgcctggggtaacaattgtttgtggaggatcatatagacgcggtaaagcatcttgtggtgacatggatattattataactcatcctgatggagaaagccatgtaggatttttatccaagtttgttcaacggctgaaggaaattaactttttgagggaggatcttatctttagcatacacagtgttgatgtaagttgttaaacaccatcaactggggactgatagcggggttgacacatactttggtctttgcacataccctgggcgtgagctgcggcaccgcatcgacttaaaggtgtacccgaggaacagatatgcatgtggtctgcttgcatggactggaaatgatgtactaaatcggcgatttaggctactagcagaatccaaaggatatgtacttgacgatactggattatacctagctacacgcggcagtggtggaaagcatgtacgtttattcatatctagctgcacccttttctacagtttggtttgatttgttataaattttttacaggctggcagatcagacgccatagttaactgtcacaccgagaaggatgtgtttgagacgcttggattcccttggctggaaccacatgagcgcaacctttagggcttgtttggaaactcaaacccctagggatcccaacctttactaggtaagcaatccatggggatgtcatttggataagccatttagttctccttataggacttctcattcctagggttgcctccctcttgcttccaaattaggccctagctgtttttgaacgttcatctagagaatgtgttttgtacagttagttatatatgttacctgtatctttaacctacctcgactttctgggtactaacagccttttgtactgattgttgttcatacttcccctttttgtgctgtcactagtaggcagtttttgttcagcttcgctttctatgcttctcccaa

SEQ ID NO: 79115 - DNA, 1909 bp, Zea Mays
gcgggaggggtttctgatggcgccgaagcggaagcctgccgcggcggcgaagtcggaccctgatggcatattccgcggcgtctccgctttcatcgttcccaacggcgtccaggctcgccgcctcgtggtgtggaagcagaggctggtgcagatggggggccgagtcgtggagaagcccacgaagggcgagctggcgggggtcaaccacgtgttggccatggacgccaaggcgctactccgggagcttgacgccgcttggctccaccgcttccgcgggagtgtggtgtccttcgaatggattgaggagtgcctcaagtctggggagaggctgcccatccacaactttgcaatcaattacgaaaaggaatttaagccaaagaatgcggtttgcactggaaatctagttgcgtcacggccctctaaaaggaccaaaatgtcgtctgagtatcctggggaccaccagataattagtggaggggatagggagaaggaactagcagctggagggcctccaggtgcaagtgcacatgtggttgaaggatcaagtgcggggaagcagcctaaccagtatgcaagtagccaaagtagctcagcagattccaaggacaccataggttcgcatggtacatttggcatagaggaagcctcttctggaggacccagcatatatgctccagcagacttgaacaagaacatcaccaaaatttttggaaggcttatcgatatatatagggccctgggagatgacagaagatcatttagttattacaaggccataccggtgattgagaaattgccattcaaaatcgaaagtgctgatcaagttaaaggtctccctactatcgggaaatctttgaaagaccatataaatgaaatagtcaccactggaaaactttccaagctggaacactttgagaatgatgaaaagtttattcggtgaagtttggggagttggtcctgcaactgcgctcaagttatatgagaagggacaccgtactcttgatgatctacagagagatgagtcacttacaaatgcacagaggattggattaaagttttttgatgatatcaagcaaagaataccccgacatgacgttagcgagatggagaaacttttacaagatgttgggactgatatcttgcctggggtaacaattgtttgtggaggatcatatagacgcggtaaagcatcttgtggtgacatggatattattataactcatcctgatggagaaaggggactgatagcggggttgacacatactttggtctttgcacataccctgggcgtgagctgcggcaccgcatcgacttaaaggtgtacccgaggaacagatatgcatgtggtctgcttgcatggactggaaatgatgtactaaatcggcgatttaggctactagcagaatccaaaggatatgtacttgacgatactggattatacctagctacacgcggcagtggtggaaagcatgctggcagatcagacgccatagttaactgtcacaccgagaaggatgtgtttgagacgcttggattcccttggctggaaccacatgagcgcaacctttagggcttgtttggaaactcaaacccctagggatcccaacctttactaggtaagcaatccatggggatgtcatttggataagccatttagttctccttataggacttctcattcctagggttgcctccctcttgcttccaaattaggccctagctgtttttgaacgttcatctagagaatgtgttttgtacagttagttatatatgttacctgtatctttaacctacctcgactttctgggtactaacagccttttgtactgattgttgttcatacttcccctttttgtgctgtcactagtaggcagtttttgttcagcttcgctttctatgcttctcccaa

SEQ ID NO: 79116 - DNA, 2006 bp, Zea Mays
gcgggaggggtttctgatggcgccgaagcggaagcctgccgcggcggcgaagtcggaccctgatggcatattccgcggcgtctccgctttcatcgttcccaacggcgtccaggctcgccgcctcgtggtgtggaagcagaggctggtgcagatggggggccgagtcgtggagaagcccacgaagggcgagctggcgggggtcaaccacgtgttggccatggacgccaaggcgctactccgggagcttgacgccgcttggctccaccgcttccgcgggagtgtggtgtccttcgaatggattgaggagtgcctcaagtctggggagaggctgcccatccacaactttgcaatcaattacgaaaaggaatttaagccaaagaatgcggtttgcactggaaatctagttgcgtcacggccctctaaaaggaccaaaatgtcgtctgagtatcctggggaccaccagataattagtggaggggatagggagaaggaactagcagctggagggcctccaggtgcaagtgcacatgtggttgaaggatcaagtgcggggaagcagcctaaccagtatgcaagtagccaaagtagctcagcagattccaaggacaccataggttcgcatggtacatttggcatagaggaagcctcttctggaggacccagcatatatgctccagcagacttgaacaagaacatcaccaaaatttttggaaggcttatcgatatatatagggccctgggagatgacagaagatcatttagttattacaaggccataccggtgattgagaaattgccattcaaaatcgaaagtgctgatcaagttaaaggtctccctactatcgggaaatctttgaaagaccatataaatgaaatagtcaccactggaaaactttccaagctggaacactttgagaatgatgaaaaggtacgaacgatcagtttattcggtgaagtttggggagttggtcctgcaactgcgctcaagttatatgagaagggacaccgtactcttgatgatctacagagagatgagtcacttacaaatgcacagaggattggattaaagttttttgatgatatcaagcaaagaataccccgacatgacgttagcgagatggagaaacttttacaagatgttgggactgatatcttgcctggggtaacaattgtttgtggaggatcatatagacgcggtaaagcatcttgtggtgacatggatattattataactcatcctgatggagaaaggatttttatccaagtttgttcaacggctgaaggaaattaactttttgagggaggatcttatctttagcatacacagtgttgatgggactgatagcggggttgacacatactttggtctttgcacataccctgggcgtgagctgcggcaccgcatcgacttaaaggtgtacccgaggaacagatatgcatgtggtctgcttgcatggactggaaatgatgtactaaatcggcgatttaggctactagcagaatccaaaggatatgtacttgacgatactggattatacctagctacacgcggcagtggtggaaagcatgctggcagatcagacgccatagttaactgtcacaccgagaaggatgtgtttgagacgcttggattcccttggctggaaccacatgagcgcaacctttagggcttgtttggaaactcaaacccctagggatcccaacctttactaggtaagcaatccatggggatgtcatttggataagccatttagttctccttataggacttctcattcctagggttgcctccctcttgcttccaaattaggccctagctgtttttgaacgttcatctagagaatgtgttttgtacagttagttatatatgttacctgtatctttaacctacctcgactttctgggtactaacagccttttgtactgattgttgttcatacttcccctttttgtgctgtcactagtaggcagtttttgttcagcttcgctttctatgcttctcccaa

SEQ ID NO: 79117 - DNA, 2126 bp, Zea Mays
gcgggaggggtttctgatggcgccgaagcggaagcctgccgcggcggcgaagtcggaccctgatggcatattccgcggcgtctccgctttcatcgttcccaacggcgtccaggctcgccgcctcgtggtcgcgctctgtcttcccccacccccctctcgttggcgcctcgagtcgttattgtgcgcttaggcatttgggggatggtcgatgcaggtgtggaagcagaggctggtgcagatggggggccgagtcgtggagaagcccacgaagggcgagctggcgggggtcaaccacgtgttggccatggacgccaaggcgctactccgggagcttgacgccgcttggctccaccgcttccgcgggagtgtggtgtccttcgaatggattgaggagtgcctcaagtctggggagaggctgcccatccacaactttgcaatcaattacgaaaaggaatttaagccaaagaatgcggtttgcactggaaatctagttgcgtcacggccctctaaaaggaccaaaatgtcgtctgagtatcctggggaccaccagataattagtggaggggatagggagaaggaactagcagctggagggcctccaggtgcaagtgcacatgtggttgaaggatcaagtgcggggaagcagcctaaccagtatgcaagtagccaaagtagctcagcagattccaaggacaccataggttcgcatggtacatttggcatagaggaagcctcttctggaggacccagcatatatgctccagcagacttgaacaagaacatcaccaaaatttttggaaggcttatcgatatatatagggccctgggagatgacagaagatcatttagttattacaaggccataccggtgattgagaaattgccattcaaaatcgaaagtgctgatcaagttaaaggtctccctactatcgggaaatctttgaaagaccatataaatgaaatagtcaccactggaaaactttccaagctggaacactttgagaatgatgaaaaggtacgaacgatcagtttattcggtgaagtttggggagttggtcctgcaactgcgctcaagttatatgagaagggacaccgtactcttgatgatctacagagagatgagtcacttacaaatgcacagaggattggattaaagttttttgatgatatcaagcaaagaataccccgacatgacgttagcgagatggagaaacttttacaagatgttgggactgatatcttgcctggggtaacaattgtttgtggaggatcatatagacgcggtaaagcatcttgtggtgacatggatattattataactcatcctgatggagaaagccatgtaggatttttatccaagtttgttcaacggctgaaggaaattaactttttgagggaggatcttatctttagcatacacagtgttgatgtaagttgttaaacaccatcaactggggactgatagcggggttgacacatactttggtctttgcacataccctgggcgtgagctgcggcaccgcatcgacttaaaggtgtacccgaggaacagatatgcatgtggtctgcttgcatggactggaaatgatgtactaaatcggcgatttaggctactagcagaatccaaaggatatgtacttgacgatactggattatacctagctacacgcggcagtggtggaaagcatgctggcagatcagacgccatagttaactgtcacaccgagaaggatgtgtttgagacgcttggattcccttggctggaaccacatgagcgcaacctttagggcttgtttggaaactcaaacccctagggatcccaacctttactaggtaagcaatccatggggatgtcatttggataagccatttagttctccttataggacttctcattcctagggttgcctccctcttgcttccaaattaggccctagctgtttttgaacgttcatctagagaatgtgttttgtacagttagttatatatgttacctgtatctttaacctacctcgactttctgggtactaacagccttttgtactgattgttgttcatacttcccctttttgtgctgtcactagtaggcagtttttgttcagcttcgctttctatgcttctcccaa

SEQ ID NO: 79118 - DNA, 1523 bp, Zea Mays
ccagaccgcgcgcctaaaagctatatatggcctgaccacctcatctggccctcttgggatgtaggagagtctcctgtcgtcgacgacattgcatggagatggagaagatgatggggtgtcagatcccggcgtttggaatgtggaactactgtagtgatctctccatcacgcagtacttcgactcagccatgcaggccaggctgatgaagcgctggaactgccgtggcagcgccgccgccgccgccgtcgtggttggcgagaaaggcggcgtcgccggcggggaacagcttgtcttgtttcggaccccttctttccaacgcaagcctgcagcccagatcaaggtgataaggagggaagtggagaagcactgtgacggcgccaacgagttgcaggacggcggcgtgcgagctgctgaagccgctgttgcatacccagtgatgaagcgtaaggttatcgttagtcaagctgtggatgaggatctgtacaaagtgccccaaccaccgatgtacgaaaaacctagaaaggtatatatatatactacgtacaaagaaacaccacggatcggaaaagctatatatatatttgcccggcccaacgcaagaattaattcctttggtgggcatataattaattgtttgcatagctctttcttgcattgtttaatttcacatgatttctctcatgagcttaaataaaggtgtccatgtattagacaggtgaataaagcaataatgtgctcatgctaaaaaaaaaaccactcttgaacataagtttttttttaaacaaaagggttctatttgtagttttgttccatctccttctgcagctcatttgagttcattacttacacacgtactgtgagtcatatccacttgttcaacttcaacatattattggtaaaactcatctcttctctcacaaaattatcgtcatgctttcagatgagaagggtggtttggagcatgtggatcgggtgcctgggtttggactgcgttgcctgacaaacaggattgtaatttttgtatttcttcagtacgcacactccataatttaaataattatcaaccctctttaggggtttgaatgcttttttgtgcttcttgatgtatttattttgcttgaataatcatttagtttccttctagatattattttttccctttgtaagagcatctctcagaggaaccttaaattaagtccttgttgggggtatgcttcattgccgaagattctaaagaaagaaaacaccttcgtcacaatgacagatcttctcaggagcaagggccgaagctattatctatagagcttcggcacaatgacagatctcaagacgaaggtccgaaccgacttaaagatggattgacttaaagactcatgatgttttgtgtcattattgtagtcgattgtaaagggcataaatgtaatttcacgcaagttgcatcctatgcctataaataggtgaacagtactacgacactgttcacgcaatcctgtaatcacggacatattacgcttgaatcatt

SEQ ID NO: 79119 - DNA, 2138 bp, Zea Mays
atcaaaggaggggctgctaaaagaaggttgttggaaggaacaaatgcccaagatgtacgggcacttgtgttggacatgcaagcaagattacttctggatatgctaggcaaaggaatcgagtctgcccttacaaatccatcaactctgctacctgagccctggcaagcttccagtgatatgttatccagcatcgatgctgacaaaatgactgttgagccagctctgcttccaaacatccagggttacgttgatgctgttcttgatttagcatcacatttcataactcgcttgcggcgttatgcgagtttctgtcgaactctggcgagccatgtggggccatcttctaccacaggcacttctagaaatatggttacaagtccaacaaacagttctccttcgccatcaaataatcaaggtaatcaagggggatcaacatctgcaacagggaactcacaaatgcaggagtgggtccaaggtgcaattgctaagattagtaacaattctgatggtgctgccactgcaacacagaatccaatgagcacgaggacatcatttatgcccatcagcattaatacgggcactttccctggcacacctgctgtgagacttattggggattgccattttcttcatagattatgtcaattactgctattttgtctgcttttccgaagaaggcaatcaccaaggttacttgccagttcgcaaaaaaatcaagattctgccatgcagaaaatacaacacatgatgaatgctaagacagaagataacagttcgacagtaagatctggtctaggggctgccaaagtagaagaaggtcactctgcgcgtggtggacaatttgttcttggtggtgcaaagggtcctgaagaaaatccaattggcaaatctgttagaataggttctggcaacgctgggcaaggttatacttcagatgaggtcaaggtcctttttcttatactggttgacctatgtcgaaggacatctaccttgccgcatccattgcctgcctctcaggttggttccagtagcattatcataaggctgcactacattgacggcaactacacagtgctccctgaggtagtggaagcgtctcttggtccccatatgcagaatatgcctcgtccacgaggagctgatgctgctggacttctacttcgagaattagaactgcaacctcctgcggaagaatggcatagacgcaacatgtttggtggaccctggtcagaaccagatgattttggtccattggacaatatgcctcgtctaaaaattagtggttccatcaactctcatttgtctgacatggaagtggatgctgtcagttccattgggattgatctttggccaagaaagcgtaggttatctgaaagagatgctgcatttggtctgaaaacatctgtaggtcttggaggttatctaggtgtcatgggatctcgaagagatgttgtcacggctgtgtggagaacaggtctcgatggtgattggtacaagtgcatacgttgtttgcggcaaacttgtgcatttgcgcatcctggtgccccaaatcagacaaatgaacgtgaggcttggtggatcagtcggtggagccatgcttgcccaatgtgtgggggttcatgggtgaaagttgtttgagcgctgtatttggcaacaacttcgctgctaattgctttcctgacaaacatgtatggagttccatagttatgcatctaacgctaggctactaggatcaggttcagccgttcatgccagatggttggtctacaggcacatgcacgtggcacgaccactgtggaagtctggtagaattaggagctattctgggggtctgaatatgtaactgacatttgcattatgctgtctagtgtattattaaccagtgactttccttgctaaaaaggtgtagcatcgttacttgttcagcgctggacgtacttttcatgttttgtcaaaggtttagtagcgcatggtgtgtgttggtaaggttctactcctttttctttttaagacaatgatacacagcttccagcgtgttccagaaaaaaaaacaaaagatcaagtattacttcttgggatcgtgttccattaaaaaagagatcaagtattgttccttgggacacgttccagaaaaaaag

SEQ ID NO: 79120 - DNA, 2100 bp, Zea Mays
ggaaggaacaaatgcccaagatgtacgggcacttgtgttggacatgcaagcaagattacttctggatatgctaggcaaaggaatcgagtctgcccttacaaatccatcaactctgctacctgagccctggcaagcttccagtgatatgttatccagcatcgatgctgacaaaatgactgttgagccagctctgcttccaaacatccagggttacgttgatgctgttcttgatttagcatcacatttcataactcgcttgcggcgttatgcgagtttctgtcgaactctggcgagccatgtggggccatcttctaccacaggcacttctagaaatatggttacaagtccaacaaacagttctccttcgccatcaaataatcaaggtaatcaagggggatcaacatctgcaacagggaactcacaaatgcaggagtgggtccaaggtgcaattgctaagattagtaacaattctgatggtgctgccactgcaacacagaatccaatgagcacgaggacatcatttatgcccatcagcattaatacgggcactttccctggcacacctgctgtgagacttattggggattgccattttcttcatagattatgtcaattactgctattttgtctgcttttccgaagaaggcaatcaccaaggttacttgccagttcgcaaaaaaatcaagattctgccatgcagaaaatacaacacatgatgaatgctaagacagaagataacagttcgacagtaagatctggtctaggggctgccaaagtagaagaaggtcactctgcgcgtggtggacaatttgttcttggtggtgcaaagggtcctgaagaaaatccaattggcaaatctgttagaataggttctggcaacgctgggcaaggttatacttcagatgaggtcctttttcttatactggttgacctatgtcgaaggacatctaccttgccgcatccattgcctgcctctcaggttggttccagtagcattatcataaggctgcactacattgacggcaactacacagtgctccctgaggtagtggaagcgtctcttggtccccatatgcagaatatgcctcgtccacgaggagctgatgctgctggacttctacttcgagaattagaactgcaacctcctgcggaagaatggcatagacgcaacatgtttggtggaccctggtcagaaccagatgattttggtccattggacaatatgcctcgtctaaaaattagtggttccatcaactctcatttgtctgacatggaagtggatgctgtcagttccattgggattgatctttggccaagaaagcgtaggttatctgaaagagatgctgcatttggtctgaaaacatctgtaggtcttggaggttatctaggtgtcatgggatctcgaagagatgttgtcacggctgtgtggagaacaggtctcgatggtgattggtacaagtgcatacgttgtttgcggcaaacttgtgcatttgcgcatcctggtgccccaaatcagacaaatgaacgtgaggcttggtggatcagtcggtggagccatgcttgcccaatgtgtgggggttcatgggtgaaagttgtttgagcgctgtatttggcaacaacttcgctgctaattgctttcctgacaaacatgtatggagttccatagttatgcatctaacgctaggctactaggatcaggttcagccgttcatgccagatggttggtctacaggcacatgcacgtggcacgaccactgtggaagtctggtagaattaggagctattctgggggtctgaatatgtaactgacatttgcattatgctgtctagtgtattattaaccagtgactttccttgctaaaaaggtgtagcatcgttacttgttcagcgctggacgtacttttcatgttttgtcaaaggtttagtagcgcatggtgtgtgttggtaaggttctactcctttttctttttaagacaatgatacacagcttccagcgtgttccagaaaaaaaaacaaaagatcaagtattacttcttgggatcgtgttccattaaaaaagagatcaagtattgttccttgggacacgttccagaaaaaaag

SEQ ID NO: 79121 - DNA, 2085 bp, Zea Mays
aacattgacaagaattaaactatttctagtttctatatcgaaagtagttacgtcttcttagttgacggagagtcctagagtcgagacaagggagggagggagggagggagagagagagaagagcgagagggagtagtagtagtataaattttgggcaggtgtggagagcagaagcgagccaagcaaggagagcagcagcttagcctagcactgctgcagcttgcttgctttgctttgcttctccagtattcttcttggccaggcctcagagcagagctttggcttggctagtcgtcgtccgcggatagtctccgctgcaccgtgtgcgtgcaagcaaggcaaggcaaccagccagccgcggcgacgaccgatcgtcaacaagctcgatcgccttggccggcggccgggcgggccaccgcaagccgcgagcgatggaggagcagctgggcccggtggcggtgacgcacctgctgcagcacacgctgcggagcctctgcaccggcgacgccccgcagtgggtctacgccgtcttctggcgcatcctgccccggaactacccgccccccaaatgggatctccctggcgccgcgtacgacaggacccgagggaacaggaggaactggatcctggcatgggaggacgggttctgcaacttcgcggcggccagcagctctgccgccgcgtccgcgtgcggccaagagggggcagcggcagctgcggcggttgcatatgccggggactgtgaggcagctgtgcaggatgcggtgaagcaccagcaccagcaggcgcagggcctgcagcctgagctgttcttcaagatgtcccatgacatctacaactacggcgaaggtctgatagggaaagtggcggcagaccacagccacaagtgggtgttcaaggagccccaggagcacgagacgagcaacctcatctcctcctggagcaaccctgcagactctccatgcacatatggcctgtgttctttcgcagcatccgaggacgtgggaggcgcagttccagtgcggcatccagaccatcgccctgatcgctgtcagggagggcgtcgtgcagctcggctccatgaaaaaggtaacggaggacctgagctacgtggtgatgctccgccgcaagttcgggtacctcgagagcatcccgggggtgctgctcccgcacccgtcgtcggcgggcgtgttcgcgggcggtgggtgcgtggggcccccgccggacatcgccgcggcgtggtcgtcgggcctgatgcaaccgccggccgccggcgccgggccgccgctggagctctacgacccctacggcgccggcgcgatggccgccgggccaggcgccgccgccgccgccgccgccgctgcgtccatgcacatcatgccgtcgatgagcagcctggaggcgctgctctccaagctgccgtcggtcgtgccgccggcgccgcagccagccgggtccgtgcccggagcagcgccgccgtccaaggacgacgattacgacgacgtgcaggtgcagcagtgccatggcatggacgacgtggcggcgagcaacggcgcagcagcggtcgagagcgcgagcccgagcggcgctgcctccgcgcccatgtcgtcgtcgtcgtcctactttgtcaacgtgggcagtagtattaatcccggtgatcatgggttttagctcgtcgtggcagcccggccggctgctcgtctcgtatgatggcatggccatggcgtgcttgttaattaattgtgctggtcttcgctagggcgaaacctatcgatcatatattaccagttgccgtcgctatatgctaattaattaatgtagttaacccaatgatttggcaatgttgtcgtcatctctcagcttattctgttcaagctgcgaccagctgaggagatggccattagggtcggattcgacgggacgaataatgtacgctgtaaacacgcacgcacgcacgtacgtacgcacgtacgtacgtgctgtgttacgatcaaaaatgacgcctgatgtggacggagcacgcaccacacacgcggccatgcatgctccgtttcagcatcggatcgaacaagcatttgacccaca

SEQ ID NO: 79122 - DNA, 2292 bp, Zea Mays
aacattgacaagaattaaactatttctagtttctatatcgaaagtagttacgtcttcttagttgacggagagtcctagagtcgagacaagggagggagggagggagggagagagagagaagagcgagagggagtagtagtagtataaattttgggcaggtgtggagagcagaagcgagccaagcaaggagagcagcagcttagcctagcactgctgcagcttgcttgctttgctttgcttctccagtattcttcttggccaggcctcagagcagagctttggcttggctagtcgtcgtccgcggatagtctccgctgcaccgtgtgcgtgcaagcaaggcaaggcaaccagccagccgcggcgacgaccgatcgtcaacaagctcgatcgccttggccggcggccgggcgggccaccgcaagccgcgagcgatggaggagcagctgggcccggtggcggtgacgcacctgctgcagcacacgctgcggagcctctgcaccggcgacgccccgcagtgggtctacgccgtcttctggcgcatcctgccccggaactacccgccccccaaatgggatctccctggcgccgcgtacgacaggacccgagggaacaggaggaactggatcctggcatgggaggacgggttctgcaacttcgcggcggccagcagctctgccgccgcgtccgcgtgcggccaagagggggcagcggcagctgcggcggttgcatatgccggggactgtgaggcagctgtgcaggatgcggtgaagcaccagcaccagcaggcgcagggcctgcagcctgagctgttcttcaagatgtcccatgacatctacaactacggcgaaggtctgatagggaaagtggcggcagaccacagccacaagtgggtgttcaaggagccccaggagcacgagacgagcaacctcatctcctcctggagcaaccctgcagactctcatccgaggacgtgggaggcgcagttccagtgcggcatccaggtgcacacttttaggccttgacaaatcgcaatccggccccttttgatcagaggcagcagctagcgctagctagctgtgggctgtgtggcctacctctctgctgcgatgccaagacatggccagctagctgactctgccatgccatggccaattggcctgcctgcctgcgtcggcttttctttttcttttttttccccccactcgctcacattctccgctttgctctgcacttgtgcagaccatcgccctgatcgctgtcagggagggcgtcgtgcagctcggctccatgaaaaaggtaacggaggacctgagctacgtggtgatgctccgccgcaagttcgggtacctcgagagcatcccgggggtgctgctcccgcacccgtcgtcggcgggcgtgttcgcgggcggtgggtgcgtggggcccccgccggacatcgccgcggcgtggtcgtcgggcctgatgcaaccgccggccgccggcgccgggccgccgctggagctctacgacccctacggcgccggcgcgatggccgccgggccaggcgccgccgccgccgccgccgccgctgcgtccatgcacatcatgccgtcgatgagcagcctggaggcgctgctctccaagctgccgtcggtcgtgccgccggcgccgcagccagccgggtccgtgcccggagcagcgccgccgtccaaggacgacgattacgacgacgtgcaggtgcagcagtgccatggcatggacgacgtggcggcgagcaacggcgcagcagcggtcgagagcgcgagcccgagcggcgctgcctccgcgcccatgtcgtcgtcgtcgtcctactttgtcaacgtgggcagtagtattaatcccggtgatcatgggttttagctcgtcgtggcagcccggccggctgctcgtctcgtatgatggcatggccatggcgtgcttgttaattaattgtgctggtcttcgctagggcgaaacctatcgatcatatattaccagttgccgtcgctatatgctaattaattaatgtagttaacccaatgatttggcaatgttgtcgtcatctctcagcttattctgttcaagctgcgaccagctgaggagatggccattagggtcggattcgacgggacgaataatgtacgctgtaaacacgcacgcacgcacgtacgtacgcacgtacgtacgtgctgtgttacgatcaaaaatgacgcctgatgtggacggagcacgcaccacacacgcggccatgcatgctccgtttcagcatcggatcgaacaagcatttgacccaca

SEQ ID NO: 79123 - DNA, 1628 bp, Zea Mays
gtcgctttcctgcgctcccaccaggccaccactccacacagtgcagggctccaggcttccctccctcccctccacggcttcgctcgctcacccgccctcctgctctaagcccaaagctcccgtcccgagggcttcaggtcttggcccctactcctcgtccgcttcccgggccaccgcttttaggtgtgacttcctcatcatctgccctgacggggatcgctggtttcttcctccagagatcgcatctctggtccgcgggatccgatgagatgcgggggtgctctcgcagtccgacctcgtagcaggcatggctgaagcggccacttcttcgtcttcgtccggatccttcgccccgcgccgcctccatgacgccggtgtcgtcagggaatcgctcccgtacagtgttctcgctgcacccccgccgccgcctctgcctccggtgcaggtgcaggttgcgggttccggcggcggcggtggagggaagattaaccccgcggtgcttttcatcatcgtgattctcgcattagtgttcttcatctccggcctgctccaccttctcgtgcgcgtcctgtcgaagaagcagcaccgccgcggcggcccaagggacacggcgtcggcggcggcgccgaggactggagtggaggcaggcggggttgacgtggcgttgcagcgccagctgcagcagctgttccacctccacgactccgggctggaccaggccttcatcgacgcgctgccggtcttcgcgtaccgggatatcgtcgtgggcggcggcggcgacggggacaaagagccgttcgactgcgcggtgtgtctgtgcgagttcgatgccgaggaccggctccgtctgctgccgctgtgcgggcacgccttccacctcaattgcatcgacacgtggctgctgtccaactcgacctgcccgctctgccgcggggttctcttcatccccgggctcatgggcgagggcaaccccatgtttgatttcgaggagagactggaggaagggcggttgtccgaggactgtgacgacggatttggattgcctgggctgaaggcttcagggttggcacagacaccggtggctgagaagaaggtattccctgtgaggttggggaagttcaagaatgtcggaacccagggtgcggtggaaggtggcaatgccaatgccagtgtgttgagtagggatcaagtggagagtagcagcagcagcagcttggatggaaggagatgcttctccatgggcacctatcagtatgttcttggcacttctgagctccgagtagctctccagcctggccgtattagaaatggcactggtggtgcaatgatgggaagacctcctggtttaagttcgatcaatgctgatattatggaggggaagaagatctgtacacgcaacaaaggggagagtttctctgtgtcgaaaatttggcaatggtctcatattaagggcaagctacctgctggttcggatgaatgttcggatgccgggagccttccttggatgaagagaggaggcatcatcgcgaagatagaagagggaaaatacgagcttcgtaggaacaacaattcaaatttcttcctcctagaagacgtgaccatttgcatggcaatattcctctatttat

SEQ ID NO: 79124 - DNA, 1783 bp, Zea Mays
cgctttcctgcgctcccaccaggccaccactccacacagtgcagggctccaggcttccctccctcccctccacggcttcgctcgctcacccgccctcctgctctaagcccaaagctcccgtcccgagggcttcagagatcgcatctctggtccgcgggatccgatgagatgcgggggtgctctcgcagtccgacctcgtagcaggcatggctgaagcggccacttcttcgtcttcgtccggatccttcgccccgcgccgcctccatgacgccggtgtcgtcagggaatcgctcccgtacagtgttctcgctgcacccccgccgccgcctctgcctccggtgcaggtgcaggttgcgggttccggcggcggcggtggagggaagattaaccccgcggtgcttttcatcatcgtgattctcgcattagtgttcttcatctccggcctgctccaccttctcgtgcgcgtcctgtcgaagaagcagcaccgccgcggcggcccaagggacacggcgtcggcggcggcgccgaggactggagtggaggcaggcggggttgacgtggcgttgcagcgccagctgcagcagctgttccacctccacgactccgggctggaccaggccttcatcgacgcgctgccggtcttcgcgtaccgggatatcgtcgtgggcggcggcggcgacggggacaaagagccgttcgactgcgcggtgtgtctgtgcgagttcgatgccgaggaccggctccgtctgctgccgctgtgcgggcacgccttccacctcaattgcatcgacacgtggctgctgtccaactcgacctgcccgctctgccgcggggttctcttcatccccgggctcatgggcgagggcaaccccatgtttgatttcgaggagagactggaggaagggcggttgtccgaggactgtgacgacggatttggattgcctgggctgaaggcttcagggttggcacagacaccggtggctgagaagaaggtattccctgtgaggttggggaagttcaagaatgtcggaacccagggtgcggtggaaggtggcaatgccaatgccagtgtgttgagtagggatcaagtggagagtagcagcagcagcagcttggatggaaggagatgcttctccatgggcacctatcagtatgttcttggcacttctgagctccgagtagctctccagcctggccgtattagaaatggcactggtggtgcaatgatgggaagacctcctggtttaagttcgatcaatgctgatattatggaggggaagaagatctgtacacgcaacaaaggggagagtttctctgtgtcgaaaatttggcaatggtctcatattaagggcaagctacctgctggttcggatgaatgttcggatgccgggagccttccttggatgaagagaggaggtgctgcggatacatcaaacttatgactctgcactagtgtaatgagcctttctttagttagtgatacccacctaattttcacctgtagtcatttttcttatctaattttcatgtgctcattttgattggagtgccaacctcattgggggcttagcttttggtgatcttgccatgttagtatgtttcaccacgtagaattgtagattgtgatgatttatttgatctgattctggtctgcctaatgttttgtgttgggtctgatgtatcatttattcctccatccaaaattatattggtcattgtggctatgcacctagagaagcagtttgtagatcagagtatagttaacattgacctatgatttctt

SEQ ID NO: 79125 - DNA, 1565 bp, Zea Mays
cgctttcctgcgctcccaccaggccaccactccacacagtgcagggctccaggcttccctccctcccctccacggcttcgctcgctcacccgccctcctgctctaagcccaaagctcccgtcccgagggcttcagagatcgcatctctggtccgcgggatccgatgagatgcgggggtgctctcgcagtccgacctcgtagcaggcatggctgaagcggccacttcttcgtcttcgtccggatccttcgccccgcgccgcctccatgacgccggtgtcgtcagggaatcgctcccgtacagtgttctcgctgcacccccgccgccgcctctgcctccggtgcaggtgcaggttgcgggttccggcggcggcggtggagggaagattaaccccgcggtgcttttcatcatcgtgattctcgcattagtgttcttcatctccggcctgctccaccttctcgtgcgcgtcctgtcgaagaagcagcaccgccgcggcggcccaagggacacggcgtcggcggcggcgccgaggactggagtggaggcaggcggggttgacgtggcgttgcagcgccagctgcagcagctgttccacctccacgactccgggctggaccaggccttcatcgacgcgctgccggtcttcgcgtaccgggatatcgtcgtgggcggcggcggcgacggggacaaagagccgttcgactgcgcggtgtgtctgtgcgagttcgatgccgaggaccggctccgtctgctgccgctgtgcgggcacgccttccacctcaattgcatcgacacgtggctgctgtccaactcgacctgcccgctctgccgcggggttctcttcatccccgggctcatgggcgagggcaaccccatgtttgatttcgaggagagactggaggaagggcggttgtccgaggactgtgacgacggatttggattgcctgggctgaaggcttcagggttggcacagacaccggtggctgagaagaaggtattccctgtgaggttggggaagttcaagaatgtcggaacccagggtgcggtggaaggtggcaatgccaatgccagtgtgttgagtagggatcaagtggagagtagcagcagcagcagcttggatggaaggagatgcttctccatgggcacctatcagtatgttcttggcacttctgagctccgagtagctctccagcctggccgtattagaaatggcactggtggtgcaatgatgggaagacctcctggtttaagttcgatcaatgctgatattatggaggggaagaagatctgtacacgcaacaaaggggagagtttctctgtgtcgaaaatttggcaatggtctcatattaagggcaagctacctgctggttcggatgaatgttcggatgccgggagccttccttggatgaagagaggaggtgctgcggatacatcaaacttatgactctgcactagtgcatcatcgcgaagatagaagagggaaaatacgagcttcgtaggaacaacaattcaaatttcttcctcctagaagacgtgaccatttgcatggcaatattcctctatttat

SEQ ID NO: 79126 - DNA, 11793 bp, Zea Mays
caactagccgttacaggcatttcactgcgcaatggcgcaccggacagtccggtgcgccaccggtgcgccaccggtgcgccaccggtgtgccaacggtcgtttccaacggctagttctgacagctagccgttggactcatggcgcaccggacagtgaacagttcactgtccggtgcacaccggacagtccggtgtgccactaaaattcaactctgaaagctgcgctctcgggtttctgcgaagggaaatcctctgccgcggaccagcctggccccacctggcagagggtgcaccggacagtccggtgccccaaagccagaaacactaactcttgtttttcagctgattttcgaatcggttttcgttctaacttgtgtgtgagctctagagtgacacctagcactgtgtatgtgtgtgattgtgcaccaacactacactagaactctcttggtcaaactactcatcgacaacccctttttatagtacggctaaaagagaataaaagacctaactaaatcgcgagtgtccacatctccttgacactcggactccgtagatcttcaccttttgtttcgtcgttttagtcgtcgcttcgagttcttatctccgggattgttttcaccgttgtagtacttctacctgtcatgcgacctaacttaccatttgtctctgcaaaacacacgttagtcacatataatattacgttgtcattaatcactaaaaccaaccaggggcctagatgctttcaatctccccctttttggtgattgatgacaaccctacaagttttgtgagagtagtttgttttgaagtttctgtcaatagaaagaatggttagttatactcagtaatctttgacagaaagaacgtgtaccataataataagagtgagcgcatacacatcatcagattcttgttcatataaaagtgaagttaagtcaatgaaacaagaactggaggactggtgataaaatataaggtgaaaacataatacacacagtcaatcataagcagcgagagtatatgacgagtttgtgagccaaaaacatcaagctagtacagagagtagcaagcacatatattacatcaaaaggactctctactaactctctaactccccctagctctcacaactcatatctctccccctttggcgtcaaacaccaaaagggacctgaacctaaacacctgaagcaggaggaggcggcgggggcgcatccggtcgcggtcgaggcagcatagcgaatgccggcggcgggtcagagtcagtcttggatccaggatctgcggtagaagctggagctggtactgactcggactgaggccgcactgcaggagctaccggaacaagagcggtcatagatactgccacaacagtagtggtaacagcagatgctggtggcactggcggctgcgggcagacagagctgagaaccggagaggggaacgccaaagtgaccggccggagcggagaggtaccaacagggggtcctgacaaaatcgatggcaccactggagcgtgaagcggaggaggtggagcagactgaactggaggtactgagataccagaatgctgaagcataagagccatgaatgccctagtctcagcccgatcctgaagtagctgctgctgaagggcatcctgcctgtcctgcatgttctgaaacatcgagagcatcctctcggataaccgggcctgctcggccgccaggttggccagaatcgtagcaagagcagagtccatagcctgaggaggagcaggggcaacactagaactcccagcctcatgatcatgtgagcgtggaggcataggaggcggaggcggaggaggaaccccaaaatcatcatcatcatcatcatcatcatcatcagctgctgtaccctgagtgtcaaactgtcgaagagctgcatcctcggcctgagagtcaaacacagaagcagaagctggcacaggaatctcaggcgcaggacggtaggatccaaaaacgaggcgtgaggcctcaagggtgctctgaaatcgagggggctgaatcagctgcgcaaatatgtggcacaagtagtgagcataaggcaactgccgacgagcacgaatcccatctagaacggtgtcctcgatctcacaaatcaggaagtccacaacgtcaaactcagagtgggagaccagggcaccaaggagccaaagctgaatgtgagtggtagcctccctgtatcccatcctcggcagaagagtccgtctgatgagctcatataggtactttgctgctgtagtaaagtctgccggtgaacgtcgcgacccatctgtgaagggcgggcggaacagagccgcgacgtgagctgtacccggagccacaccgccgtgagggcgacgaggagggtcagaagtgccgtagcagagactgtgaaggcgagtcgtcgactcagggaatccaaatagctgtcggatctgactggcagtaattgtgacatcctcacgctcaaagcggaacctcatccagtgatgatccgggtctatccaaacagaggcgtaaaagacacagacccactcctcaacatacctgccgctgatagtcagaagggtctgaaggccaggcagataggtgaggtgcgcctcagagtcagcaccggctgcaagcagaaagactggaagatccaaaagtcggtgcactcgcagagctatctgagcagacatctgagctctgaaaaacgactcctgaatacgagtgctgaaaagctcacttgctgcagggtctctctgagctggtagccaagactccacgggtacgtatctgaacctacgtacacatgccgctgtagcacgctgaaggtcaaacagacgaggatccgaaaccagaggacgaacctcagtctcatcacgctcccggaaacgaggtggagggacaggaggagctgatgcgggagcgggagtaggaggagcagtggaagctggcgtagtggaggtagcgggtatggctgtggaggtggatggagcaataggagtgacgggagcaggcagagtgggaggcggagtggaagcggaggtgtgggaggaggagcgaggccgggaggtgagacgacgaacacggaatgcaatctgatcggatggagtctgcggctgatctccaagcgcggcctgcgcagcggctgctgcagctgctgccgctgcacgggcttctctgtccgtacgccgcttcttgcggccttcctgctgctccaagtaaacagacttgcccttgacctgcctgaaggggcgacgaggatcctcatcatcgcctccccctggcgccgacgcattcttcgtgcgcggcatcctgaactgatgtctggaaagctcacacgagaggtgacgatccaggcaggacgggagacggcacacgggcaaccaaggtcactgaaatgacagaagaggtgagcacgtattagtcacatagtcataagtatatgaaatgtgaataaatacatacacaagagaaatatggcacatgaaacacaagatgaggcgatcgagaagtcaaacgacgtgaaaacgacgtttgaaggataaatagtgccatagaaggtttggaattcgaattgaggcacgaaacgatatggaattgagccgaaacttcacgaataggtttatataggtgaatatgagtgaagtgtgtgcttggtttgaatttaggcgaagaaaaagggattagggcactcggctcggaaacgatcgctcgaaacggggaatttagtgaaattgaagcctggaaactcggatttgcgtgaaatttggcaagagtgttactggaagtgttgtgaaggtgcctgaaaaatttgggttcaattggagcatttttggctggtttgggcattttaccgaacacgtggtgtgcgaggaactagggtttcggtgaaacggctatttgaggtgggaaaaccctcccgaaggagctaaaagcctacagggatacacaaaagggacaattgaatacattccaccaactggattcacaagatttcacaggaatttgaagaaaatcacaagaggtgaaaagggtggttactgtaacacagcagggaaagagacagagggaaagagacagatgaatgggctgctcaccgagagggagaaggcgagcccgggcacacgatcgccggagcacggtggtcgccggagaggggaggtcgccggcgggcgctgggaatctttggtcatgctactgggtctgttacagacaatcctccccgaatatctgacacccattgacgatttgtgagcccctcagctactgttcttcgctttaaagcccttctagaaatcacttggataagggttggacagtgttcagccacagttttaccaaggagccaacgatcagaccagaacttcacagattcaccactgcctaccactgaggtaatagccacatcaacaagggcctttgcattacggtgcactcggatagggagaccagcccatggccttgacgcatcagtcttttgtaaccaaagccacctggcacgtagggcccatccaaacatctccaggttgagaatacccagaccaccatacttgagaggccgctggacagcttcccaggacacgagacacttacctccatttgcatcaccttgccccttccaaagaaagcctcgtctcctcttatcgattgccttaaaaacccatttagggagttctaaagcaagcataagatagatagggacagaagacaacactgtcttaaccatgacaagacgaccagcccggctgagaagattagctttccatcctggaagtttatcagcaactttatcaacaagcggcaggagatcagagttagcaagcctacagattgatagaggaatccccaagtaagtgcagggaaatttttttgtagcacatggtaataaggcagaaatggtggtcagctcattcgctccacattgaatgggtgtaacagaacttttggagatgttcgtttttaacccagtagcatgaccaaagatgtttcacatcattctttttgaaaacaacttttaatcttataagcagggctaagcatcattaattctctttataaaagaggtatcaagaaatggtaatcaattttccaaggaaggaaatgcatcaaatatttatcacccaactcctatcacctaatgcatcatataaggtgataaatgttttgaaaataacaaggaaagggtaaatgcactagggcttgcctgggataacactagttagtgttttttagacgatgtccgcttgacgactatctctcgtcttgacactggttcagtccgtccatttttccagttcaccggccgacatcgtctcgtggtctgcgctggtccacatcctttgcttcgtacgattctcatctagcgtacctaatgagatgcatggtgcacatgaatggatataaacaggaatgtcacaaggctaaataatgctacaccatagcgaattaaacacttagcggcgagacacataataacacttaaaagcatatactagatgttgagatatttctaagggtgtgtttggtttgacttttggctttgacttttgacctataaaagccaaaagccaaccaaagggctggatcgaggaagcagctttttctaaaagccgactttctcgcagtgcaaatctgaaagcacccatgtacctgcttttagtggcttttcggatggaactgtgaaaacatatatcgaagaacttttaacgacttttagtggtttccaccatacggtttttagttttttaatagctcacagcctacagcagttttatcaacagctcacagcccacaacaacttttttcacagccacagcccaaccaaacagaccctaagtacatcgttcatgttattttaacttaaccaaattcaatttaaacaacaaattactgatgggaggacgctggagcgctgctccgagcggcacaggctagcgcggtacaaattacaaaaattcagacaccccgtaaagccacattcacttactcatgcgatccaaacggctcaggactcgacatcagacgatattattgtattttgaaattcgcgaaatcatttcaagaatactaaactgatattcttactggcagcctacgcttaagtccatagccgatgataaatgcatagtaacacatggggtgttacaacaatggctcatgtcagtccactcatcggacatgagtgtctaaagcatcctcatgcttctttctaagttctgattccctattaatagccttattaagcaattgactaccccttacctcatggtatgaaggtgaccagtatctaggaccatattgttcaatagactcaaagagaaaatttccagcttcaagagttaaccatatttaatgatataccattctcagacaaggaatcaactgcacagtcatcaacactttgtttatgttttttttgtgagatgctcaataataggttgagaagtcttagactttgcctttctgcaactactacttctggtgttctgtagagcatggcactaattgacctggaggagcagaaaccataaaagaattaatagtagcttgagcaattttcttccttgcttgctttccttttgtcccaaaagttgatgactaaattattggccacccaccttgcagagattcaatgagatggttctctaagccagagtgcattcataaaaggtcggttcattcagactccatgttggtccaacaagccacaaaattccttcatcaacaaaagcatgcacgattgcttctagagttgaatatcacaaaggcctttgactcattttcttagcctttcttactggaggtactccaaaaattggtttttgggtagatttggagagacattatatgtggtctgctagctacttcttccactaaagccttggtgaacggtcatccaggcgagatcatccaacatagaagagggttacgacagggagctctgctttcaccaatgctttttattctagttatggatgtattgggaacccttttccctaaagttgtggtggggtttttgcggcctcttgcaaactggccaatgcaacattgagtctctatatattgatgatgttgcccttttcatcagtccattaactgaggacatatccatcactatggacgttctccacttatttgatgaagcatcagaattacggaataatgcccagaaatctagtgcttatcccatacaatgtggtcattgttggccctgaccttgcccaggaacttgctctccctcgctcacatgctcatggacgcaaggaagaagatgaataatgcacttggttgggcgacaaacgtcgtcgtgactactcgcttgtatcttagcctttgattgattgatgtaccagagcggtgattacagaggggaatgtcgctattaattgccgcaacatagctctccttcaccacccgacttccttgctggtcgccatggtcacacccacgcgttgcggcgtgcccgcacgacgcgctcgcttgcacgacatgcacacatgcccaacgactggcaatcttcctgccaccactccaacaaacactgatcgcaccccctacacgtgcatgcctgacccgatccatccatggtgcagctcgcctgcctcccacgtgtgccaaactttggggacacacaccatacatgcacgacacacacacaacacaccaacactcactattgtcgagcttaatcctagcaatcacccctctaagcttgacacgacgacgcctaggtcttcacagcagcgtagcctccactttgttggcgaggagcgccgccttcttccactcgcgatagtggcgagctaggtgcccgcgctccccacactcgaagcagcgctcgcggttgtggcccccatgtcggcagcccagagcacatgttgcttgcgtcgtcgtcgctttcgctatggtcgttgttgtcgttgccacactgcccattcctgccgcgtgcacgcttcccacgctggcagtgtcgtgcctccaattgctcctccgtgagcagcagtcagtagcctctttcgtgtcgtcgttgtctgtgccctccgccacacgcaatcgtcgtcgtgatgaggtcgaggacatctcaatggccacgaccacctgcttgagcctcttcaggctgacggggaggatcttcttcacgaccggtgatcctccaccttctcccacatctcgcgcaaactctcgacgaggccgttgatccgcagcgtgaagacgctgacgctctcgctgtcgcggaagccgacactctcatactccttccacaagcacgacacactcgcggccctcacctgaccgtcgtcgatcctcatcggcctcaccgcctcccacgcttctttcgtcgtcttcgcggcgagcctcgctttcatgttcgacggcatcgcacgcaggaaggcggccaacaccggccgatccttggtgtgctccttgcacaagagccccaccgcctcccacagctccatcacctccaattagacctgcatgaccaacgtccactcgtggtagttcaccttggttagcagtgggagtttgacggagttggagttgatgatgtgttctgtcgcgacgttcgatgagcccacgtcgttgaacatcttcaggccatcctttgttggcggcgaccccaccctagctctgataccatttgttggccctaaccttgcccaggaacccgctctccctcgctcacacagctcacagacgcaaggaagaagatgaacaatgcacttggttggacgacgaatgttgcgacgactactcacttgtagcttagcctttgattgattgttgtactagagtggcgattacattgcggaatgacgctattaatagccacgacatagctctcctccaccacttgttatggcgcgcccacgcgctgcatcgtgcctgcacacctgcagacatgcccaaacaaggttattaaaacgccaaaaatgttgaaacgctcatgggtggaattttaatttttaaacggtttaaacaacataggtaaatttcaatatatcataattttagacaataacatagtcaaataccaaacaaccaacataagttcacgtaataatattgtgcaaaatgacatgtccacaaccacattaccacaatagcacaagttcagctaatagcgagccgacaaccacaaacaaagtgcaatgagatgtctagtagttcacaatcacaaacatagcacaaaagcaactaaagtggaatgcaatgtccacaaccacaagcacacaagtgttactcaagcactcaataaccatcatccaaatcatctaaagtaacatcatccttgtcttgctcatcagcacaaccaccactgttgtttgttgcttcttcatcatccatgtcaaggtcatcaagcacaaaattttcatcgtcttcattctcttcacccacatcaagcccatcttcatcatcatcaagaattggctaccatgagctctcctaggaaagttgtggcctcgaagttgtgtggatgcaccgacgacatgatcaacatgcattgctctgatagttaagaggacaccaatagaatagtactccactgaaataatgggctaatgatttatgattgtgtagttccttcttttttttttttctgaaatacgcaggagagctgcgcatctttgtattaatagaagaaaagaaagggggagagaaccccgatacagcacacacaccactagagactaactacggaccttcagtttctgaactatgtgatgctagaagctagttgcactttggaaccgttgcagtgatgccgttttccaaagccagcaaccaacgtctgctcatacttcatacccttctcgctttctgaactagtttatgtgttcatatgtaaaagtaaaactgtagaagatattattaaggtgtaagcttttatatcactggatgtaatattatcacagccagaccttcacatttagttgttaaagtaaggttcggttgtgcgcgatcaagtttgcatatggcaggggcagatatagtataggtgtttgagggtacaggtacaagcggagcagaacaggctccacttaattaattcattaagggtaacaatgaagcaagaaactaatatgcttatggagacatcggcaatgactacctttgcatacttgcaaagttggtgaattgtatccttatatccgcaaacctaactattttttgtcatattaagggtttgtttggttctttagtctaggacctaaagtttagttaagggactaaaagttagtctctactctgtttggttttaggactaaaattattcggaacacattaaatgaatcataagaggaccaaaatactccttagcattctcacgtcattagttcaaataaaggagagacaaaaagtggaatttatattgtttagtctcttttagtcaccctttgagggactagagacaaacagtttagtcccaccgtttgacaatttagtgactaaatgagactaaaatggagggactaatctttagtcccttaaaccaaacgggtcctaaattgttagcgtattgcatcgtttaggtccatgcccccatgattgaaatcatgtatctgccactagcatatggccataaccacagttgtttccatttttcctatgcagtacttaggtctccaaggaaataccttaaaatgtcctctaccctatatttagagaagattccatcttctatagtctatacgctccaacagtatcactctaaatataggagacgctgctccatcctctgctctatctatttttatactttagacaacagattaagcaaaactaaaaaaatgtgtaagacatttaagggtatgacaaatacagacgtacaaaaaactagagcaaaatatttctaatataagtatttaactatatagaatataaaagagagatgagatatagagaagaaaatattttagaggagtttgtaaaggaggggatgtagaggatatgagaggggatatagaggatgtggtgtatccttctcaatggatgccaattggtacttgatagtgaatgtatgggtctgtttggtttagcttttttcttaggatcttttttgagaatatagctgtgaggagagaatttggctgtggagataatctgagtattgtggagattacgtgaggaggaagataaaaaaaaatcataagatttatgatgtagaaagtgacagttttctactatcgcaacgactcgaccgattctgtgttcacgttgattttacacggttttgtctaaagtgattttcataaaagcgggttgagcgtttagccgactgcaacagcttctagtggtcagaagctcaaaacagcttaaacaaatagggtctatgttggaaagtgagaatctaccattctgcttatggactccaccaggagcgggagagagatggcgcgattggcgaacggaggatgtagatgcagaggtttgtcgcatgtctgtaaattgtacatgaaaggtggtagattttgattggaattttgtagggcgtagcatatcaggtgttcgtatccaatctaatttgctttctgtgtgaagtggaaaacatcaaagaaattgtaaaaaacagagaattattttttttatgtaaatgagcattctcgttgaactttaaccccatttgttgttaatgaggatggggcgctattgggtttgggtagctgttttctgcgtcgtagaattgtttattttacaaataacatgccagtagtagcgttgatctacggttctgagctaccttttggtggaatgatttgagagatccatttcgttgtatagttatttgatttaag

SEQ ID NO: 79127 - DNA, 11451 bp, Zea Mays
caactagccgttacaggcatttcactgcgcaatggcgcaccggacagtccggtgcgccaccggtgcgccaccggtgcgccaccggtgtgccaacggtcgtttccaacggctagttctgacagctagccgttggactcatggcgcaccggacagtgaacagttcactgtccggtgcacaccggacagtccggtgtgccactaaaattcaactctgaaagctgcgctctcgggtttctgcgaagggaaatcctctgccgcggaccagcctggccccacctggcagagggtgcaccggacagtccggtgccccaaagccagaaacactaactcttgtttttcagctgattttcgaatcggttttcgttctaacttgtgtgtgagctctagagtgacacctagcactgtgtatgtgtgtgattgtgcaccaacactacactagaactctcttggtcaaactactcatcgacaacccctttttatagtacggctaaaagagaataaaagacctaactaaatcgcgagtgtccacatctccttgacactcggactccgtagatcttcaccttttgtttcgtcgttttagtcgtcgcttcgagttcttatctccgggattgttttcaccgttgtagtacttctacctgtcatgcgacctaacttaccatttgtctctgcaaaacacacgttagtcacatataatattacgttgtcattaatcactaaaaccaaccaggggcctagatgctttcaatctccccctttttggtgattgatgacaaccctacaagttttgtgagagtagtttgttttgaagtttctgtcaatagaaagaatggttagttatactcagtaatctttgacagaaagaacgtgtaccataataataagagtgagcgcatacacatcatcagattcttgttcatataaaagtgaagttaagtcaatgaaacaagaactggaggactggtgataaaatataaggtgaaaacataatacacacagtcaatcataagcagcgagagtatatgacgagtttgtgagccaaaaacatcaagctagtacagagagtagcaagcacatatattacatcaaaaggactctctactaactctctaactccccctagctctcacaactcatatctctccccctttggcgtcaaacaccaaaagggacctgaacctaaacacctgaagcaggaggaggcggcgggggcgcatccggtcgcggtcgaggcagcatagcgaatgccggcggcgggtcagagtcagtcttggatccaggatctgcggtagaagctggagctggtactgactcggactgaggccgcactgcaggagctaccggaacaagagcggtcatagatactgccacaacagtagtggtaacagcagatgctggtggcactggcggctgcgggcagacagagctgagaaccggagaggggaacgccaaagtgaccggccggagcggagaggtaccaacagggggtcctgacaaaatcgatggcaccactggagcgtgaagcggaggaggtggagcagactgaactggaggtactgagataccagaatgctgaagcataagagccatgaatgccctagtctcagcccgatcctgaagtagctgctgctgaagggcatcctgcctgtcctgcatgttctgaaacatcgagagcatcctctcggataaccgggcctgctcggccgccaggttggccagaatcgtagcaagagcagagtccatagcctgaggaggagcaggggcaacactagaactcccagcctcatgatcatgtgagcgtggaggcataggaggcggaggcggaggaggaaccccaaaatcatcatcatcatcatcatcatcatcatcagctgctgtaccctgagtgtcaaactgtcgaagagctgcatcctcggcctgagagtcaaacacagaagcagaagctggcacaggaatctcaggcgcaggacggtaggatccaaaaacgaggcgtgaggcctcaagggtgctctgaaatcgagggggctgaatcagctgcgcaaatatgtggcacaagtagtgagcataaggcaactgccgacgagcacgaatcccatctagaacggtgtcctcgatctcacaaatcaggaagtccacaacgtcaaactcagagtgggagaccagggcaccaaggagccaaagctgaatgtgagtggtagcctccctgtatcccatcctcggcagaagagtccgtctgatgagctcatataggtactttgctgctgtagtaaagtctgccggtgaacgtcgcgacccatctgtgaagggcgggcggaacagagccgcgacgtgagctgtacccggagccacaccgccgtgagggcgacgaggagggtcagaagtgccgtagcagagactgtgaaggcgagtcgtcgactcagggaatccaaatagctgtcggatctgactggcagtaattgtgacatcctcacgctcaaagcggaacctcatccagtgatgatccgggtctatccaaacagaggcgtaaaagacacagacccactcctcaacatacctgccgctgatagtcagaagggtctgaaggccaggcagataggtgaggtgcgcctcagagtcagcaccggctgcaagcagaaagactggaagatccaaaagtcggtgcactcgcagagctatctgagcagacatctgagctctgaaaaacgactcctgaatacgagtgctgaaaagctcacttgctgcagggtctctctgagctggtagccaagactccacgggtacgtatctgaacctacgtacacatgccgctgtagcacgctgaaggtcaaacagacgaggatccgaaaccagaggacgaacctcagtctcatcacgctcccggaaacgaggtggagggacaggaggagctgatgcgggagcgggagtaggaggagcagtggaagctggcgtagtggaggtagcgggtatggctgtggaggtggatggagcaataggagtgacgggagcaggcagagtgggaggcggagtggaagcggaggtgtgggaggaggagcgaggccgggaggtgagacgacgaacacggaatgcaatctgatcggatggagtctgcggctgatctccaagcgcggcctgcgcagcggctgctgcagctgctgccgctgcacgggcttctctgtccgtacgccgcttcttgcggccttcctgctgctccaagtaaacagacttgcccttgacctgcctgaaggggcgacgaggatcctcatcatcgcctccccctggcgccgacgcattcttcgtgcgcggcatcctgaactgatgtctggaaagctcacacgagaggtgacgatccaggcaggacgggagacggcacacgggcaaccaaggtcactgaaatgacagaagaggtgagcacgtattagtcacatagtcataagtatatgaaatgtgaataaatacatacacaagagaaatatggcacatgaaacacaagatgaggcgatcgagaagtcaaacgacgtgaaaacgacgtttgaaggataaatagtgccatagaaggtttggaattcgaattgaggcacgaaacgatatggaattgagccgaaacttcacgaataggtttatataggtgaatatgagtgaagtgtgtgcttggtttgaatttaggcgaagaaaaagggattagggcactcggctcggaaacgatcgctcgaaacggggaatttagtgaaattgaagcctggaaactcggatttgcgtgaaatttggcaagagtgttactggaagtgttgtgaaggtgcctgaaaaatttgggttcaattggagcatttttggctggtttgggcattttaccgaacacgtggtgtgcgaggaactagggtttcggtgaaacggctatttgaggtgggaaaaccctcccgaaggagctaaaagcctacagggatacacaaaagggacaattgaatacattccaccaactggattcacaagatttcacaggaatttgaagaaaatcacaagaggtgaaaagggtggttactgtaacacagcagggaaagagacagagggaaagagacagatgaatgggctgctcaccgagagggagaaggcgagcccgggcacacgatcgccggagcacggtggtcgccggagaggggaggtcgccggcgggcgctgggaatctttggtcatgctactgggtctgttacagacaatcctccccgaatatctgacacccattgacgatttgtgagcccctcagctactgttcttcgctttaaagcccttctagaaatcacttggataagggttggacagtgttcagccacagttttaccaaggagccaacgatcagaccagaacttcacagattcaccactgcctaccactgaggtaatagccacatcaacaagggcctttgcattacggtgcactcggatagggagaccagcccatggccttgacgcatcagtcttttgtaaccaaagccacctggcacgtagggcccatccaaacatctccaggttgagaatacccagaccaccatacttgagaggccgctggacagcttcccaggacacgagacacttacctccatttgcatcaccttgccccttccaaagaaagcctcgtctcctcttatcgattgccttaaaaacccatttagggagttctaaagcaagcataagatagatagggacagaagacaacactgtcttaaccatgacaagacgaccagcccggctgagaagattagctttccatcctggaagtttatcagcaactttatcaacaagcggcaggagatcagagttagcaagcctacagattgatagaggaatccccaagtaagtgcagggaaatttttttgtagcacatggtaataaggcagaaatggtggtcagctcattcgctccacattgaatgggtgtaacagaacttttggagatgttcgtttttaacccagtagcatgaccaaagatgtttcacatcattctttttgaaaacaacttttaatcttataagcagggctaagcatcattaattctctttataaaagaggtatcaagaaatggtaatcaattttccaaggaaggaaatgcatcaaatatttatcacccaactcctatcacctaatgcatcatataaggtgataaatgttttgaaaataacaaggaaagggtaaatgcactagggcttgcctgggataacactagttagtgttttttagacgatgtccgcttgacgactatctctcgtcttgacactggttcagtccgtccatttttccagttcaccggccgacatcgtctcgtggtctgcgctggtccacatcctttgcttcgtacgattctcatctagcgtacctaatgagatgcatggtgcacatgaatggatataaacaggaatgtcacaaggctaaataatgctacaccatagcgaattaaacacttagcggcgagacacataataacacttaaaagcatatactagatgttgagatatttctaagggtgtgtttggtttgacttttggctttgacttttgacctataaaagccaaaagccaaccaaagggctggatcgaggaagcagctttttctaaaagccgactttctcgcagtgcaaatctgaaagcacccatgtacctgcttttagtggcttttcggatggaactgtgaaaacatatatcgaagaacttttaacgacttttagtggtttccaccatacggtttttagttttttaatagctcacagcctacagcagttttatcaacagctcacagcccacaacaacttttttcacagccacagcccaaccaaacagaccctaagtacatcgttcatgttattttaacttaaccaaattcaatttaaacaacaaattactgatgggaggacgctggagcgctgctccgagcggcacaggctagcgcggtacaaattacaaaaattcagacaccccgtaaagccacattcacttactcatgcgatccaaacggctcaggactcgacatcagacgatattattgtattttgaaattcgcgaaatcatttcaagaatactaaactgatattcttactggcagcctacgcttaagtccatagccgatgataaatgcatagtaacacatggggtgttacaacaatggctcatgtcagtccactcatcggacatgagtgtctaaagcatcctcatgcttctttctaagttctgattccctattaatagccttattaagcaattgactaccccttacctcatggtatgaaggtgaccagtatctaggaccatattgttcaatagactcaaagagaaaatttccagcttcaagagttaaccatatttaatgatataccattctcagacaaggaatcaactgcacagtcatcaacactttgtttatgttttttttgtgagatgctcaataataggttgagaagtcttagactttgcctttctgcaactactacttctggtgttctgtagagcatggcactaattgacctggaggagcagaaaccataaaagaattaatagtagcttgagcaattttcttccttgcttgctttccttttgtcccaaaagttgatgactaaattattggccacccaccttgcagagattcaatgagatggttctctaagccagagtgcattcataaaaggtcggttcattcagactccatgttggtccaacaagccacaaaattccttcatcaacaaaagcatgcacgattgcttctagagttgaatatcacaaaggcctttgactcattttcttagcctttcttactggaggtactccaaaaattggtttttgggtagatttggagagacattatatgtggtctgctagctacttcttccactaaagccttggtgaacggtcatccaggcgagatcatccaacatagaagagggttacgacagggagctctgctttcaccaatgctttttattctagttatggatgtattgggaacccttttccctaaagttgtggtggggtttttgcggcctcttgcaaactggccaatgcaacattgagtctctatatattgatgatgttgcccttttcatcagtccattaactgaggacatatccatcactatggacgttctccacttatttgatgaagcatcagaattacggaataatgcccagaaatctagtgcttatcccatacaatgtggtcattgttggccctgaccttgcccaggaacttgctctccctcgctcacatgctcatggacgcaaggaagaagatgaataatgcacttggttgggcgacaaacgtcgtcgtgactactcgcttgtatcttagcctttgattgattgatgtaccagagcggtgattacagaggggaatgtcgctattaattgccgcaacatagctctccttcaccacccgacttccttgctggtcgccatggtcacacccacgcgttgcggcgtgcccgcacgacgcgctcgcttgcacgacatgcacacatgcccaacgactggcaatcttcctgccaccactccaacaaacactgatcgcaccccctacacgtgcatgcctgacccgatccatccatggtgcagctcgcctgcctcccacgtgtgccaaactttggggacacacaccatacatgcacgacacacacacaacacaccaacactcactattgtcgagcttaatcctagcaatcacccctctaagcttgacacgacgacgcctaggtcttcacagcagcgtagcctccactttgttggcgaggagcgccgccttcttccactcgcgatagtggcgagctaggtgcccgcgctccccacactcgaagcagcgctcgcggttgtggcccccatgtcggcagcccagagcacatgttgcttgcgtcgtcgtcgctttcgctatggtcgttgttgtcgttgccacactgcccattcctgccgcgtgcacgcttcccacgctggcagtgtcgtgcctccaattgctcctccgtgagcagcagtcagtagcctctttcgtgtcgtcgttgtctgtgccctccgccacacgcaatcgtcgtcgtgatgaggtcgaggacatctcaatggccacgaccacctgcttgagcctcttcaggctgacggggaggatcttcttcacgaccggtgatcctccaccttctcccacatctcgcgcaaactctcgacgaggccgttgatccgcagcgtgaagacgctgacgctctcgctgtcgcggaagccgacactctcatactccttccacaagcacgacacactcgcggccctcacctgaccgtcgtcgatcctcatcggcctcaccgcctcccacgcttctttcgtcgtcttcgcggcgagcctcgctttcatgttcgacggcatcgcacgcaggaaggcggccaacaccggccgatccttggtgtgctccttgcacaagagccccaccgcctcccacagctccatcacctccaattagacctgcatgaccaacgtccactcgtggtagttcaccttggttagcagtgggagtttgacggagttggagttgatgatgtgttctgtcgcgacgttcgatgagcccacgtcgttgaacatcttcaggccatcctttgttggcggcgaccccaccctagctctgataccatttgttggccctaaccttgcccaggaacccgctctccctcgctcacacagctcacagacgcaaggaagaagatgaacaatgcacttggttggacgacgaatgttgcgacgactactcacttgtagcttagcctttgattgattgttgtactagagtggcgattacattgcggaatgacgctattaatagccacgacatagctctcctccaccacttgttatggcgcgcccacgcgctgcatcgtgcctgcacacctgcagacatgcccaaacaaggttattaaaacgccaaaaatgttgaaacgctcatgggtggaattttaatttttaaacggtttaaacaacataggtaaatttcaatatatcataattttagacaataacatagtcaaataccaaacaaccaacataagttcacgtaataatattgtgcaaaatgacatgtccacaaccacattaccacaatagcacaagttcagctaatagcgagccgacaaccacaaacaaagtgcaatgagatgtctagtagttcacaatcacaaacatagcacaaaagcaactaaagtggaatgcaatgtccacaaccacaagcacacaagtgttactcaagcactcaataaccatcatccaaatcatctaaagtaacatcatccttgtcttgctcatcagcacaaccaccactgttgtttgttgcttcttcatcatccatgtcaaggtcatcaagcacaaaattttcatcgtcttcattctcttcacccacatcaagcccatcttcatcatcatcaagaattggctaccatgagctctcctaggaaagttgtggcctcgaagttgtgtggatgcaccgacgacatgatcaacatgcattgctctgatagttaagaggacaccaatagaatagtactccactgaaataatgggctaatgatttatgattgtgtagttccttcttttttttttttctgaaatacgcaggagagctgcgcatctttgtattaatagaagaaaagaaagggggagagaaccccgatacagcacacacaccactagagactaactacggaccttcagtttctgaactatgtgatgctagaagctagttgcactttggaaccgttgcagtgatgccgttttccaaagccagcaaccaacgtctgctcatacttcatacccttctcgctttctgaactagtttatgtgttcatatgtaaaagtaaaactgtagaagatattattaaggtgtaagcttttatatcactggatgtaatattatcacagccagaccttcacatttagttgttaaagtaaggttcggttgtgcgcgatcaagtttgcatatggcaggggcagatatagtataggtgtttgagggtacaggtacaagcggagcagaacaggctccacttaattaattcattaagggtaacaatgaagcaagaaactaatatgcttatggagacatcggcaatgactacctttgcatacttgcaaagttggtgaattgtatccttatatccgcaaacctaactattttttgtcatattaagggtttgtttggttctttagtctaggacctaaagtttagttaagggactaaaagttagtctctactctgtttggttttaggactaaaattattcggaacacattaaatgaatcataagaggaccaaaatactccttagcattctcacgtcattagttcaaataaaggagagacaaaaagtggaatttatattgtttagtctcttttagtcaccctttgagggactagagacaaacagtttagtcccaccgtttgacaatttagtgactaaatgagactaaaatggagggactaatctttagtcccttaaaccaaacgggtcctaaattgttagcgtattgcatcgtttaggtccatgcccccatgattgaaatcatgtatctgccactagcatatggccataaccacagttgtttccatttttcctatgcagtacttaggtctccaaggaaataccttaaaatgtcctctaccctatatttagagaagattccatcttctatagtctatacgctccaacagtatcactctaaatataggagacgctgctccatcctctgctctatctatttttatactttagacaacagattaagcaaaactaaaaaaatgtgtaagacatttaagggtatgacaaatacagacgtacaaaaaactagagcaaaatatttctaatataagtatttaactatatagaatataaaagagagatgagatatagagaagaaaatattttagaggagtttgtaaaggaggggatgtagaggatatgagaggggatatagaggatgtggtgtatccttctcaatggatgccaattggtacttgatagtgaatgtatgggtctgtttggtttagcttttttcttaggatcttttttgagaatatagctgtgaggagagaatttggctgtggagataatctgagtattgtggagattacgtgaggaggaagataaaaaaaaatcataagatttatgatgtagaaagtgacagttttctactatcgcaacgactcgaccgattctgtgttcacgttgattttacacggttttgtctaaagtgattttcataaaagcgggttgagcgtttagccgactgcaacagcttctagtggtcagaagctcaaaacagcttaaacaaatagggtctatgttggaaagtgagaatctaccattctgcttatggactccaccaggagcgggagagagatggcgcgattggcgaacggaggatgtagatgcagagacgagattttttacactgagttgac

SEQ ID NO: 79128 - DNA, 3768 bp, Zea Mays
ggaatattttaatgcggcttcgggtacacgcgggcaggtcaatcctcgcactccacctcctgcctgcccccgcacccgtagccatgttggatccaccgccccaccacgggtagctgaaggggcggcggcggcggcgcggcagagggatgaagaacttcctcaggaagctgcacatcggtgactccgccgccggggatggcgcctcgtcgccttcggcacctaccccgccgccaacgaaaaagggcgggggcatcgagcataggcacgcctccgggttgtcgggctggctgagctccgtgaccagccggccgcacccacctacgccgctttctgcttctgctgcaccggcagcggcggcgccggaggtggaggagtcggcgttgacgactgcgttggcttcgtctgttgaggagaagagggtagccgaggaggacgaggagagggcgaggcgggagtcccggaaggaggcggagatggagaagaaagagaaacagcaggcggagctggagaactatcacatgcagctggccctcgagatgagcgtgagggaggacccggaggcgatgcagatcgaggtggccaaacagatcagcctcggctcctgccccatccagagctcgcccgcagaggtcatcgccttccgatactggagtttcaatgcccttagctatgacgacaaaatattggatggtttctatgacatttgtgccactggggatgagcttgcaatgtcaaccataccttctctgatggatctgcaagcactgccattttcacatggaggcaaaactgatgctgtattggtcgacagagcactggattctgagctcgtagctcttgagcagaaggctgttatcatggctgtagaatttcgctcgaaaaaatcagaatttgttgaccgctctttggttcagactctagctaatttagtttccaactacatgggtggaccagtcattgatccagaaagcatgctgttgaagtaccgaaatatgagcagtgcgttgaaagctgatataagaagtgcagttgtacctcttgggcagctaacagttggtttggctcgtcaccgtgcactgctttttaaggttttggcagatagccttgctgttccttgccgattagttaaaggaaggcagtacactggatcagatgatggagctttgaacattgtgaaatttaatgatggaagggagtgcattgttgatctcatgatagatcctggtactcttatttcatcagatggtgctgacctgggtagagaattggaagacagcttagtcgtagataatcaacatgttaacaaagatgacactagcactcagttactttcctctttcagtgaagcttcaagttccatgcacagttcatttgaaaatggatcgcttgaaaaaggatttatttgcaatgctgggcattttggtccatatgaagcaacaactgcccatagtgacaatgatgtgcttgggtctggggtatcaagttcatttgatgagctatcggtcagcacatatgcatgtgaaaacatacctattattcatgaatctaatacagatcataccatgactgaaaaaagcaaagataagtcgatcacatcaaataattcgtcatcatgttcgcctccatcttctgagataggcagtactcctgctgtacgaaggaaaaaggtcaaagacgtctcggagtatatgattagtgctgcaaaagagaaccctcagatagcagaaaggatccatgctgtgttacttgaaagtggtgttgtgccaccacctgacttgttttcagaagaatctaaggaacaaccaaaggacctgattgtttacgacacatctctgtttcaaacaacagatgaaatgataaggacaatgaatgagcttgaatccacagcacacgatggttgtgctggtcttggtccttcattgccacctgatcctggacatgagctccaaacaaagattgttccttatcggatgcctcctgacctcaagcctgtccagggattaggtgtttaccataagtttgatttccgggataacatcaatccctctatacctctctatgaaccaagtccagctcctcaggaaaatccattacaacttataaagcaaatgcctgttacagctgctgctgttgcaacagctgcagtggttgcatcttcaatggttgttgctgctgcgaaatctaacagcgatattaaactagatgtgccagttgcagcagctgccactgctgctgcagttgttgctactacagctgctgttaaccaacaatatgaatacttggatccgggttgtcaattgctttgcttgccaagttcatcaaataaattaatccaaaaaggtagacatgacttgttggatgatgatcagctggaaacaaatcatggacaggataatgcccttgagcgtgaaaaggatttggttcaagcaccccaggaagctgagcgaatctctgataggtcaactgggacagagagtgcaagatctgaaatttctcttgataaaatcgcagagtttgaaatccagtgggaagaacttacccttggagaacgagttgggctgggatctttcggagaagtgtatagaggtgaatggcatgaaacagaagtcgcagtcaagaaattcttgcaacaagatatttcaagtgatgctctggaagaatttagaactgaggtgggaataatgagaagactgcgtcatcctaatgttgttctttttatgggtgctgtcactcgtgttcctcatctttctatcgtgactgaatttctgccaaggggtagtttatttcggttaatccataggcccaataaccagttggatcaaaaaaggcgtttaaggatggcacttgatgtggcacgtggtatgaattatttacacaattgcaccccagtcatagttcaccgagacttgaaatctccaaatctacttgttgacaaaaattgggttgtgaaggtctgtgattttggtttatcacgtctgaaacatagtaccttcctttcgtcaagatccgcagctggaacagcggagtggatggcaccagaaatacttcgaaatgaaccatcagatgagaaatgtgacgtcttcagctatggggtcatattatgggagctctgtacattgctgcagccatgggaaggtatgaatcccatgcaggttgttggagctgttggttttcagcaacgacggcttgatattcctggtggtgtggatcctgctgtagcagagataataaggagatgctggcagactgatccaaggatgcggccatcattttcagagatcatggctactttgagaccattgttaaaaaacatgcctgccaaccaacctaccaggaagcgggcacaacaaacagatgattaagaatatattgtacgccaaatgcgtatttgatgaagaacagatccatgaagccaaagaaaagaaagggaaaagaaaatttgtgaaagttcgtgcatactatttttgcagacacaatggttactggagtcagaagttgacatgtcatgttgtaacaggatcatcgtcttctgttcagttaggccttatttttgctagtcctcgaactaatggaaaactattccatctttaaggccccatcaaattgtaatgttttactatgaaaaggttggctcacccttgtgtatatcacgtctcaacaaatctgcttttaattgacaggtagattacaaaagaaaattatgccctttgtactaagaatgatcattctttgcggtaggaaaaatgttaaacctacttttgcaaacat

SEQ ID NO: 79129 - DNA, 3883 bp, Zea Mays
atattttaatgcggcttcgggtacacgcgggcaggtcaatcctcgcactccacctcctgcctgcccccgcacccgtagccatgttggatccaccgccccaccacgggtagctgaaggggcggcggcggcggcgcggcagagggatgaagaacttcctcaggaagctgcacatcggtgactccgccgccggggatggcgcctcgtcgccttcggcacctaccccgccgccaacgaaaaagggcgggggcatcgagcataggcacgcctccgggttgtcgggctggctgagctccgtgaccagccggccgcacccacctacgccgctttctgcttctgctgcaccggcagcggcggcgccggaggtggaggagtcggcgttgacgactgcgttggcttcgtctgttgaggagaagagggtagccgaggaggacgaggagagggcgaggcgggagtcccggaaggaggcggagatggagaagaaagagaaacagcaggcggagctggagaactatcacatgcagctggccctcgagatgagcgtgagggaggacccggaggcgatgcagatcgaggtggccaaacagatcagcctcggctcctgccccatccagagctcgcccgcagaggtcatcgccttccgatactggatttgttcgtgcttcacagagtttcaatgcccttagctatgacgacaaaatattggatggtttctatgacatttgtgccactggggatgagcttgcaatgtcaaccataccttctctgatggatctgcaagcactgccattttcacatggaggcaaaactgatgctgtattggtcgacagagcactggattctgagctcgtagctcttgagcagaaggctgttatcatggctgtagaatttcgctcgaaaaaatcagaatttgttgaccgctctttggttcagactctagctaatttagtttccaactacatgggtggaccagtcattgatccagaaagcatgctgttgaagtaccgaaatatgagcagtgcgttgaaagctgatataagaagtgcagttgtacctcttgggcagctaacagttggtttggctcgtcaccgtgcactgctttttaaggttttggcagatagccttgctgttccttgccgattagttaaaggaaggcagtacactggatcagatgatggagctttgaacattgtgaaatttaatgatggaagggagtgcattgttgatctcatgatagatcctggtactcttatttcatcagatggtgctgacctgggtagagaattggaagacagcttagtcgtagataatcaacatgttaacaaagatgacactagcactcagttactttcctctttcagtgaagcttcaagttccatgcacagttcatttgaaaatggatcgcttgaaaaaggatttatttgcaatgctgggcattttggtccatatgaagcaacaactgcccatagtgacaatgatgtgcttgggtctggggtatcaagttcatttgatgagctatcggtcagcacatatgcatgtgaaaacatacctattattcatgaatctaatacagatcataccatgactgaaaaaagcaaagataagtcgatcacatcaaataattcgtcatcatgttcgcctccatcttctgagataggcagtactcctgctgtacgaaggaaaaaggtcaaagacgtctcggagtatatgattagtgctgcaaaagagaaccctcagatagcagaaaggatccatgctgtgttacttgaaagtggtgttgtgccaccacctgacttgttttcagaagaatctaaggaacaaccaaaggacctgattgtttacgacacatctctgtttcaaacaacagatgaaatgataaggacaatgaatgagcttgaatccacagcacacgatggttgtgctggtcttggtccttcattgccacctgatcctggacatgagctccaaacaaagattgttccttatcggatgcctcctgacctcaagcctgtccagggattaggtgtttaccataagtttgatttccgggataacatcaatccctctatacctctctatgaaccaagtccagctcctcaggaaaatccattacaacttataaagcaaatgcctgttacagctgctgctgttgcaacagctgcagtggttgcatcttcaatggttgttgctgctgcgaaatctaacagcgatattaaactagatgtgccagttgcagcagctgccactgctgctgcagttgttgctactacagctgctgttaaccaacaatatgaatacttggatccgggttgtcaattgctttgcttgccaagttcatcaaataaattaatccaaaaaggtagacatgacttgttggatgatgatcagctggaaacaaatcatggacaggataatgcccttgagcgtgaaaaggatttggttcaagcaccccaggaagctgagcgaatctctgataggtcaactgggacagagagtgcaagatctgaaatttctcttgataaaatcgcagagtttgaaatccagtgggaagaacttacccttggagaacgagttgggctgggatctttcggagaagtgtatagaggtgaatggcatgaaacagaagtcgcagtcaagaaattcttgcaacaagatatttcaagtgatgctctggaagaatttagaactgaggtgggaataatgagaagactgcgtcatcctaatgttgttctttttatgggtgctgtcactcgtgttcctcatctttctatcgtgactgaatttctgccaaggggtagtttatttcggttaatccataggcccaataaccagttggatcaaaaaaggcgtttaaggatggcacttgatgtggcacgtggtatgaattatttacacaattgcaccccagtcatagttcaccgagacttgaaatctccaaatctacttgttgacaaaaattgggttgtgaaggtctgtgattttggtttatcacgtctgaaacatagtaccttcctttcgtcaagatccgcagctggaacagcggagtggatggcaccagaaatacttcgaaatgaaccatcagatgagaaatgtgacgtcttcagctatggggtcatattatgggagctctgtacattgctgcagccatgggaaggtatgaatcccatgcaggttgttggagctgttggttttcagcaacgacggcttgatattcctggtggtgtggatcctgctgtagcagagataataaggagatgctggcagactgatccaaggatgcggccatcattttcagagatcatggctactttgagaccattgttaaaaaacatgcctgccaaccaacctaccaggaagcgggcacaacaaacagatgattaagaatatattgtacgccaaatgcgtatttgatgaagaacaggtgaattttggtccttttgccttcagcgtttggttctccattggagccagcggaatgctgtctatatctatctgatgaaagccgacccaaataacacagatccatgaagccaaagaaaagaaagggaaaagaaaatttgtgaaagttcgtgcatactatttttgcagacacaatggttactggagtcagaagttgacatgtcatgttgtaacaggatcatcgtcttctgttcagttaggccttatttttgctagtcctcgaactaatggaaaactattccatctttaaggccccatcaaattgtaatgttttactatgaaaaggttggctcacccttgtgtatatcacgtctcaacaaatctgcttttaattgacaggtagattacaaaagaaaattatgccctttgtactaagaatgatcattctttgcggtaggaaaaatgttaaacctacttttgcaaacat

SEQ ID NO: 79130 - DNA, 3919 bp, Zea Mays
aatgcggcttcgggtacacgcgggcaggtcaatcctcgcactccacctcctgcctgcccccgcacccgtagccatgttggatccaccgccccaccacgggtagctgaaggggcggcggcggcggcgcggcagagggatgaagaacttcctcaggaagctgcacatcggtgactccgccgccggggatggcgcctcgtcgccttcggcacctaccccgccgccaacgaaaaagggcgggggcatcgagcataggcacgcctccgggttgtcgggctggctgagctccgtgaccagccggccgcacccacctacgccgctttctgcttctgctgcaccggcagcggcggcgccggaggtggaggagtcggcgttgacgactgcgttggcttcgtctgttgaggagaagagggtagccgaggaggacgaggagagggcgaggcgggagtcccggaaggaggcggagatggagaagaaagagaaacagcaggcggagctggagaactatcacatgcagctggccctcgagatgagcgtgagggaggacccggaggcgatgcagatcgaggtggccaaacagatcagcctcggctcctgccccatccagagctcgcccgcagaggtcatcgccttccgatactggatttgttcgtgcttcacagagtttcaatgcccttagctatgacgacaaaatattggatggtttctatgacatttgtgccactggggatgagcttgcaatgtcaaccataccttctctgatggatctgcaagcactgccattttcacatggaggcaaaactgatgctgtattggtcgacagagcactggattctgagctcgtagctcttgagcagaaggctgttatcatggctgtagaatttcgctcgaaaaaatcagaatttgttgaccgctctttggttcagactctagctaatttagtttccaactacatgggtggaccagtcattgatccagaaagcatgctgttgaagtaccgaaatatgagcagtgcgttgaaagctgatataagaagtgcagttgtacctcttgggcagctaacagttggtttggctcgtcaccgtgcactgctttttaaggttttggcagatagccttgctgttccttgccgattagttaaaggaaggcagtacactggatcagatgatggagctttgaacattgtgaaatttaatgatggaagggagtgcattgttgatctcatgatagatcctggtactcttatttcatcagatggtgctgacctgggtagagaattggaagacagcttagtcgtagataatcaacatgttaacaaagatgacactagcactcagttactttcctctttcagtgaagcttcaagttccatgcacagttcatttgaaaatggatcgcttgaaaaaggatttatttgcaatgctgggcattttggtccatatgaagcaacaactgcccatagtgacaatgatgtgcttgggtctggggtatcaagttcatttgatgagctatcggtcagcacatatgcatgtgaaaacatacctattattcatgaatctaatacagatcataccatgactgaaaaaagcaaagataagtcgatcacatcaaataattcgtcatcatgttcgcctccatcttctgagataggcagtactcctgctgtacgaaggaaaaaggtcaaagacgtctcggagtatatgattagtgctgcaaaagagaaccctcagatagcagaaaggatccatgctgtgttacttgaaagtggtgttgtgccaccacctgacttgttttcagaagaatctaaggaacaaccaaaggacctgattgtttacgacacatctctgtttcaaacaacagatgaaatgataaggacaatgaatgagcttgaatccacagcacacgatggttgtgctggtcttggtccttcattgccacctgatcctggacatgagctccaaacaaagattgttccttatcggatgcctcctgacctcaagcctgtccagggattaggtgtttaccataagtttgatttccgggataacatcaatccctctatacctctctatgaaccaagtccagctcctcaggaaaatccattacaacttataaagcaaatgcctgttacagctgctgctgttgcaacagctgcagtggttgcatcttcaatggttgttgctgctgcgaaatctaacagcgatattaaactagatgtgccagttgcagcagctgccactgctgctgcagttgttgctactacagctgctgttaaccaacaatatgaatacttggatccgggttgtcaattgctttgcttgccaagttcatcaaataaattaatccaaaaaggtagacatgacttgttggatgatgatcagctggaaacaaatcatggacaggataatgcccttgagcgtgaaaaggatttggttcaagcaccccaggaagctgagcgaatctctgataggtcaactgggacagagagtgcaagatctgaaatttctcttgataaaatcgcagagtttgaaatccagtgggaagaacttacccttggagaacgagttgggctgggatctttcggagaagtgtatagaggtgaatggcatgaaacagaagtcgcagtcaagaaattcttgcaacaagatatttcaagtgatgctctggaagaatttagaactgaggtgggaataatgagaagactgcgtcatcctaatgttgttctttttatgggtgctgtcactcgtgttcctcatctttctatcgtgactgaatttctgccaaggggtagtttatttcggttaatccataggcccaataaccagttggatcaaaaaaggcgtttaaggatggcacttgatgtggcacgtggtatgaattatttacacaattgcaccccagtcatagttcaccgagacttgaaatctccaaatctacttgttgacaaaaattgggttgtgaaggtctgtgattttggtttatcacgtctgaaacatagtaccttcctttcgtcaagatccgcagctggaacagcggagtggatggcaccagaaatacttcgaaatgaaccatcagatgagaaatgtgacgtcttcagctatggggtcatattatgggagctctgtacattgctgcagccatgggaaggtatgaatcccatgcaggttgttggagctgttggttttcagcaacgacggcttgatattcctggtggtgtggatcctgctgtagcagagataataaggagatgctggcagactgatccaaggatgcggccatcattttcagagatcatggctactttgagaccattgttaaaaaacatgcctgccaaccaacctaccaggaagcgggcacaacaaacagatgattaagaatatattggtcagtatcagctgaagacacaggccaaagagagactgcattgtacgccaaatgcgtatttgatgaagaacaggtgaattttggtccttttgccttcagcgtttggttctccattggagccagcggaatgctgtctatatctatctgatgaaagccgacccaaataacacagatccatgaagccaaagaaaagaaagggaaaagaaaatttgtgaaagttcgtgcatactatttttgcagacacaatggttactggagtcagaagttgacatgtcatgttgtaacaggatcatcgtcttctgttcagttaggccttatttttgctagtcctcgaactaatggaaaactattccatctttaaggccccatcaaattgtaatgttttactatgaaaaggttggctcacccttgtgtatatcacgtctcaacaaatctgcttttaattgacaggtagattacaaaagaaaattatgccctttgtactaagaatgatcattctttgcggtaggaaaaatgttaaacctacttttgcaaacat

SEQ ID NO: 79131 - DNA, 3761 bp, Zea Mays
gtcaatcctcgcactccacctcctgcctgcccccgcacccgtagccatgttggatccaccgccccaccacgggtagctgaaggggcggcggcggcggcgcggcagagggatgaagaacttcctcaggaagctgcacatcggtgactccgccgccggggatggcgcctcgtcgccttcggcacctaccccgccgccaacgaaaaagggcgggggcatcgagcataggcacgcctccgggttgtcgggctggctgagctccgtgaccagccggccgcacccacctacgccgctttctgcttctgctgcaccggcagcggcggcgccggaggtggaggagtcggcgttgacgactgcgttggcttcgtctgttgaggagaagagggtagccgaggaggacgaggagagggcgaggcgggagtcccggaaggaggcggagatggagaagaaagagaaacagcaggcggagctggagaactatcacatgcagctggccctcgagatgagcgtgagggaggacccggaggcgatgcagatcgaggtggccaaacagatcagcctcggctcctgccccatccagagctcgcccgcagaggtcatcgccttccgatactggagtttcaatgcccttagctatgacgacaaaatattggatggtttctatgacatttgtgccactggggatgagcttgcaatgtcaaccataccttctctgatggatctgcaagcactgccattttcacatggaggcaaaactgatgctgtattggtcgacagagcactggattctgagctcgtagctcttgagcagaaggctgttatcatggctgtagaatttcgctcgaaaaaatcagaatttgttgaccgctctttggttcagactctagctaatttagtttccaactacatgggtggaccagtcattgatccagaaagcatgctgttgaagtaccgaaatatgagcagtgcgttgaaagctgatataagaagtgcagttgtacctcttgggcagctaacagttggtttggctcgtcaccgtgcactgctttttaaggttttggcagatagccttgctgttccttgccgattagttaaaggaaggcagtacactggatcagatgatggagctttgaacattgtgaaatttaatgatggaagggagtgcattgttgatctcatgatagatcctggtactcttatttcatcagatggtgctgacctgggtagagaattggaagacagcttagtcgtagataatcaacatgttaacaaagatgacactagcactcagttactttcctctttcagtgaagcttcaagttccatgcacagttcatttgaaaatggatcgcttgaaaaaggatttatttgcaatgctgggcattttggtccatatgaagcaacaactgcccatagtgacaatgatgtgcttgggtctggggtatcaagttcatttgatgagctatcggtcagcacatatgcatgtgaaaacatacctattattcatgaatctaatacagatcataccatgactgaaaaaagcaaagataagtcgatcacatcaaataattcgtcatcatgttcgcctccatcttctgagataggcagtactcctgctgtacgaaggaaaaaggtcaaagacgtctcggagtatatgattagtgctgcaaaagagaaccctcagatagcagaaaggatccatgctgtgttacttgaaagtggtgttgtgccaccacctgacttgttttcagaagaatctaaggaacaaccaaaggacctgattgtttacgacacatctctgtttcaaacaacagatgaaatgataaggacaatgaatgagcttgaatccacagcacacgatggttgtgctggtcttggtccttcattgccacctgatcctggacatgagctccaaacaaagattgttccttatcggatgcctcctgacctcaagcctgtccagggattaggtgtttaccataagtttgatttccgggataacatcaatccctctatacctctctatgaaccaagtccagctcctcaggaaaatccattacaacttataaagcaaatgcctgttacagctgctgctgttgcaacagctgcagtggttgcatcttcaatggttgttgctgctgcgaaatctaacagcgatattaaactagatgtgccagttgcagcagctgccactgctgctgcagttgttgctactacagctgctgttaaccaacaatatgaatacttggatccgggttgtcaattgctttgcttgccaagttcatcaaataaattaatccaaaaaggtagacatgacttgttggatgatgatcagctggaaacaaatcatggacaggataatgcccttgagcgtgaaaaggatttggttcaagcaccccaggaagctgagcgaatctctgataggtcaactgggacagagagtgcaagatctgaaatttctcttgataaaatcgcagagtttgaaatccagtgggaagaacttacccttggagaacgagttgggctgggatctttcggagaagtgtatagaggtgaatggcatgaaacagaagtcgcagtcaagaaattcttgcaacaagatatttcaagtgatgctctggaagaatttagaactgaggtgggaataatgagaagactgcgtcatcctaatgttgttctttttatgggtgctgtcactcgtgttcctcatctttctatcgtgactgaatttctgccaaggggtagtttatttcggttaatccataggcccaataaccagttggatcaaaaaaggcgtttaaggatggcacttgatgtggcacgtggtatgaattatttacacaattgcaccccagtcatagttcaccgagacttgaaatctccaaatctacttgttgacaaaaattgggttgtgaaggtctgtgattttggtttatcacgtctgaaacatagtaccttcctttcgtcaagatccgcagctggaacagcggagtggatggcaccagaaatacttcgaaatgaaccatcagatgagaaatgtgacgtcttcagctatggggtcatattatgggagctctgtacattgctgcagccatgggaagtgatccaaggatgcggccatcattttcagagatcatggctactttgagaccattgttaaaaaacatgcctgccaaccaacctaccaggaagcgggcacaacaaacagatgattaagaatatattggtcagtatcagctgaagacacaggccaaagagagactgcattgtacgccaaatgcgtatttgatgaagaacaggtgaattttggtccttttgccttcagcgtttggttctccattggagccagcggaatgctgtctatatctatctgatgaaagccgacccaaataacacagatccatgaagccaaagaaaagaaagggaaaagaaaatttgtgaaagttcgtgcatactatttttgcagacacaatggttactggagtcagaagttgacatgtcatgttgtaacaggatcatcgtcttctgttcagttaggccttatttttgctagtcctcgaactaatggaaaactattccatctttaaggccccatcaaattgtaatgttttactatgaaaaggttggctcacccttgtgtatatcacgtctcaacaaatctgcttttaattgacaggtagattacaaaagaaaattatgccctttgtactaagaatgatcattctttgcggtaggaaaaatgttaaacctacttttgcaaacat

SEQ ID NO: 79132 - DNA, 4443 bp, Zea Mays
cgcttaagcgctgataaaaatcagcaactgcttctctccagcacgtctcctttctcttcctcagctcgctcccggccggagctccctactgctctctcctgctcagccgcctgccatggagctcgccgagccctcccgagccgaggcccctgctcccagcgtcgcgatccccagctcctctgctcactcggctgctcgcgccgtcgccttgctgctcgcccgtctgcgcggcacttcgtctatggccgctgtccgccgtcgagttcctgtacacgcgcctctggttcgccactgctctctgcgcgcgcgctctgctcggcgtcgccatctcctccatctcctcctgtgctccagctcgctgtcgggacggtttttcccatgcccggcgatgctccagtcctctgcgcggcggtactccctgccaagcacctcccagccgaggcccttgtctcccatggccgaccgtcgtgtgcgccgctaattcttccctgtgttcggtctggctcgatcgcgctttggtgctagcgccgtggtctgcagcttgtctgttccagctctccggtgccgcacattgagctccctgtcgtcgctcagcttgtcggcgtgcgtcctactccttacgcgcccagcgccatgcacagtgaagtccctgcacgcaagctatctgttagccgtgcactaagctctctgttcgtcgtcatcgctcggtcacgcgacaggctgactgcgtgtcgtgtgttgcacatcctaggtcctcatcgttgtgtcgtgcgtgcaacagtttcagatctatgccgccctcgtcagttttcgttgtcctatccacgttagcacgtgaccgtggtcgtgttcgtcgagttcaccaacactatgttgtcgattcgactgtcatcgttgttgtatgcctcgcggtgtgctcgccgagtgttgtcgattgtacctcggcactcgtgcttgccgttggctcgcgtttaccgtcgagtcgtcgaacccatcatttcttgctcgaccccccacctcaccagctcgctccaggcttcaattgaaggtcgtcgtcgatccgtgcgtcatcaagaaattccaagagtcaagtgaaaacggagccaacaacgtgatattcaccaagtgcgcgacaaaaagctcggacatcctgcgcgactcaagtttgattcgtcagaattattcagtcgagaaaaagatcttcagcaattgattaccgaagaaaagaaggcccctggatgacgtcaatcggaaaccgtcgtcgtgcttgcgactatcacgtcaaattagtcagggtaagcaaatttattattcgtgcgagtggattaatgaatgatctaaactaggtctataaatagaattgtggtcacaataaatgttagtaatttagcatgccaatattgtgatgatcgatttaggtaaatcggtaaatcaagtaattaatatacatagtttaaagagttaataaaaagctaggaataaaaatagatctagtgtaatatgtcaatttggttaatggatgtagtcgatgccctgctgtgatatccatgatgcttaatgcttggttttaagtgtttcgtcctttttagcaaagattatctatctcgtactatgtatactcgtgctcatacatgtgcatcatgcatctcatgaggtacgataaataatcgcgtgatgcggaagacgagccaagtcgaccccaagcgcgggctaatccgcaggatgatgctgatggacgaactggaagatggataatctgaacgagtgccaacataaaggatgatcatcaagtggacgtcgcctgacaaacactaacctagtgttacccaggcaagccccagtgcatttgctacctccttctgttttaaaattttttatcaccttgaatgatgcattaggtgataggagttgtgtgctaaacaattgatgcatttccttccttgaaaattgattactgttccttgatacctgttttgaaaaagaattttatgatgcttagccttgctttagcaaacaaaaatgttttgttttaaaacaaaagtgatgcttcagtgggtggaaagttttcaaaaataaaacttgatgttggatccatcatggccgtgatgggttcaacatcggaaaagatgtacctctgccaggtaccaaactttgggtttaaattataaagctgagaccgggcgggtgacttgcacgagaaaggagtctcggtgtagtgtctccgtctgagtcgtttaaggaccgtaccgattgttggcctactgatctaggacctttttatctagccacatacctcgtcatgggtaagcttgaacccggctattccatacatgaaaagacaatcgcgcactgggagtggagagatggcgagagtggcacgtaccctcctggcaacagaccgcctaaaaggggtggtgtgctctcgggtgctgcagacctgttcatgtggtggaggatccgtgggaatggtagacatgtgcaatagagttaagagaagcatatgtcatgtggttggagatctccagctgggtattaatcaattcggatcgccgaacttctcggatatgaagactggatctttgaccctcatcgtagataacaagcgaaacaaaggttggattttaaaagaaagctagtgtaggacaagtgaatgctctagattaggcaaatctagattcaggaaaagtacttaacttgtgatgtaaaattttggcttaaggatccactcatagtaagcttttctgcaaaacagagtctttgattcttgataagccataccttgaacccctctagccagcatacccttgagagtcttttatttagtcgggtaagtcttgctgagtaattccatactcagggttttattccctgttgttttttagttatagttttgtgctgctgatgatggtgttaagtgccggtgggctcggtcttcttataagtctaagtaacttttctatacttcttattgaggatggtcacttgagctagcatatatttcaaacttataaataatttataacatttcaaagtttatcactttgaactacttttgtaaccactccgataaatgtaatgtaaatttgttgtaacttgtaaaatttggtaataagatttccgctgcaaaatgttggtgtgtgatttgtgtttacttaatcttgtgatcctggttgtaagtggtttatccggggtccctaggacactcggacagatcctgttaagttatttggtgcacatgcatagccgtcactacaccaaaatgcttaacttcctagagcctaaaccgtaggaagttagagctaaactctcggaagttatataaaccgtcggaagatagataaatccgtcggaagtttggctctcgtaacattttagtcggaagttacgctcacttccgagcgcctctcggaagttacgctaacttccgagagccaaagttccctctcggaagttacgctcacttccgagagccgaggcagttctctcggaagttaaagtttgacgctgtttgttttgcgttgacgccgtgtgaaggccaacttccgaccgttttggttctcctctcggaagttaaaatgaccagcacaaaaaatgcaatttaatttccattattcaccacattaacagccacatatatcaaaataacagccacatatatcaaaataacaaccacatatatcacaatgtacaaaaatgacagccacaatataccacaatatatttaaaagccacaatataccacatgtcacatataaagtcataaaagtctggccagaacagtccacaaagtttcaagtctcacaagacacaagttacatccacataatagtctcacaagacacaagttaaacgccttccgagagcccgtcggaagttaaataaacttccgagaggctacagtcacaaccgtcggaagttgaataaactgccgagaggcaactagtgcctttaggaagttattaacttcctacggtttttgatagaaaccgtcggaagttatgaagccgtaggaagttcaaagttttggtgtagtgcgtctgaggtctttgagacaagggcaggtgcatgtgggcccaataacttgggaggttctgccacaaagaggatacgactgccatcaaaacagcccatccaaaatactccatgcctcgatggtgcccgtcgggattgacacgatcccaaaagcggaaattacagcgcctaagagcgaaggagagccaaagagaaggaggcggaaaaagatattcaatgacacacatatacagtaccctccaccacaaaaagaaatggagaccaaaggctgttgaggaaaaacaaacgaccacaaaaatagaaaataaaacaacacttgtgcagcaccctgcagatatggcagacagcctggctaacaaagccggaccagctgcatcaggcacggaccatctgacccctgagtctggatcg

SEQ ID NO: 79133 - DNA, 2017 bp, Zea Mays
ccgcctgccatggagctcgccgagccctcccgagccgaggcccctgctcccagcgtcgcgatccccagctcctctgctcactcggctgctcgcgccgtcgccttgctgctcgcccgtctgcgcggcacttcgtctatggccgctgtccgccgtcgagttcctgtacacgcgcctctggttcgccactgctctctgcgcgcgcgctctgctcggcgtcgccatctcctccatctcctcctgtgctccagctcgctgtcgggacggtttttcccatgcccggcgatgctccagtcctctgcgcggcggtactccctgccaagcacctcccagccgaggcccttgtctcccatggccgaccgtcgtgtgcgccgctaattcttccctgtgttcggtctggctcgatcgcgctttggtgctagcgccgtggtctgcagcttgtctgttccagctctccggtgccgcacattgagctccctgtcgtcgctcagcttgtcggcgtgcgtcctactccttacgcgcccagcgccatgcacagtgaagtccctgcacgcaagctatctgttagccgtgcactaagctctctgttcgtcgtcatcgctcggtcacgcgacaggctgactgcgtgtcgtgtgttgcacatcctaggtcctcatcgttgtgtcgtgcgtgcaacagtttcagatctatgccgccctcgtcagttttcgttgtcctatccacgttagcacgtgaccgtggtcgtgttcgtcgagttcaccaacactatgttgtcgattcgactgtcatcgttgttgtatgcctcgcggtgtgctcgccgagtgttgtcgattgtacctcggcactcgtgcttgccgttggctcgcgtttaccgtcgagtcgtcgaacccatcatttcttgctcgaccccccacctcaccagctcgctccaggcttcaattgaaggtcgtcgtcgatccgtgcgtcatcaagaaattccaagagtcaagtgaaaacggagccaacaacgtgatattcaccaagtgcgcgacaaaaagctcggacatcctgcgcgactcaagtttgattcgtcagaattattcagtcgagaaaaagatcttcagcaattgattaccgaagaaaagaaggcccctggatgacgtcaatcggaaaccgtcgtcgtgcttgcgactatcacgtcaaattagtcagggtaagcaaatttattattcgtgcgagtggattaatgaatgatctaaactaggtctataaatagaattgtggtcacaataaatgttagtaatttagcatgccaatattgtgatgatcgatttaggtaaatcggtaaatcaagtaattaatatacatagtttaaagagttaataaaaagctaggaataaaaatagatctagtgtaatatgtcaatttggttaatggatgtagtcgatgccctgctgtgatatccatgatgcttaatgcttggttttaagtgtttcgtcctttttagcaaagattatctatctcgtactatgtatactcgtgctcatacatgtgcatcatgcatctcatgaggtacgataaataatcgcgtgatgcggaagacgagccaagtcgaccccaagcgcgggctaatccgcaggatgatgctgatggacgaactggaagatggataatctgaacgagtgccaacataaaggatgatcatcaagtggacgtcgcctgacaaacactaacctagtgttacccagttgtatgggcagcgcctgcttgcgtggagatgctcacctgctgcgtatgatgggagtttggctgtgctcctcgttttgtatctattcagcctgtatgtgatgtgaagccaaccaaacatcacctgctttgagactccgcggctgcaggtgcacgctcgtgtcgtccaaccaaacagaaagtgatttaagaatgtgaatttgattttcattttcattttataattaatcaaggaactcatacaacataagcattaaattgtgtataatttagcgtaaaatagtgctaacgttat

SEQ ID NO: 79134 - DNA, 269 bp, Zea Mays
ccccaggttgtcagcattgcaaccactgctcaagagaagatgaagctgtggaaggagacttccaggagttccaagcctacgacgagttttaggcgtgggttagcggtaacccccagtcggctgcctgtgaaggccacgtttatctatgtttcttttccgcactttgatttattgtaaagactatgtggatgtctgagacatatgatgtaatcgactattattcccccttttaatactatttgagcactgtgtgatgatgtgcatgttat

SEQ ID NO: 79135 - DNA, 3236 bp, Zea Mays
gttgaattatctcattattactctaaaagtttacttcatcatttgtccttttcttgattacaaatgaaaaattacgagagtaacttcaaagaatagaaaggataatgaagtatccaaatgttctaaaactttaaaagttgagcgttcgaaattacacaagcaagttcttcaggtatctcgagcttgcctgtatatgggttgtttacctatttacagggagttagggacaccccatcgtacaactttgtgtgaagttacaaccatgacctcaaaccctatacattcaaccatagaatctactagcggcatcatcgtctttttctctcaaagccttggtgcacatgttggtgagtcctttcttcgttttcttgccaacgtgcctcatatgcgcatttaagccgaatcttcttctattccacttttgacctgcattagtgaccttcaggaaatataaagtggttgctcctgaaataaatcacaaaatggttaagattagctgattctgagacattcggtaaaggcctaccctcaacgtccatctattaaatgaatgatcataaaagttcatttcgtctcaccttgattgcaaagcagggtacctgactatgggtgtgtttggcatggctctgctccaccccagagcagctctactaaactctgggtggagcagctctgctccagagtttagattgtttctcataactagtggcaatggcgggtaaataactcaaaactccatgactaggttgttttttttggagttttcagagcagcaaaagaggtactccaaaaaattgtactgcagctccaaaaactccatagagtttataactctggagttagggtgtttggcatgctctggccagctcctccttggagttttgctctggagccatgccaaacaggccctatgttgccattccaaatcactcgtctacttcaaaaaaaaaaaccttgaatcatcgaccactatggacatgtaaattaagatccaaatcgagatggaagagaacatctaacaatacacaacttttccacatttgtttcataagcctaagaataaacggtgaaattagagatcactgacattgcagttaagggcaacaattcagcaaacagggttgccaaaaaaaaacgagagtaaagacaccaaccatatagagatactacttttacatggcaaaattgttcggtagggggcatttgtgccaagccttcataagccttgcatctgcatatgcattccccggagcccagcttggttcacagaatcacacacatccatacggatgcaggcatcaagcaagcagccagagagagggggaagcacagggagatggacaaacaacgacgacgatggccgagaaggtagtagtagtacagcagcagcagcagcagcagcatcagcaccagagaaggcagtagtagtaccagcagcggcagcagtggccaagcgggcttcaacgggataaatgcattcagatctccattcttaatgcaaacactataatcatcaggctggtatatcaaaatgactaccccataacaaaaccgaaccattgaactatttgcctccaaaatgaacagaaactcaaaaaaaaattcaaggtactatgcattggcgtttttgcaagtggagtggactcatgctttcacaaataatcttcttttagcacaaaatgcaattgtacatcagggatacttgtcaaagcgctctcagccaggatggtcgaagtaaataagaatggtctgatatttggaatatgataggcaacactggacaagccaagcttcaaaagagcagaaagccaaacatgatcaaagaacagaaagccaaacatgatcacaagagaagagacaacttgcaagaaaataagtcgaatctgatattggaaacagagattccccaagacagtgatcatgcagttacttccctgatactgggaacactgaagatgtccttgtcctgtttcttgctattactgttttcatgcagtcaattgttgtgatggcaactcatgcagactcaaaacataactcttccaaactgcaccaaaagcgaaaaaaatatataataaaaaagaaagaaagcaagaggcacatgttacaagaaaataaatagggttttcaaaacaatattacaagattgctgtagattccccaagtcatcatacttttgcatcgcaagattgaattggcaacactgcagatgttcttgtctttcttcaatcttctcactatctgacatttttcttatgcggtgaagtggcaaaaatatgacaacacacaaaccaaacatgtttctgaaaggaaaggatcaacagatagtgacttaattccaggcaaccaacacccaagctaaaatggcttatctcagtcacatatgagatgccagaaaacttttatggccgtaaataagcatataaaatgctttactccaggttcaaaggatatctatcactagcatggttctacacgcattaacctatccaccgtgtaagctagataagaaaatttgtattagcattagcatcagagattcccctagatagtcatcatgccattgtgcccccatgaaccaggagcacagcagatgcaactttctttaattcacataatcttccagttttgtccatagggttaaatactgcattttgtacctcgaatatcagtcaagctaaagcaaaatcattaatgtgatgctgaccaaatcacaagcagaccacggtgcattgcagtactctataataggaacagcttttcagatagtgataaagaactcgttaaacaagttaaaaatgaatttaggcaccgcaatccaatctgggatagccttcataactcttgcatctacatatgcatctcccggagcctgctcagccagtcagtggtggaagaagggcgaggatatatatatatatatagatagacagatagatgcatgcatgtgtgtgtagtagctggtagtttccctgagagaaaattacttataatttggaacggagccacggaggtagtagtcagggagatcaacgagctgagctcacatgacccaccacagcggtcaagcaggcttcgacggaaagcacattcagatctccgttttttgtgcaaagaatgctaatcatcaggctgacggattagaatagcccccataaaaataaatcgaccatctagtcagctcggaaatgaggttgaaaccacaacctatttacaagagattaggcatttctacg

SEQ ID NO: 79136 - DNA, 3855 bp, Zea Mays
aaaatttcgagagctggcgacatagatgataacatttggcaataataaaatcattcacagctccatttgatttattagcacaaacttaaaccacaaaaactgaggtcaaatcacattgcatttaggacaatacaacaaaacacagtgaaagacaagcttctaggcagagatcactcaaaataaatggaaatattttatcaggggcattctcctactgccaagccttcataagccttatgtccacataaggattccccagagctcacttagccagcttggttgtggccaacgagacaagacagacagacagacagatgagccccaagaaagcagtagtactggtactagcagtagcagcaggccatcaaccagagcggccaagcagacttcaatgggagaaatacactcggatttccattcttgatgcaaaaaacatcataatcatcaggctggtataccagaattcatgcccccataacaaaaccaaaagactactagtactagcctcaagaaatcagaacttttttcaaggacttctgcatttctggaaacgtaataatgaaagacttttttttctgaaagcacaatgcaacataattatatttgtcattgaagtatatgatctatcacagcagccaagcaacaaacaagtttagttagatcttagatctccatttttagcacaaaggtaatcattgggctggcataccagaacactgatcaccaccatgacaacactgaaactcgaaaaatgtaagctgcaaccacaagcattcacccatcttaaatgaatcgtcatcgaaaagaacttatcttatttgcgatgcagatcacctgacagctggtcagattgcatgacaaaaattgataagaccaaaacaattccacagtttgcgttaatcaaaaataaaaatcagaagaaggtcacttgcaatgatgttaggaaaatctgcttgccaaaaacaaaagagtaaaacatcaagctcagaggtaacccgtcacaaataaaaattgttgcaaagatatgcagatctcctgcatattcgaggaaaacaaaacaaaattgttcgatcagggggtttcttatatctggcaaaccttcataatcattgcatctacatatacactttccagtgtttgtgtgtgtgtgtttgttgatggaatcacaaacacacagacaaacatccagaggggagggggagagggagaggggggagagagttagggagagagatgatgatgatgatggaaaaggcgcagcagcagcagcagcaacagcagcagagcatcaaccagatccagagtggccaggcacatccattaacaggaaaagtgcattcagatcatcacacttgatgcaaattaccattaatcatcaggcttgaatatcaaaatgaccccataacaaaacaaaaacactggactactagcttcaagaataaaaccaaataaatcaaaactttttcaaggcactataaatggcagttatgcacaaataatcttcctcaagcaccctatatgtctgtcaaagacttatcctttttattttttatctacgcacatcctagtcggagcccagtcagccagcttggtggaagaaaatcagagtggaatatgcaaggatagatcgatggactgaacttggaataggaggaagtacatgatccaacacagcatcaacgaatatgtgtattccaatctccactgttagtgcagaggcatcaggatggcaaaccagaacaccccatgacaaacactgaaactagaatacatgtaggctgcaaaccgcatgcttttgcattatgccaatttatagaacacccatgactataatacatctaggttgcaaactgcatgcttttgcattatgccaatttctagaagttgcttaaaccaatccatggtttaacaagcatctacacatctactaacccttgcagcttaatactcataaggaaaaaggaaataaacaaaaaaaaactcagaatactgaagaatactcaaataacaccaaaaaccaaacatgatcacagggaaaaaagacagcatgcaagaaaataagcaaaaggacctgatattagcatcagagattcctctagaccgggatcatcatgctattgcatccctgattcagggaacactgaagatcttctcgtcatctatcaatgtttctatgcagtgaaatggtgagacattaaatattttaactcccggatgcatggcagacataaatcctccaacacctaaagcgcaataagaacaccaggagacaacattaaggaataacagataccaaactgatactaaaattgggaaactttcaatgtttttgtcaagctattaaaaacaatgcagttgtacttgtttttcttttctccatctgccaaccttttgttaataggcgaaaatgtgtcaaacatgtatttgagaacaaggttttcaagtcgataagtcgagtcgacaaggtaccaacttggtgactagtcgataagtcagtcgactagtcgtcgacttgccaatatagtggttgttttgtctatataatggcttcatatagacaatataacatttatatataaagaaagagcatgttttatctcatttgaagcctgaaattgaacgaaactgaaataaacagcaagtcttacctcatttgaatcctcaaactgaaccaaatcagccacataagtgataagtcataaactcataagtcataacagccatatagttcaaattggaaaacaaatagcaagaaaatatagttcaaacttgaaaggaaataagctccattagatagctaagctgctgctgcagctagatagatactagatagtagataccctaaatatctcccaattcaagatcatccattgcattttctcccaaatcaagaaaatatgttgtgtaatgggtctttgggctgtttgggttgaactcgggcacaagtcggccgacttgccagaccaaagtcgacgactagtcgactatgaatttccaatcgttgacaagtcgcccgacttgccagaaaagtcgagccggctccccaagtcgagctcccaggaccgactggacgactagtcgacgacttgaaaacagggtttgagaacctgagttagtttttgtgaacagaggaagtagaacatgatccagcataccaaccaagcaggtgtccatggcaatgacatttagagtgtgtttacttcgaggcctcccagatgagagcttcccaccaagcagcaatctttgccccaggcacccgaaatcggacacctgggagcagccatcgcgccaggcagctctgcctgggtgcaaagcaaagagcccaagcatgtttcgattctcttcaggcaagattgcctgcaaacagagctttgaacgcctatggacaagatgattgcctcgcaagactgctgcttgggaggtaccgatccaaacaactctgctcttcaatgcaggttaacagattatggtaaacacacattacacaaacttatattctatctataaaaggaaagaccacatatcattttattcaaagaaactagcatggttaaacatgaatcaacctcattcactcaataagctataaacaaaaactggcattaccaactcaatatcacagattcccctagacagagtcatcatgctattgtgcccccaggaacaagtagcactacagatgtcattatattgcttctcatcatctgtcaaatgacaatgttgtcccccataagttgcaagttcgcaactcagatatctgctgcagtaagatgttgggatagcaaccacatcaaaagcaacactgtctgcattgcagtacttcaaaactaaaatagcttttgcaaagttaaaaac

SEQ ID NO: 79137 - DNA, 1110 bp, Zea Mays
aaaccaacagctttgcatttccagtctctgggaacgtcgcgaaaacagttccacgctctccggacaagaacgcgcccatggatcgcagcaacgccggtgcggtgtccgtcgaggtgcgcggcggcggcggcggctcgccgccgggcgcgggaaggaagcgccgcgcggtggcgaggggcgtgcagaagacgctctccaagacgtccatgctggccaacttcctccccacgggcacgctgctaaccttcgagatgctactcccggccgccgcaggcgacggcacctgctcggcggtcagcgccgcgatgctcagggccctgctcgcgctctgcgccgcctcctgcttcctcttccacttcaccgacagcttccgcgccccggacgggaaggtgtactacggcttcgtcacgccgcggggcctgtcgctgttcaggaccgggctcggcgtcgaggtgcccagggaggaaaggtaccggctcgccttcgtcgacgtcgtgcacgctgtcatgtccgtgctggtctttgcggccgtcacgctcgccgactaccgggtctccgggtgcctcgtcgccggccaccgcaaggagatggacgaggtgatggagagcttcccgctcatggtgggcgccgtgtgcagcggcctcttcctcttgttccccaacacccgctacggcatcggttgtttggctccgtaaaaaacagcagactggaacagagagtacggcagtgtaactttcttccgtacctgtgaatctggcttgatcattttatgcttcatgttttcttagcaactgtaaaaacttggatgtgatgtgatcctatctttaatcagtaccgatttgaaatttcttgagaatggattatacaagagaatgaatggtcaccaaaaatagctttacatcagatgcaaaatgcattcctttcaaaagaatggtagactggctcaatctatcctaacgtaagctgccgcccatgtatcctacattctggcaagatactagtattttacaagccacacagtaagcaaagcagcactctcctacctacccaaaaaaaaaagatgtgacctgcattctgcctacaatgcatatcccctagtttgactagaaa

SEQ ID NO: 79138 - DNA, 838 bp, Zea Mays
aggataattctcctcaggccattcctaactcaagcaaaacattagttaccacacttgatccaccgcacaaaatgacaaaaccggaactaaattattgaaaacaaggcagcaaaatatgctttaaaaaatatgtgttaataagcagaaccaagcactagttagttctgaaacagtatgcaggtgcttaaccagctttatatgttttgcatacattcatgcaggagcccctaacctcctaaatgttacttttatacaaaacttgagctgtctaagtgagcacttgtgcaacgtctcaatccaccatctatagaacattagagaaaacacatggcagagcaatgttctagaggaagagccttttcatatgtagaaattatattttgcagaatctcttgatataaacaaattgcacttttggtcatcaaacttgtactggggtggcatttaggtagacaaactcttaaaatctacatctaggttcataaacttgttcaagtgtgccacaagaggtccaaacaccctaatcaacctgtaatcatgtatgtgataataacattcttgcaagaaatctgagatatccctgttctctactacatgctcatggccaaagtcgctaccatgtattgtgaatataaaattaccatgtaccattctatatgccacatagactaagtttgtgctgattagagtgatttggactttaagtagcacattttagcaattttaagagacccatatgtgcattttaagagtttaggaacaatacatgacaccacagagcatgtttaaggacaattggagtattttactcaagtatatataattttacacaagttac

SEQ ID NO: 79139 - DNA, 446 bp, Zea Mays
cgcagtgtgcatctcgaagcccgcaaagcacagcccaatgccagaatcactcaccaggaatccgccgccacccggcagctgggtcgcttcgaacagcctcgcggggcgggggcactcctgagtcctgcctagcctcaccagctcaggcgctgcctgagccacggaacaaggcctgaggaaaccagcgggccgggagcgagcgacgaacaagtcaggtgaaggcggagcataggagctctgggcgcaggatgagagaagtcgaaggcggtgcgagcctgtgaggaggatggcttcaggaccacgccacggaccgaccgaacgcgagcgggcgaataggcgccgtgccggtgtcgcggggccggactcgctcggccagtctcttttcttttccctgccgtggcggagaagagaagagtcgcggtcgggctgcgatgtgcgagggtggg

SEQ ID NO: 79140 - DNA, 2249 bp, Zea Mays
gccggttgcagacttgaccaccactccaccacctgccacagcaagtcccagttcccacgggacgatccatccgtctcgcccgcgcgctccgcagccacaagcgcaaaggcagagcacacagttctgtgtgcttggcagtgcccaccacccgacgacgtccccgtcgtccaccgggccaggacgcggacggctcgcggtctcgcccggccggcccggcccttccgatccctcgcgccacgcccatctataaatacatagctgcgcgctgcggagctgagagcaggcaaacaccgagcgcagctagcatcatcgtcctgagctgcttgcatctcccagcggccaatcgagctgatagcctatccatcatatggctgcctctaccacgtcgaggacgaactcgcgggtgaactactcgaacgagatccacgacctttccaccgtgcagggcggctccgcggccgccgccgccgccgccttgttctacccggacagcaaatccatcgccgacatcttcccgccgcaccttgggaagaaggtgatctcggaggtggtggcgacgttcctgctggtgttcgtgacctgcggggcggcgtccatctacggcgaggacaacgcgcgcatctcgcagctggggcagtcggtggcgggcggcctcatcgtcaccgtcatgatctacgccaccggccacatctccggcgcgcacatgaaccccgccgtcacgctctccttcgcgtgcttccgccatttcccctggatccaggtgcccttctactgggcggcgcagttcacgggggccatgtgcgcggcgttcgtgctgaaggcggtgctccagcccatcgccgtgatcggcaccaccacgccgtcggggccgcactggcacgcgctcgccatcgagatcgtcgtcaccttcaacatgatgttcgtcacctgcgccgtcgccaccgactccagggcggtgggtgagttggccgggttagcagtcggttccgcggtttgcattacgtccatcttcgctgggtaatatgagcaccaacaaccacgaatcacgccacgtcacactaacctaattacgacgaccctcattagcaaggacgacattactgtagcactgatcgcgacgagttaattcaaacatggtagactttcgacaaagggctactagctagctagctagctagtactagtagagtagtggtgtcacactgaagacatcgtacgtctgcatagagaggtcctcgcgcggtagctaggacgaaagcaagcgcgcgaagcgactttataagctgaaatgacgttgttcttcggtatatatgacccagcggcatttttctcctttttttttaaagaaaaaggctttacaactatccatatagaattttaaaaattctctgaccctagtactagtgttgatagaatacatgcatggaacaaacccgggattgctggctctagcagtctagctaggcggatcactgcagactgcacacacatgcatgcactgagcagccactcacacacacacacgtgtacgtttaagctaattaagacgtacgtgtgggggaaacgagtggcatttgcaggcccgtgtccggcggatcgatgaacccggcgaggacgctggcgcccgccgtggccagcaacgtcttcacgggcctctggatctacttcctcggccccgtcgtcggcacgctctccggagcctgggtctacacctacatccgcttcgaggaggcccccgcagccgccaagcccgacacccagaggctctcctccttcaagctccgacgcatgcagagccagtccgccctcgccgccgacgagttcgacaccgtctgacgcccgcccgcccgcccgcccgaagagatcgagtactactgtgtgtgctccctcgctctgttcaagatctcaggtgggagagagctatagctagctgcgcgcgcgcgtgtgtgctggtaggtacatagtccgtgtacgcgtacctacctacgtgtttgtgttttttgtgtcccgtcggccgtcgcctacaccacgtagcagcggatcggagcagtgtcacatgtttttatgtatcttcggctttgtgccacgtcagagttgcaaaggttaattgatgcagccgattatgcttgcccgtgttggtttttgtctattgtacttgatatacatgttctttttgtcatgtacacaacttcgaccatctaatgtgttcttttgagagatctctaaggggttaaataaaaaaatcaagg

SEQ ID NO: 79141 - DNA, 1741 bp, Zea Mays
tcgagatgccactgacgacgtacttacgtgatctcggaggtggtggcgacgttcctgctggtgttcgtgacctgcggggcggcgtccatctacggcgaggacaacgcgcgcatctcgcagctggggcagtcggtggcgggcggcctcatcgtcaccgtcatgatctacgccaccggccacatctccggcgcgcacatgaaccccgccgtcacgctctccttcgcgtgcttccgccatttcccctggatccaggtgcccttctactgggcggcgcagttcacgggggccatgtgcgcggcgttcgtgctgaaggcggtgctccagcccatcgccgtgatcggcaccaccacgccgtcggggccgcactggcacgcgctcgccatcgagatcgtcgtcaccttcaacatgatgttcgtcacctgcgccgtcgccaccgactccagggcggtgggtgagttggccgggttagcagtcggttccgcggtttgcattacgtccatcttcgctgggtaatatgagcaccaacaaccacgaatcacgccacgtcacactaacctaattacgacgaccctcattagcaaggacgacattactgtagcactgatcgcgacgagttaattcaaacatggtagactttcgacaaagggctactagctagctagctagctagtactagtagagtagtggtgtcacactgaagacatcgtacgtctgcatagagaggtcctcgcgcggtagctaggacgaaagcaagcgcgcgaagcgactttataagctgaaatgacgttgttcttcggtatatatgacccagcggcatttttctcctttttttttaaagaaaaaggctttacaactatccatatagaattttaaaaattctctgaccctagtactagtgttgatagaatacatgcatggaacaaacccgggattgctggctctagcagtctagctaggcggatcactgcagactgcacacacatgcatgcactgagcagccactcacacacacacacgtgtacgtttaagctaattaagacgtacgtgtgggggaaacgagtggcatttgcaggcccgtgtccggcggatcgatgaacccggcgaggacgctggcgcccgccgtggccagcaacgtcttcacgggcctctggatctacttcctcggccccgtcgtcggcacgctctccggagcctgggtctacacctacatccgcttcgaggaggcccccgcagccgccaagcccgacacccagaggctctcctccttcaagctccgacgcatgcagagccagtccgccctcgccgccgacgagttcgacaccgtctgacgcccgcccgcccgcccgcccgaagagatcgagtactactgtgtgtgctccctcgctctgttcaagatctcaggtgggagagagctatagctagctgcgcgcgcgcgtgtgtgctggtaggtacatagtccgtgtacgcgtacctacctacgtgtttgtgttttttgtgtcccgtcggccgtcgcctacaccacgtagcagcggatcggagcagtgtcacatgtttttatgtatcttcggctttgtgccacgtcagagttgcaaaggttaattgatgcagccgattatgcttgcccgtgttggtttttgtctattgtacttgatatacatgttctttttgtcatgtacacaacttcgaccatctaatgtgttcttttgagagatctctaaggggttaaataaaaaaatcaagg

SEQ ID NO: 79142 - DNA, 1983 bp, Zea Mays
gccaagcccaccattcactgactgattggacctacaggatcgcccaccggcctctttccgtctcggcatcagctcagatccgcgacgcacttcgccaccggccactccagtccccgctcccactcggccacttccccatccccgatggccggcggccgcgcattccggccgtccgccccgcgccgcgcggcgttcgcggctctgctcacgctcctcctcctcgcgggactctctttcctcctctcttccacgcccacctcgtcggcccgttcctcgtccccgccgtccgcgcgcctcgccgccgtccgccgccacgcggccgaccacgcggccgtccttgccgcgtacgccgcgcacgcacggaagctcaaggaggactccgcagcgcagtcgctctcgttctcgtccctctcctccgacctctccgcgctctccgcccgccttgcctcccacctctcctcctcactccccgaggacgcgctcaggcccctcgaaaaggaggcccgcgagcgcatcaagttcgcgcgcggcctcgccgctgacgccaaggagggcttcgacactcagtccaagatccacaagctctccgacaccgtcttcgccgtcggcgagcagctctctcgcgcgcgccgcgcggggcgcatgtcctcccgcatcgctgcggactccacccccaagtcgctccactgcctcgccatgcgcctcctcgaggcccgcctcgccaaccccaccgcattcgcagacgatcccgacccgtcccccgagttcgatgaccccgcgttgtaccattacgccatcttttccgacaacgtgctcgccatctccgtcgtggtggcctcggctgcacgcgccgcggccgacccctcgcgccacgtcttccatgtggtcaccgcgcccatgtacctgcctgcattccgggtctggttcgcgcggcgcccgccgccgcttggcgtgcacgtccagctccttgctcactccgactttccgttcctcaatgccaccaactcgcccgtggtcaggcagatcgacgccggcaacagggacgtcgagttgctggattacctgaggttctacctcccagatatgttcccgtcgctgcggagggtagtgcttttggaggacgatgtggtggtacagaaggatttggcagcgctttggcaggtcgacttggacgggaaggtgaatggcgccgtggagacgtgcttcggggggtttcggaggtacaggaagtatctcaactttacgcagcccattgtgcgggatcgattcaagcccaatgcctgtgcatgggcatatggcgtaaatgtgttcgaccttgagacatggcggcgggatggttgcacagaattgttccatcagtatatggaaatgatgaggatggcgagctgtgggatcctacatccattctaacagctgggctgatgtccttttacggcaataccaagccactggataagtcatggcatgtaatgggtcttggctataatccaagcatcagccctgaggcaatccgtagtgctgcagtggtacactttgatgggaacatgaagccctggcttgatgtcgctatgaaccaatacaaggccctgtggacaaagtatgtggacaccgaaatggagttcctaacacgctgtaactttggcctttgaatagattctagagagcctctaagaaaaccactggctggtgctactttttcttacgggacaagagagcctcaacgctctgcgcaagtggacttatctgtagcagagttgttactctgtagtgaacatctttgtgcttgggcaacaatgctcttgtagatctggtagcttgtttgtgatagtatttgatctgtcagctaaatttgctggattattgtgcacagagaatgagtcattgggaggaaactgtagatgaacattcttgtattgttgaataacaagtgtatctccaattgtatgtataaggaaaagaaaaggttgctgggatcaggttgga

SEQ ID NO: 79143 - DNA, 1257 bp, Zea Mays
atggccggcggccgcgcattccggccgtccgccccgcgccgcgcggcgttcgcggctctgctcacgctcctcctcctcgcgggactctctttcctcctctcttccacgcccacctcgtcggcccgttcctcgtccccgccgtccgcgcgcctcgccgccgtccgccgccacgcggccgaccacgcggccgtccttgccgcgtacgccgcgcacgcacggaagctcaaggaggactccgcagcgcagtcgctctcgttctcgtccctctcctccgacctctccgcgctctccgcccgccttgcctcccacctctcctcctcactccccgaggacgcgctcaggcccctcgaaaaggaggcccgcgagcgcatcaagttcgcgcgcggcctcgccgctgacgccaaggagggcttcgacactcagtccaagatccacaagctctccgacaccgtcttcgccgtcggcgagcagctctctcgcgcgcgccgcgcggggcgcatgtcctcccgcatcgctgcggactccacccccaagtcgctccactgcctcgccatgcgcctcctcgaggcccgcctcgccaaccccaccgcattcgcagacgatcccgacccgtcccccgagttcgatgaccccgcgttgtaccattacgccatcttttccgacaacgtgctcgccatctccgtcgtggtggcctcggctgcacgcgccgcggccgacccctcgcgccacgtcttccatgtggtcaccgcgcccatgtacctgcctgcattccgggtctggttcgcgcggcgcccgccgccgcttggcgtgcacgtccagctccttgctcactccgactttccgttcctcaatgccaccaactcgcccgtggtcaggcagatcgacgccggcaacagggacgtcgagttgctggattacctgaggttctacctcccagatatgttcccgtcgctgcggagggtagtgcttttggaggacgatgtggtggtacagaaggatttggcagcgctttggcaggtcgacttggacgggaaggtgaatggcgccgtggagacgtgcttcggggggtttcggaggtacaggaagtatctcaactttacgcagcccattgtgcgggatcgattcaagcccaatgcctgtgcatgggcatatggcgtaaatgtgttcgaccttgagacatggcggcgggatggttgcacagaattgttccatcagtatatggaaatggtaacttctaattgctggggttcagatgtg

SEQ ID NO: 79144 - DNA, 1528 bp, Zea Mays
ccgctcggctctctagtgcccagccgagctccccatggcgtgccctccctgcatccatggccactgtgcagctccctgctcctccctcctccagccgcgcgcaaccggcttctcctccacgtgcccctgctaccatggctggcgcgctctctctctctctctccagcgccgcgcccctccccctcccctctgctcgctcgcgcccggccggagctccctagctcaccgacgtttctccctgtgcgccgtggcttccctttcaccgagctccctcagccatggcgcgcccctctccctgagttccttccccagccgcgcgctctggagcacccctgcgcgcgcgtcctctcatggcgtccagtcgctcgctccacagctcagatcttgcccatggcggctccccctgctcggcaccgcctcgagctcgctatgccgtgcgccctgctctctgttgctgctcgtcggtgctctgccatggagctcgcccgcgacgctcggcgttctgtctgttcgtgcttgcccctgcgtcaaccccatcatcacgccggtatcctgctcgtgagtttctcctgcgcactatggtgctggccagtcttctcttccagctcgctcccttcgctagccgtcctagctccaatccatggcgctcggcacctacactccatggtcctgggcgacaacacagagtgtgtggtcgccgacccgacagccgccattccctgctcggtcatggcaactggccaccgcgcccctgcttccggctccctgtcctcccatggagcccagcgccgcctcgaacctgccatgtccgttgcaggtcgttgatctcctatttgccctggacagcgcctcgacgccccatcacagcagcccgtcgtggaactctagtgtttgtcgttgatttccggtcatctccgacctttgtctcgccatcgtcgttcggtcgcctcgcctcgatgctagctcctacatgacgtctccgatttgtgttcactccaaaatccgagaagattaggcgtagaaggaaacaaattagtacgcagccggagaattctcgatgtggaagaagaagtgtgattcgatgcgacactcaccatatattcggggaaatgctagagctgaaaggcgtcatcaatttcatggtttcaagtcagaattaattatggtacgataattaatcacgtgatgcgaaggatcagaactgagtcgaccacaagatgctggaaagcgtgagccattcgcaaggtgatgcggatgaacgaacctgaagatggatagacggagcaagtatcagaacaaaggctgatcgccaagtggacgtcgtctaacaaacactaacctagtgttcttctaggcaaggcccggtgcatttgccacctcattgctgttttaaaatctttatcaccttgtctgatgcattaggtgataggagttgtgtgctaaataattgatgcatttcctttcttagaaaatttattacccttccttgatacccttttatgaaaaggatttttgatgcttagccttg

SEQ ID NO: 79145 - DNA, 2985 bp, Zea Mays
ccaaattctagcctcgatcttcgtctgatatttaagcttttatttgaatttccgagtaaaaaaagggaagaaatgaaaatatcttcacatattttttcagccgcctctatcctatctgctgtcgccgccctttcccctgattttttcacgcgcatgagccgtggccttatcttgtggccgcgcttcctttttcctcgcacagccagacaccgctcggctctctggtgcccagccgagctccccatggtgcgccctccctgcatccatggccactgcacagctccctgctcatccctcctccagccgtgcgcatccagattctcctccacgcacccctacttccatgctggcgaactctctctctctccggcgtcgcgcccctccccctcccctctgctcgctcgcgcccggccggagctccctggctcaccggtgtttctccctgtgcgccgcggcttccctttccccgagctccctcagccatggcgcgcccctctccctgagttccttccctagccgcgcgctctggagcacccctgcgcgcaggggcgggccccactaaattcaatgagagtactgtccggtttgttcacagaataagagcagatccctgcacgccaaatcaagcagcggtgagaaccctgcgagcaacctgaacatgaggcagatctcttgcaagcaatctgagaagcctctgtatccagcagagtactgtccgatataaagagaaaaatgacccaagagcaatgctaatgctaaaactacttggcctcatgcctctgtacccagcagaataaacgtaattggcctcatgcctctgtaaaaggagaaagaatgaacctgacaatgtacaatatcctttcaaattatcatttcaaaggagaaagaatgaccccatagaaaacaatggcttacagttccaagacatctgcatatgtaaaagacaatttcactaacagtttattgctgcactaacatctttctctaagtgtctttaaaaagtcaatttcacaactttctcttcgcctttcttggagtcatctttcttggagctgttgtcgtagtctctaaagcctgcgaagaagaagcctcatgtgttgtcacctctcccatcaaaattccaagacgtctgcatatgtaaccatatatttatcaaaattcacttgttttcaacacaatgtatgcatggtgacaaacatgaaatatgtaccttcttgtcattattccaggactctcttgcattagttgttctcttgtagtttctgctctctccggcgtagactctttaggaaaccattctttggtactatttttccttggctttcttggcctaacgtaaacaaacatgagaatgtaaacaatatgagaaagaaagaaacatgagaatgaattagaaaatttaaagcttgccttttcttagttccgttgagtgggcacttgtaactggctttcctgtgtcctaactctccacaattgggacaccgcactttgcctctaatcatttttttagtcttctcattctcattttcagcaaactttttagtacatttagacccaccacttccaccttcaaggcaacttttgatcctattttttgttgccttccaactccccttttactaagtggtgcaccaacctcaaatgccaaatccaccttgggccacttttccttgcttgggagttgttctatttgtctagcatatgccttcctaaacttctccacagagtagtaatcatgaacgaagtcctccatcctcacatttctaatttgtcgggctgttatcaatgacaaagcatgctggcaaggcttgccagtgtgttgccactcgcaacaggagcactcatgcaaatatgctttaaccacaaacctacggttgaaattgtcccacacctcagcagcatagttatcacctttgataacagttaaatgtcccagacctctagttctagcattcaagatttgtatgaccgctggtaatatccttccatacaatctttccccaatttttctcctcttgtaagagagaatcataatcatctcccttatcttgtcagccaactcaacaacaggcaagtcctttatatctttgatccaattgttaaaaacttcagccacattgcttgtcacataatcacacttgatgtcaggatcaaagtctgacctctgccacttaagcttatgatgtgtttccaaccagctcttagcactagagagcgccgcataaactatagccatgtggctctcataaacatgtttgtcatatgccctagctgctggccacatgtgtccactgctgtcacccgaatatctcttaacaaaattctgcatcagatgcctaaagcattctcttctatcgacttctggaaacacatcacgcactgcatttagcaatcctttgcaagcatctgaacaaatagcaagttttggaagatctcccacaaccttatgtagctgagccatccaccatttccaattatcttctgtctctgagtccataaatccatatgcaagtgggtacatccaattatgaccatccacaccaattgcagcagctaaatgaccattccacctgccatttagtgcagttgcatcaacaccaagccatggtctacaacccgtccgaaaaccttcaatagaaggaccaagtgcacaaaaaaacgatggaaataagccttgcccttaaccaccttgcattcaatttcaataacactatctggcattctcttcatgacctctgccctccaattgtataacagctgaaaactctcttcccatgaaccatataattcatccaaagccttctcttttcctttccagaccgtgtcatagccaattgtgcacttgtgctcatcttgcaacctaacctgtagctccttagtacccatatgaggatattttctgagtatagaaactgccttggaggcaacccacttacacgaaggtgtagttgtccttctcctactgctagatgtacacgtgtgtac

SEQ ID NO: 79146 - DNA, 1629 bp, Zea Mays
ggctcgccgtctcagttctcatgtccgggtgaagaaaagaaaaatcctcctgttcctgactatcgctacccctccacatccagtggccatggtgaagaagcccaacgacgttgccaaggccgcggcgacctccgccgacgcggcagccaggccatccaaggcgaatccgtccacccctcagtcggtcaagacctcgaagtttaagaagcggaaggtcaaggccaaccgccagaagccagcggtcgctgctgcagctgttgacgatgtcgccccggtaggcgcaggcactggggatggcgatgcatctgcatccgcggttttaccgcagccatccaatgttgctgaggcatcgcctgtggtgcaaacgccaaagtcgaccacttttgttgaggcgtcacctgtggtacagacgcagaagacagccactgatgctgaagtaccggtgcattcaccaatgccagccactgctgaagcatcagctttgtcgccaaagccaaagccaaaaccagctcatgctaatgctgatgctgcagctgcaatttctgtcagcaagggcaagggcgtgggtgctgataatagcgggggtgatggcagaatgaagagcagaaaagagagggctaggagtggcaaggggaaggaggttttgggggatggaggaagtaagggaaaggggaaggggaaggggaagaaggctgtaggcaagaaggaagaaaggggtgaccataaggttgcagggtttatatttatgtgcaatgcaaagactaagaaggagtgctaccagaatcgcttgtttgggatgcctggtgggaagattggaatggtcaagaagataaggccaggggtgaagctgttcctgtatgattttgacctcaagcttttgtatggtgtgtacaaggcagcatcacatggggggctaaaccttgtccaaggagcatttagtgggaagttccctgcacaggtatgcagacagaattgtggcaaacataaccgctagagatccaatcattagtgatcacacagcactgccagtggaagcctctgctcgaccagaccgcttggatgatctctaccggattcgtggtgctcatgtggaggagctgtaccgtccacgggaaattgctgatcgtgcggggatcactgctagagcagatcgtgtggaggaactctaccgttatgatcgacttgctaaccgtgctgtggacccccctcattcagcctaccttacaactgcttacgagaataaccctgcttatgctgaaacaagcgttaggcctatctcagcaagggttggtggctccggtgcgccagtttcgtcactctattcgttttctggtggtccagtatatcggtgatgagtgatcatggctagctctgttgaaaagccttagccagactaagaagacatgatgttcgtctctataactgcaactgccgttttaccttggcttcgactctgtattttcttaaatatccttcactggatgaatggtactcttcgttatcaagaagacctgctggtctatgctgttgaattatgtatttatgctgctgcatctctcttgctatgcttgaagctcgtttcattttgtgaatggaggtttacatattgccatgcttcatgcaccgcgt

SEQ ID NO: 79147 - DNA, 1435 bp, Zea Mays
  misc_feature (1435)..(1435): n is a, c, g, or t
cctagctcgtttgttctggaacaaatccaactcgccgcacgcgactgagatgagcgcgccgccgcacgtttcttacaccgcgctcccgccaccacctcctgctcccactgccacctccttctcgcagctcccgcctctgcccgacgtcgtcggtggatgccgcgtcaaggctggcgctaaaccacctgggcccggcgcaaatccaccagatccattcgcagctcttattgtccctactcttgtgagagtcgcgaggacgagctttccccctcttgagatccgatgtctaatccatttttcaagttttacaatggatatgaatactagagatcgcattagaaaaaggagggatgatgatgatgacgacctcatgcttttaattctccctactctacatctcttgggctatattattggagatagtgaaaaaaacttgcgacatacatcaatgctaactggagaggaaaaggttagggagctacttgaaggccacatcaagaattgtaggacatcatttaggatggaaccttacatctttaaagccttggtcaattatcttagaagcgaagggttggttaaagacactagaatcaaggtcgaggagaagcttggtttctttttatatatgattagtcacaatgcgtcatttgagtatctccaagtattctttggtcacagcaatgatacattccatcgtgtgatcaaacatttctttgacatagttatccctgccctcagcatgcggttcctaaaacctccctccaatcaagtacatgcaaaagttcgcgaagataaccgattttacccttactttaagaattgcctaggttcaatatatggaacccacgttccaatatcaatgtcacctaatcaagctgcaccattcaggaatagaaaagggacacttagtcaaaatgtgatgttcgtttgtgattttgatctcagagtcacttatttgtcagctggatgggaaggatcagcaacagattcaatggttctcagatctgcaatgaccaattctataggaaagttctaactagtagatggtggttatgccaatacagcttcctttcttgcgccttatcgtggggttaggtaccacttgaaagagtttcttggaatgaaaaaagatgcatgatcattgctgaaccaacgatatgggacaacattatcactgtaagaagcatatgctttacccagacatttcttagagctaagaagttccgcaagaagtcttttcctctcaaccactacaaaattctgatgaaggagagaaatttaaaaccatagaagtggaagatgaagatactaatgaaccacaagtagatgcgagaatagaacaagatgaagatatagtaattgttgaaagggttgaacagaggttacctaaaaggtcagatgcaccaattgtcaatcaagagaaggagacaaagan

SEQ ID NO: 79148 - DNA, 1411 bp, Zea Mays
  misc_feature (1411)..(1411): n is a, c, g, or t
cctagctcgtttgttctggaacaaatccaactcgccgcacgcgactgagatgagcgcgccgccgcacgtttcttacaccgcgctcccgccaccacctcctgctcccactgccacctccttctcgcagctcccgcctctgcccgacgtcgtcggtggatgccgcgtcaaggctggcgctaaaccacctgggcccggcgcaaatccaccagatccattcgcagctcttattgtccctactcttgtgagagtcgcgaggacgagctttccccctcttgagatccgatgtctaatccatttttcaagttttacaatggatatgaatactagagatcgcattagaaaaaggagggatgatgatgatgacgacctcatgcttttaattctccctactctacatctcttgggctatattattggagatagtgaaaaaaacttgcgacatacatcaatgctaactggagaggaaaaggttagggagctacttgaaggccacatcaagaattgtaggacatcatttaggatggaaccttacatctttaaagccttggtcaattatcttagaagcgaagggttggttaaagacactagaatcaaggtcgaggagaagcttggtttctttttatatatgattagtcacaatgcgtcatttgagtatctccaagtattctttggtcacagcaatgatacattccatcgtgtgatcaaacatttctttgacatagttatccctgccctcagcatgcggttcctaaaacctccctccaatcaagtacatgcaaaagttcgcgaagataaccgattttacccttactttaagaattgcctaggttcaatatatggaacccacgttccaatatcaatgtcacctaatcaagctgcaccattcaggaatagaaaagggacacttagtcaaaatgtgatgttcgtttgtgattttgatctcagagtcacttatttgtcagctggatgggaaggatcagcaacagattcaatggttctcagatctgcaatgaccaattctataggaaagttctaactagtagatggtggttatgccaatacagcttcctttcttgcgccttatcgtggggttaggtaccacttgaaagagtttcttggaatgaaaaaagatgcatgatcattgctgaaccaacgatatgggacaacattatcactacatttcttagagctaagaagttccgcaagaagtcttttcctctcaaccactacaaaattctgatgaaggagagaaatttaaaaccatagaagtggaagatgaagatactaatgaaccacaagtagatgcgagaatagaacaagatgaagatatagtaattgttgaaagggttgaacagaggttacctaaaaggtcagatgcaccaattgtcaatcaagagaaggagacaaagan

SEQ ID NO: 79149 - DNA, 961 bp, Zea Mays
  misc_feature (961)..(961): n is a, c, g, or t
ctggaacaaatccaactcgccgcacgcgactgagatgagcgcgccgccgcacgtttcttacaccgcgctcccgccaccacctcctgctcccactgccacctccttctcgcagctcccgcctctgcccgacgtcgtcggtggatgccgcgtcaaggctggcgctaaaccacctgggcccggcgcaaatccaccagatccattcgcagctcttattgtccctactcttgtgagagtcgcgaggacgagctttccccctcttgagatccgatgtctaatccatttttcaagcatgcggttcctaaaacctccctccaatcaagtacatgcaaaagttcgcgaagataaccgattttacccttactttaagaattgcctaggttcaatatatggaacccacgttccaatatcaatgtcacctaatcaagctgcaccattcaggaatagaaaagggacacttagtcaaaatgtgatgttcgtttgtgattttgatctcagagtcacttatttgtcagctggatgggaaggatcagcaacagattcaatggttctcagatctgcaatgaccaattctataggaaagttctaactagtagatggtggttatgccaatacagcttcctttcttgcgccttatcgtggggttaggtaccacttgaaagagtttcttggaatgaaaaaagatgcatgatcattgctgaaccaacgatatgggacaacattatcactacatttcttagagctaagaagttccgcaagaagtcttttcctctcaaccactacaaaattctgatgaaggagagaaatttaaaaccatagaagtggaagatgaagatactaatgaaccacaagtagatgcgagaatagaacaagatgaagatatagtaattgttgaaagggttgaacagaggttacctaaaaggtcagatgcaccaattgtcaatcaagagaaggagacaaagan

SEQ ID NO: 79150 - DNA, 1372 bp, Zea Mays
  misc_feature (1372)..(1372): n is a, c, g, or t
ctggaacaaatccaactcgccgcacgcgactgagatgagcgcgccgccgcacgtttcttacaccgcgctcccgccaccacctcctgctcccactgccacctccttctcgcagctcccgcctctgcccgacgtcgtcggtggatgccgcgtcaaggctggcgctaaaccacctgggcccggcgcaaatccaccagatccattcgcagctcttattgtccctactcttgtgagagtcgcgaggacgagctttccccctcttgagatccgatgtctaatccatttttcaagagatcgcattagaaaaaggagggatgatgatgatgacgacctcatgcttttaattctccctactctacatctcttgggctatattattggagatagtgaaaaaaacttgcgacatacatcaatgctaactggagaggaaaaggttagggagctacttgaaggccacatcaagaattgtaggacatcatttaggatggaaccttacatctttaaagccttggtcaattatcttagaagcgaagggttggttaaagacactagaatcaaggtcgaggagaagcttggtttctttttatatatgattagtcacaatgcgtcatttgagtatctccaagtattctttggtcacagcaatgatacattccatcgtgtgatcaaacatttctttgacatagttatccctgccctcagcatgcggttcctaaaacctccctccaatcaagtacatgcaaaagttcgcgaagataaccgattttacccttactttaagaattgcctaggttcaatatatggaacccacgttccaatatcaatgtcacctaatcaagctgcaccattcaggaatagaaaagggacacttagtcaaaatgtgatgttcgtttgtgattttgatctcagagtcacttatttgtcagctggatgggaaggatcagcaacagattcaatggttctcagatctgcaatgaccaattctataggaaagttctaactagtagatggtggttatgccaatacagcttcctttcttgcgccttatcgtggggttaggtaccacttgaaagagtttcttggaatgaaaaaagatgcatgatcattgctgaaccaacgatatgggacaacattatcactacatttcttagagctaagaagttccgcaagaagtcttttcctctcaaccactacaaaattctgatgaaggagagaaatttaaaaccatagaagtggaagatgaagatactaatgaaccacaagtagatgcgagaatagaacaagatgaagatatagtaattgttgaaagggttgaacagaggttacctaaaaggtcagatgcaccaattgtcaatcaagagaaggagacaaagan

SEQ ID NO: 79151 - DNA, 1152 bp, Zea Mays
cttaggtcgggctctagccctgtgggccgccgattctgaacaccccagaaccttcgtctatcattccgcgagagaaaacgccacgagcggacggtcggcggccgcatatttcttccgcattgacggtggggcccgacgccggccacaccgccacagagagaaacgttaggacagactgactggttgagaattgagaaccaaaagaagagagaggaagacaggaagagagagagagagcgcgcgcttccaggtttttagctgcaggggaggccgatagttctgttctactggaggaggagcagagagcaagatggggtccggatctttcctcaaggtgctggccaagaacttcgatgtccttgccgggccactcatatcacttgcttatcctctatatgcttctgttagagcaatagagacaaaaaatcctgtagatgatcagcagtggctcacttactgggtgttgtactcatttgtcactttgtttgagctaacttttgctccaattatcgagtggcttccattttggtcatatgcaaaactgttctttaactgctggttggtcttaccttggttcaatggtgctgcttatgtttacgaccattttgtgcggccaatgtttgtgaaccgccgaatagtgaacatatggtatgttccaagaaatgagaagctaggtaaatctgatgatgtgctgtcagctgcagagagatatattgaacaaaatggacctgaagcatttgagaagctcatcagcaagtctaccaagtcttcaaaatcaagaagcacaaagcggtcgatcttggaggaggcagaggctgaaagagaatcatggggtgaaaatcccttctacgacaaaaattacagacactaaacctcttcaaaatccacctagcagcttgaagacaacctttgcccacgagcctcatgcaagctttttagttgcatcagactgaagacgaccttcccaaatttctgactctcagtatactataccttgttacattcactgccagtctgtcgctggacaatgatgagttctagagcaattgtggactgtgtttgtaaatggaggcagatgctagcgttgatcatttttcactgtacgtttcttccttctggttggtggtttttacttataccgtcgaatgtggc

SEQ ID NO: 79152 - DNA, 109 bp, Zea Mays
gcgccgactgcgccttccgctcgacgccgtcgccgtcgccgacgccgcggacgttgtcgtccgtcgcttcgtcctcctcgtcgtcgtcgtcgagaccctacatgagctc

SEQ ID NO: 79153 - DNA, 2299 bp, Zea Mays
ctttttttcgagcccatgaaaaacatcattactttattcaactacccaagtagagggggctcttgtagaggcgcccatcccacagtccgacacactccggtaaagatcgcccacccaatgccatcgccgccgccgtccacggcagcggcggcggcgctgcagctggagcccctcctcccgcacttgtccacgctttcccattacaagcagttccacgcgcgcctccatgccttgggcacgctccattcctacccttccctccgcgcgcgcttcctcgaccgcctagcgctcttgccgcacgccgacgcgcttccgcacgcgctactcctcctccgctccctcccgtcccccgcaaccaacgacttcaacgccgccctgcgcggcctagccgcctccccgcaccctgcgcgctctctcctcctccttgccggccgcctcctccctgctcccgccccgccacggcctcgcctcgatgcgctctccctctccttcgcgctgaaggccacagcccgatgctccgacgcgttcgccacactccagctccacgcgaccctttttcgcctcggtgtggctgctgatgtccgcctgatgaccacgctgctggactcctatgccaagtgcggcgacgtcgcgtccgcacggaaggtgtttgacgaaatgcccgtgcgcgacgtggccacatggaacgcgctgctcgcagggctggcgcaggggacggagccgaatctcgctctattgctattccgcaggctggcagggagctttcgggagttgccgccaagggaggagccaaatgcggtgactgttgtcgctgcactttctgcatgtgcacaacttggaaccttaaaggatggattggctgtgcatgagtttgctcgtacaataggagctgtggacaatgtttgtgtcggcaacgcacttattgacatgtactccaagtgtggctcactgagccgggctcttgaagtgttccattccatcaagctagaagaccgaacacttgtgtcctacaatgctacaattcaggcgctttccatccatgggcatggggaagatgcactgaagctgtttgatgaaatgccagctcgtattgaaccggacgaaatcacttaccttgctgtgatgggtgggtgcaaccatgctgggcttgttgatgatgggcgcagggtttttgattccatgcgggttcctcccaatatgaagcactacgggaccattgtggacctccttggccgtgcaggccgccttgctgaggcatatgacatgattatgtctatgccatttccagcggatattgtcctctggcagacattgctaggtgctgccaagatgcatggtaatgtggatctagcggagttggctgccacaaagcttgctgatcttggctctaacgttgatggtgactatgtgctcctgtccaatgtatatgcatccaagtcccgatgggtggatgttggtcgagtccgtgacaccatgcgaagtaatgatgtgaaaaaagtccctggcttcagctacacagaaatagatggcgtaatgcataagttcataaatggtgacaaagaacacatgaggtggagggaaatatatagagcattagatgaaattgggtcaagaatctgtgctctggggtatgagccagaaacgagcaatgtgctacatgacattggggaggaggagaagcagtatgctttaagctaccacagcgagaagctggctattgcatttgggttaatttctacaccacctggggagactattcgagtgatcaaaaacctccgaacatgtggagactgtcatgtggtggcaaaacttatctctaaagcctataatcgggtgatcattattcgggacagggcaagattccaccgtttcgaagatggacattgttcctgcagagattactggtaaaaatgctggcacactggtcacttgcagccctactaaacacaacatgtgctccttgaggagagttcaagtgatgtgactgcatttctagtcaaaagtacggatgaaagtggatgacatacatactcttgaccaccatgttactgtccagagggctcatcaagttaaaaagttcttagaagatgcaaagttatcttacttgcatgaactcctgggttcgcataacaattcgagaagtgccttggaagcagaaccaaaaaattgtgataactgtgcaagctttgaattgaaatcgctccatgactgttatcattcaatattttcacaatctacaaggattattgatgcatctgtcttggtattgtcataaagttctataaaaatttcattgtcg

SEQ ID NO: 79154 - DNA, 3005 bp, Zea Mays
ctttttttcgagcccatgaaaaacatcattactttattcaactacccaagtagagggggctcttgtagaggcgcccatcccacagtccgacacactccggtaaagatcgcccacccaatgccatcgccgccgccgtccacggcagcggcggcggcgctgcagctggagcccctcctcccgcacttgtccacgctttcccattacaagcagttccacgcgcgcctccatgccttgggcacgctccattcctacccttccctccgcgcgcgcttcctcgaccgcctagcgctcttgccgcacgccgacgcgcttccgcacgcgctactcctcctccgctccctcccgtcccccgcaaccaacgacttcaacgccgccctgcgcggcctagccgcctccccgcaccctgcgcgctctctcctcctccttgccggccgcctcctccctgctcccgccccgccacggcctcgcctcgatgcgctctccctctccttcgcgctgaaggccacagcccgatgctccgacgcgttcgccacactccagctccacgcgaccctttttcgcctcggtgtggctgctgatgtccgcctgatgaccacgctgctggactcctatgccaagtgcggcgacgtcgcgtccgcacggaaggtgtttgacgaaatgcccgtgcgcgacgtggccacatggaacgcgctgctcgcagggctggcgcaggggacggagccgaatctcgctctattgctattccgcaggctggcagggagctttcgggagttgccgccaagggaggagccaaatgcggtgactgttgtcgctgcactttctgcatgtgcacaacttggaaccttaaaggatggattggctgtgcatgagtttgctcgtacaataggagctgtggacaatgtttgtgtcggcaacgcacttattgacatgtactccaagtgtggctcactgagccgggctcttgaagtgttccattccatcaagctagaagaccgaacacttgtgtcctacaatgctacaattcaggcgctttccatccatgggcatggggaagatgcactgaagctgtttgatgaaatgccagctcgtattgaaccggacgaaatcacttaccttgctgtgatgggtgggtgcaaccatgctgggcttgttgatgatgggcgcagggtttttgattccatgcgggttcctcccaatatgaagcactacgggaccattgtggacctccttggccgtgcaggccgccttgctgaggcatatgacatgattatgtctatgccatttccagcggatattgtcctctggcagacattgctaggtgctgccaagatgcatggtaatgtggatctagcggagttggctgccacaaagcttgctgatcttggctctaacgttgatggtgactatgtgctcctgtccaatgtatatgcatccaagtcccgatgggtggatgttggtcgagtccgtgacaccatgcgaagtaatgatgtgaaaaaagtccctggcttcagctacacagaaatagatggcgtaatgcataagttcataaatggtgacaaagaacacatgaggtggagggaaatatatagagcattagatgaaattgggtcaagaatctgtgctctggggtatgagccagaaacgagcaatgtgctacatgacattggggaggaggagaagcagtatgctttaagctaccacagcgagaagctggctattgcatttgggttaatttctacaccacctggggagactattcgagtgatcaaaaacctccgaacatgtggagactgtcatgtggtggcaaaacttatctctaaagcctataatcgggtgatcattattcgggacagggcaagattccaccgtttcgaagatggacattgttcctgcagagattactggtaaaaatgctggcacactggtcacttgcagccctactaaacacaacatgtgctccttgaggagagttcaagtgatgtgactgcatttctagtcaaaagtacggatgaaagtggatgacatacatactcttgaccaccatgttactgtccagagggctcatcaagttaaaaagttcttagaagatgcaaagttatcttacttgcatgaactcctgggttcgcataacaattcgagaagtgccttggaagcagaaccaaaaaattgtgataactgtgcaagctttgaattgaaatcgctccatgactgttatcattcaatattttcacaatctacaagaggttagaaggtgagtacagccatggtcagcgcatcaaggaacgtgaggggcaggccacaggcagatgctttccatactgttacccgagcgctacaaagattacataatacctatcatatggtctagtgaaaaattgcttcattactcaagtacagaacttggaagaatgtcgaggagaggatgggagggatggggctgacacttgacaactttcagcagtaagtatgaaatctatgtttctaaaatggagtcatcatttgtagtttggtgtttttatctttgaatcaccctttctgaaatttcaagattgacgtatttattctccatctactctttgacacttacgtgtaaacattctgttctttatttcttgctcgctcactcactaagcaaatgtatcactggcaccaactttgtcagctttggaaaacccaggagttgaaatccatgtaaatgatctcaaaaaatcatcattaaaattaaacaaatcactgaacctggaagggatcagatcaatggtggaaagtgcgacacaaaagaacacagaactgtgtgtaccctcatgcatattgctgtcgcatctgtacaaagtcacgtgcacattttctctgttccttgagttgaggttctgaaagttgtaatatgtaagcctttcaataaaagggtctagttttctctctttgtaaaattgtatctagactagagtgtgtgggtttgtgtggagttgtatgagattttctttttacctcatcttttccttctt

SEQ ID NO: 79155 - DNA, 2628 bp, Zea Mays
ctttttttcgagcccatgaaaaacatcattactttattcaactacccaagtagagggggctcttgtagaggcgcccatcccacagtccgacacactccggtaaagatcgcccacccaatgccatcgccgccgccgtccacggcagcggcggcggcgctgcagctggagcccctcctcccgcacttgtccacgctttcccattacaagcagttccacgcgcgcctccatgccttgggcacgctccattcctacccttccctccgcgcgcgcttcctcgaccgcctagcgctcttgccgcacgccgacgcgcttccgcacgcgctactcctcctccgctccctcccgtcccccgcaaccaacgacttcaacgccgccctgcgcggcctagccgcctccccgcaccctgcgcgctctctcctcctccttgccggccgcctcctccctgctcccgccccgccacggcctcgcctcgatgcgctctccctctccttcgcgctgaaggccacagcccgatgctccgacgcgttcgccacactccagctccacgcgaccctttttcgcctcggtgtggctgctgatgtccgcctgatgaccacgctgctggactcctatgccaagtgcggcgacgtcgcgtccgcacggaaggtgtttgacgaaatgcccgtgcgcgacgtggccacatggaacgcgctgctcgcagggctggcgcaggggacggagccgaatctcgctctattgctattccgcaggctggcagggagctttcgggagttgccgccaagggaggagccaaatgcggtgactgttgtcgctgcactttctgcatgtgcacaacttggaaccttaaaggatggattggctgtgcatgagtttgctcgtacaataggagctgtggacaatgtttgtgtcggcaacgcacttattgacatgtactccaagtgtggctcactgagccgggctcttgaagtgttccattccatcaagctagaagaccgaacacttgtgtcctacaatgctacaattcaggcgctttccatccatgggcatggggaagatgcactgaagctgtttgatgaaatgccagctcgtattgaaccggacgaaatcacttaccttgctgtgatgggtgggtgcaaccatgctgggcttgttgatgatgggcgcagggtttttgattccatgcgggttcctcccaatatgaagcactacgggaccattgtggacctccttggccgtgcaggccgccttgctgaggcatatgacatgattatgtctatgccatttccagcggatattgtcctctggcagacattgctaggtgctgccaagatgcatggtaatgtggatctagcggagttggctgccacaaagcttgctgatcttggctctaacgttgatggtgactatgtgctcctgtccaatgtatatgcatccaagtcccgatgggtggatgttggtcgagtccgtgacaccatgcgaagtaatgatgtgaaaaaagtccctggcttcagctacacagaaatagatggcgtaatgcataagttcataaatggtgacaaagaacacatgaggtggagggaaatatatagagcattagatgaaattgggtcaagaatctgtgctctggggtatgagccagaaacgagcaatgtgctacatgacattggggaggaggagaagcagtatgctttaagctaccacagcgagaagctggctattgcatttgggttaatttctacaccacctggggagactattcgagtgatcaaaaacctccgaacatgtggagactgtcatgtggtggcaaaacttatctctaaagcctataatcgggtgatcattattcgggacagggcaagattccaccgtttcgaagatggacattgttcctgcagagattactggtaaaaatgctggcacactggtcacttgcagccctactaaacacaacatgtgctccttgaggagagttcaagtgatgtgactgcatttctagtcaaaagtacggatgaaagtggatgacatacatactcttgaccaccatgttactgtccagagggctcatcaagttaaaaagttcttagaagatgcaaagttatcttacttgcatgaactcctgggttcgcataacaattcgagaagtgccttggaagcagaaccaaaaaattgtgataactgtgcaagctttgaattgaaatcgctccatgactgttatcattcaatattttcacaatctacaaggagaggatgggagggatggggctgacacttgacaactttcagcactttggaaaacccaggagttgaaatccatgtaaatgatctcaaaaaatcatcattaaaattaaacaaatcactgaacctggaagggatcagatcaatggtggaaagtgcgacacaaaagaacacagaactgtgtgtaccctcatgcatattgctgtcgcatctgtacaaagtcacgtgcacattttctctgttccttgagttgaggttctgaaagttgtaatatgtaagcctttcaataaaagggtctagttttctctctttgtaaaattgtatctagactagagtgtgtgggtttgtgtggagttgtatgagattttctttttacctcatcttttccttctt

SEQ ID NO: 79156 - DNA, 5286 bp, Zea Mays
ctcagcttcgtcggtattcaagatgaagcttcagtgacacactcccgtcccgtgtaaagcttcgttgacaactaggcactggagaagtggatactctgatctactctgctgaacgagtttaatatttgagtatggcggcggcattgacatggcggttcaatggaagcaatggcggcacccatggcagcgccgatctggaaaggcacgtggacaaagttcaagactcagagccaccaactcctatgtcagtcatgaaaatgggcaagaaccgagtttaatgtggaggatgaggagacactttcaagcgttgctcaatgtattgagcatctacgacagagttcttcatcctcacaggacaaagagagctctttgaagcagttattagatcttgttcaaactcgtgatactgcattcggagctgttggatcgcattcacaggctgttccaatacttgtatctcttcttagatctgggccatctggagttaagatgctggctgctactgttcttgggtctctttgcaaggaagaggagttaagggtgaaagtcttacttggtggttgcatccctccattgcttgctcttctcagatcgaagtcagctgaaagccaaactgcagctgccaaaaccatctatgcagtttcacaaggtgggataagggatcatgttggatcaaagattttctttacggaaaatgttgttcctgtactgtgggagcaacttaaaattagtctcaagaatgagagtttggtggatggccttctaactggagcactgaagaatttatcaaagaatacagaggggttttggtcagcaactgtgcaatgtggtggagttgatatacttataaagctggttagttctggacaaacaaatacccttgcaaatgcttgctatctccttgggtctttgatgatggaagactcttctgtttgttctaaagttttatctggagaaacaactaagcagctcttaaagttacttggtcctggcaatgaaacttctattagagctgaggctgctggggctctcaagttcctttctgcacagagtaaagaggccagacgtcagatagctaattctaatggtattcctgctcttataaatgcgactattgctccatcaaaagaattcatgcaaggtgaatctgctcaatcattgcaagagaatgcaatgtgtgcattagcaaatatatctggcggtttgtcctatgtaatctcaagccttggtgagagtctcgagtcatgttcttcgcctgcacagattgcagatactcttggtgcattggcctcagccttgatgatatatgacacaaatgcggaatctatcagtgcttctgatcctgttgacattgagaagacactgttgaagcagtttaagcctaaggttcctttccttgtgcaggagcgcataattgaagctttggctagcttgtatagtaacccggttctctgcaagacactagcagattctgatgcaaaacgcttgcttgttggtttaataaccatggcagctactgaggtgcaagatgacctcacaaaatcactgtttgctctctgcaaaaaggattgtgacctatggcaagctctgcaaggccgtgaaggtgtccagctattgatttctttacttggtctttcatcagaacagcagcaggaatgtgctgttgctctgcttgcgcttctttcaaaggagaatgatgagagcaaatgggctatcactgctgctggtggcatacccccacttgttcaaattttggaaactggatctcccaaagccaaagaagattcagcaaccatccttggcaatttatgcaatcacagtgaagacataagagcatgtgttgaaagtgctgatgctgttcctgctttactatggcttctgaaaaatggaagtgataatgggaaggagatagcttctaaaacactgaatcatctcatccacaaatcagatacaggaactattagtcagctgtctgctctcttaacaagtgaacagcctgagtcaaaagtttatgttctggatgctttgaaaagcttgctttctgttgcaccacttgatgatattctacatgagggaagtgcagcaaatgatgcggttgagacaatgattaaaattctaagctcacccaaggaagagactcaggctacatcagcaactgctcttgctggtctatttcattgccgcaaggacctgcgagaaactcatattgcagtgaagacactctggtcgctcatgaagctgcttcatatgcagtctaacaaaatactaatgggggcctcatgttgccttgctgccatttttctttcaattaagcaaaataaggaggttgctgcaattgcccgggatgccttaaccccacttgtctcacttgcaaattcttcagttattgaagtggcagaacaagcgactagagctttggcaaatcttttccttgatcaggaattatccctccaggtgtcttttgaagaaaatctcttccgtgtaacacgtgtgctaagagagggaactattgatggaagaactcatgcagctgcagcaatagctcgtcttttacagtgccgaactgttaatcagccactttcagatactattaaccgctctgggtctgtccttgctctagctgagctcttggaagttgccaacggtgaagctgctgcaacatcagaagttcttgatgcactggtgctgttatcgcgatcaaaggcatcaagtgggcacaccaaggctccctgggcaattcttgcagaaaaccctcacacgatacttccccttgtttcatgtattgctgatgctgcagcctccttacaagataaagccatagaagttgtgtcaaggctctgttccgaccaacatgatgttattggtggtctggtttctgaaactccaggttgcatatcatccattgcatggcgcatcattggctccaacacgcttaaagttaaagttggtggatgtgctcttctcgtctgtgctgcaaaagagcattgtcagaagcaaatagaggttctgaatgatgcaagtctgtatattcaactaatccattctctaattgatatgatccatatggcaaacacgcctgctgaaaatgtcagcagtgaaagcatatcagatattagaatttccagacactccaaagaaaactacagtgatggtgaaactgtgtgccgtactgctgtaatctcaggcaacatgattccactatggctacttgctgtcttttctcgtcatgacagcaaaacaagagcagaactcctagaagctggagcagttgaaatgctcactgagaagatttcacaaaatgcattccaatatgtcggtgaagaagatagcacctcatgggtgtgttccttgcttcttgctttgctattccaagaaagagagataattcgatcaaactctgcatcacattccattcctgtgctctcaaacttgttaaggtcagacgagccagcatacagccgatcttttggaattatcagaggaattcatgttggtgcctaatcctgatcaaattgcattagagaggctatttagagttgatgacatcaggattggtgcaacttctagaaaatctattcctcttcttgttgatctacttaaacccattcctgaaagacctggtgctcctttcttggctttgggtcttctgacccagttagctgttgattgccccccaaacatgctgctaatggctgaagctggaatactagaagcacttaccaaatacttatctcttagtccacaagatgcaacagaagaagctacaactgaattgctgggcattcttttcagtagtccagaaataaggcatcatgaatcagcacttggtgttgttaaccaacttgttgcagtccttcgtctaggaggaaggaattcacgttacagtgctgcaaaggcattagagagtttgttttttgctgaccatgtgaggaacagtgagtcagctaggcaggctatccaaccccttgtggagattctgagtactggcatggagagggagcagcatgcagctatatcagcccttgttaggcttctttctgacaatccttcaagagcacttgcagttgcagatgttgagatgaatgctgtggatgttttgtgccggattctttcttctgattgttcagtggagttgaaaggagatgctgcagaactatgctgtgttctatttaacaatacaaggatccgttccacaatggcggccgctcgttgtgtggaacccttggttggtttactggttagtgaagctaaccctgcccagctttctgttgttcgtgcattggataggcttctagatgatgagcaactggcagaattagtggcagcacatggtgctgtcattcctcttgttgggtttttgtatggcaaaaactacatgcttcatgaggcagttgctggagctttggtgaaacttggaaaggacagaccagcttgcaaattggaaatggtcaaggctggtgtaattgagagcattcttgatattctccatgacgctccagattttctttgcatcgcattggcagaaatgcttcggattttgacaaacaatgctaccatagcgaaaggtccatctgtagccaaagtagtacaacctcttttctctttgctttctaaggcggacatgggtcctgaagggcagtatagcacattgcaggttcttgtgaatattttggagcatcccgaatgccgtgctgattataacttgacacctcgccaaactattgagccagtgataaccttattgaattcatctccaccagctgtgcagcaattagctgcagaactcctgtcacatcttcttctagaagacaacctccaaaaggacacaataacagagcaggcgattactcctcttattcaagttctttcttcaggtttgccaaatctacagcagagagctataaaagctcttgctaaccttgcaatagcttggccgaatacaattgcaaaggagggtggtgtttttgagttgtccaaagtgttgttgcaatctgacccgcctttgcctcatgttgtgtgggaatctgcagcgtcggtattgtctagcattctacagtacagtactgagtttttccttgaggtacctgttgcagtactagtgcaattgctcaggtctggaactgaaagcacagttgtcggtgctttgaatgcccttcttgtattggagagtgatgactcaacaagtgcagaagcaatggctgaaagtggtgctgtggaagcattgcttgatctcttgaggagtcatcagtgtgaggaaactgctgccagactaatcgaggcattgct

SEQ ID NO: 79157 - DNA, 5579 bp, Zea Mays
gaactactggaggaagaggaactccattgcagaagtggcactcatagctggctgcaaggcaacttgcttccgcactgccactgtcggcagtcgttgggaagacgagagctcgcctgctatataaacgccgatccttttagggcgcggaaattagcgaaattgcctttggttccgggagattcccgtcgaaaataagcggaaggccgcgtccagcttctcggttctgggaaacagatccaaaccgggccaaatcgtctgaaaacaaaagagagcaacagacgcgcgctgtctttgtatgggcgccgccctcccggctggatctgcggccactccccgtcgcggcgattccatgagaggttgacaactaggcactggagaagtggatactctgatctactctgctgaacgagtttaatatttgagtatggcggcggcattgacatggcggttcaatggaagcaatggcggcacccatggcagcgccgatctggaaaggcacgtggacaaagttcaagactcagagccaccaactcctatgtcagtcatgaaaatgggcaagaaccgagtttaatgtggaggatgaggagacactttcaagcgttgctcaatgtattgagcatctacgacagagttcttcatcctcacaggacaaagagagctctttgaagcagttattagatcttgttcaaactcgtgatactgcattcggagctgttggatcgcattcacaggctgttccaatacttgtatctcttcttagatctgggccatctggagttaagatgctggctgctactgttcttgggtctctttgcaaggaagaggagttaagggtgaaagtcttacttggtggttgcatccctccattgcttgctcttctcagatcgaagtcagctgaaagccaaactgcagctgccaaaaccatctatgcagtttcacaaggtgggataagggatcatgttggatcaaagattttctttacggaaaatgttgttcctgtactgtgggagcaacttaaaattagtctcaagaatgagagtttggtggatggccttctaactggagcactgaagaatttatcaaagaatacagaggggttttggtcagcaactgtgcaatgtggtggagttgatatacttataaagctggttagttctggacaaacaaatacccttgcaaatgcttgctatctccttgggtctttgatgatggaagactcttctgtttgttctaaagttttatctggagaaacaactaagcagctcttaaagttacttggtcctggcaatgaaacttctattagagctgaggctgctggggctctcaagttcctttctgcacagagtaaagaggccagacgtcagatagctaattctaatggtattcctgctcttataaatgcgactattgctccatcaaaagaattcatgcaaggtgaatctgctcaatcattgcaagagaatgcaatgtgtgcattagcaaatatatctggcggtttgtcctatgtaatctcaagccttggtgagagtctcgagtcatgttcttcgcctgcacagattgcagatactcttggtgcattggcctcagccttgatgatatatgacacaaatgcggaatctatcagtgcttctgatcctgttgacattgagaagacactgttgaagcagtttaagcctaaggttcctttccttgtgcaggagcgcataattgaagctttggctagcttgtatagtaacccggttctctgcaagacactagcagattctgatgcaaaacgcttgcttgttggtttaataaccatggcagctactgaggtgcaagatgacctcacaaaatcactgtttgctctctgcaaaaaggattgtgacctatggcaagctctgcaaggccgtgaaggtgtccagctattgatttctttacttggtctttcatcagaacagcagcaggaatgtgctgttgctctgcttgcgcttctttcaaaggagaatgatgagagcaaatgggctatcactgctgctggtggcatacccccacttgttcaaattttggaaactggatctcccaaagccaaagaagattcagcaaccatccttggcaatttatgcaatcacagtgaagacataagagcatgtgttgaaagtgctgatgctgttcctgctttactatggcttctgaaaaatggaagtgataatgggaaggagatagcttctaaaacactgaatcatctcatccacaaatcagatacaggaactattagtcagctgtctgctctcttaacaagtgaacagcctgagtcaaaagtttatgttctggatgctttgaaaagcttgctttctgttgcaccacttgatgatattctacatgagggaagtgcagcaaatgatgcggttgagacaatgattaaaattctaagctcacccaaggaagagactcaggctacatcagcaactgctcttgctggtctatttcattgccgcaaggacctgcgagaaactcatattgcagtgaagacactctggtcgctcatgaagctgcttcatatgcagtctaacaaaatactaatgggggcctcatgttgccttgctgccatttttctttcaattaagcaaaataaggaggttgctgcaattgcccgggatgccttaaccccacttgtctcacttgcaaattcttcagttattgaagtggcagaacaagcgactagagctttggcaaatcttttccttgatcaggaattatccctccaggtgtcttttgaagaaaatctcttccgtgtaacacgtgtgctaagagagggaactattgatggaagaactcatgcagctgcagcaatagctcgtcttttacagtgccgaactgttaatcagccactttcagatactattaaccgctctgggtctgtccttgctctagctgagctcttggaagttgccaacggtgaagctgctgcaacatcagaagttcttgatgcactggtgctgttatcgcgatcaaaggcatcaagtgggcacaccaaggctccctgggcaattcttgcagaaaaccctcacacgatacttccccttgtttcatgtattgctgatgctgcagcctccttacaagataaagccatagaagttgtgtcaaggctctgttccgaccaacatgatgttattggtggtctggtttctgaaactccaggttgcatatcatccattgcatggcgcatcattggctccaacacgcttaaagttaaagttggtggatgtgctcttctcgtctgtgctgcaaaagagcattgtcagaagcaaatagaggttctgaatgatgcaagtctgtatattcaactaatccattctctaattgatatgatccatatggcaaacacgcctgctgaaaatgtcagcagtgaaagcatatcagatattagaatttccagacactccaaagaaaactacagtgatggtgaaactgtgtgccgtactgctgtaatctcaggcaacatgattccactatggctacttgctgtcttttctcgtcatgacagcaaaacaagagcagaactcctagaagctggagcagttgaaatgctcactgagaagatttcacaaaatgcattccaatatgtcggtgaagaagatagcacctcatgggtgtgttccttgcttcttgctttgctattccaagaaagagagataattcgatcaaactctgcatcacattccattcctgtgctctcaaacttgttaaggtcagacgagccagcatacagccgatcttttggaattatcagaggaattcatgttggtgcctaatcctgatcaaattgcattagagaggctatttagagttgatgacatcaggattggtgcaacttctagaaaatctattcctcttcttgttgatctacttaaacccattcctgaaagacctggtgctcctttcttggctttgggtcttctgacccagttagctgttgattgccccccaaacatgctgctaatggctgaagctggaatactagaagcacttaccaaatacttatctcttagtccacaagatgcaacagaagaagctacaactgaattgctgggcattcttttcagtagtccagaaataaggcatcatgaatcagcacttggtgttgttaaccaacttgttgcagtccttcgtctaggaggaaggaattcacgttacagtgctgcaaaggcattagagagtttgttttttgctgaccatgtgaggaacagtgagtcagctaggcaggctatccaaccccttgtggagattctgagtactggcatggagagggagcagcatgcagctatatcagcccttgttaggcttctttctgacaatccttcaagagcacttgcagttgcagatgttgagatgaatgctgtggatgttttgtgccggattctttcttctgattgttcagtggagttgaaaggagatgctgcagaactatgctgtgttctatttaacaatacaaggatccgttccacaatggcggccgctcgttgtgtggaacccttggttggtttactggttagtgaagctaaccctgcccagctttctgttgttcgtgcattggataggcttctagatgatgagcaactggcagaattagtggcagcacatggtgctgtcattcctcttgttgggtttttgtatggcaaaaactacatgcttcatgaggcagttgctggagctttggtgaaacttggaaaggacagaccagcttgcaaattggaaatggtcaaggctggtgtaattgagagcattcttgatattctccatgacgctccagattttctttgcatcgcattggcagaaatgcttcggattttgacaaacaatgctaccatagcgaaaggtccatctgtagccaaagtagtacaacctcttttctctttgctttctaaggcggacatgggtcctgaagggcagtatagcacattgcaggttcttgtgaatattttggagcatcccgaatgccgtgctgattataacttgacacctcgccaaactattgagccagtgataaccttattgaattcatctccaccagctgtgcagcaattagctgcagaactcctgtcacatcttcttctagaagacaacctccaaaaggacacaataacagagcaggcgattactcctcttattcaagttctttcttcaggtttgccaaatctacagcagagagctataaaagctcttgctaaccttgcaatagcttggccgaatacaattgcaaaggagggtggtgtttttgagttgtccaaagtgttgttgcaatctgacccgcctttgcctcatgttgtgtgggaatctgcagcgtcggtattgtctagcattctacagtacagtactgagtttttccttgaggtacctgttgcagtactagtgcaattgctcaggtctggaactgaaagcacagttgtcggtgctttgaatgcccttcttgtattggagagtgatgactcaacaagtgcagaagcaatggctgaaagtggtgctgtggaagcattgcttgatctcttgaggagtcatcagtgtgaggaaactgctgccagactaatcgaggcattgct

SEQ ID NO: 79158 - DNA, 635 bp, Zea Mays
cctcgacatgcgttctgttcatggacatgtgcataggggtgaggtggccttctgcagccaggagtgtaggcagcagcagatgaacctcgacgagctcatggagaagaagtgctccactccggctggcggcggcggcggtggcgtcggtggcggcggcggtggaggctcagatcagcccggcaagagcagcaccgtagcggccgcctagcatcgccagaggggtaataacaacgaagaaaatttttggagccctggtggtgtaggccccaaaaacgcagcagtttccatcagcctatgtatatcctgtatttctggagtcactgtgtgtgtatattggtgggaaggggaaggatgtagggattccaactgggggcatggtttgcaatgcatcatctcatctgtgcctgtgtgtgggtggggtggggtgggatggggctcgagcacaaggggctgtgttaaatccaggtgcaaagtaggagttgtgatctggacaggaagaagaacataagttctccaaattgttgctaaaaatcctttctctcatcgaactttacaaatattttcgtgaaagttttttgtttagcgaacactgagcggcctaaaattagatcgatttaccctataagagcagtttg

SEQ ID NO: 79159 - DNA, 1772 bp, Zea Mays
aaattatgaccctagtccggtaccacactactccggccttccctcctgtcctagtcggctagtcccatcccatgttgcacacggatccatccccaacacggcaacacgccaacacccatcagtccatcacaggcgcagcgaactctgcgcttccacttctctctccaccgtccctttacccaaccaaccaccgcactggtacgctctcgactctcgacaccggcagcagcaggaggtggagctagggcatgtgatcggactccttgcctgcttcctgatctcaacctcttttcaccagcgcgagggcggcgcggtctcaagccgggatggggtatctgccggcgctgggcgggaaggcggcccacctggtgaacgacctcgccactgtcatcctgaaccccgtctccgagcgcgagcgccagccacaccaccccacccacctcccgcttaatgtttctttctctcttataggaggccactgaaggagaagacacactattcgttgacgatgattctgaccaaaattctgatggtcctgacacatcttcattcagagcatttctgatgtcctttgtgccttcctcaactgccagcaagaattcaatggagaccatacctgagcataatctagatgtggaatacccaactttaacacctgttgggaaggcgtgcagtgggaggaaaggcctgtttagtagagggaagcattcccttggtaggattattagcaaagcaggacttggtaatttgagacagaaacagacccacagcattgatggtgaaatcataggccaaaccgaatcagttgcacctagatttgaagtgaagggttcaaaagaatcaactttgcacgataaattgccagctatgtctgaaccttctcttcttctgacagaaatgatgcgagctgttctttatacatctcttcctgtacttgttcaaggaaggaactggatgctggtatatagcacctggaggcatggaatatctttgtctactctgtatcgaagaagcaggctttgtgctggctactcacttttgatagttggggatcgaagaggggcagtttttggtggcttggtcgaggccccactgcaacctatcgtaaaaaggaagtatcagggaactaatgactgctttgtgttcaccaacgtagatggttgtcctgttatatgccatccaacagtatgactggttctagctccacctccgagacttttaacaacccatgcttatcccatacccaggaattcaaaatcaaagatgtcgagctgtggggtttcgtcaatgcttccaagtttgaagagatgctcatgatctgccgcaccgaaaagcaaggaatttggaacctgtgaccgtttggagttcactgagctgttgcttgttggtgtcaaccgatcctctgatgtggcttgtactgttgtacagttttgtagtaaacgtttgtatagcatgtagagagtttccatatggaatcagaagttgagaacatgtagagttttgctttgtagaataccaaatgccatttacagagaaaataccagtcactaacactcaaatgtatatatttcatagaaactaagaatgccctgcctacgttgcagatggaagttttaaaactggaaattgctatttgtatgcccggtgggggttgccactcgcaacaaccgctgatcttgcattttgagaattgttgcccctgttctgcttcttgatcgtttcctcaagactacgaccacttctctcggaagcttcatccaattggctcacca

SEQ ID NO: 79160 - DNA, 1786 bp, Zea Mays
cttccctcctgtcctagtcggctagtcccatcccatgttgcacacggatccatccccaacacggcaacacgccaacacccatcagtccatcacaggcgcagcgaactctgcgcttccacttctctctccaccgtccctttacccaaccaaccaccgcactgcgcgagggcggcgcggtctcaagccgggatggggtatctgccggcgctgggcgggaaggcggcccacctggtgaacgacctcgccactgtcatcctgaaccccgtctccgagcgcgagcgccagccacaccaccccacccacctcccggaggccactgaaggagaagacacactattcgttgacgatgattctgaccaaaattctgatggtcctgacacatcttcattcagagcatttctgatgtcctttgtgccttcctcaactgccagcaagaattcaatggagaccatacctgagcataatctagatgtggaatacccaactttaacacctgttgggaaggcgtgcagtgggaggaaaggcctgtttagtagagggaagcattcccttggtaggattattagcaaagcaggacttggtaatttgagacagaaacagacccacagcattgatggtgaaatcataggccaaaccgaatcagttgcacctagatttgaagtgaagggttcaaaagaatcaactttgcacgataaattgccagctatgtctgaaccttctcttcttctgacagaaatgatgcgagctgttctttatacatctcttcctgtacttgttcaaggaaggaactggatgctggtatatagcacctggaggcatggaatatctttgtctactctgtatcgaagaagcaggctttgtgctggctactcacttttgatagttggggatcgaagaggggcagtttttggtggcttggtcgaggccccactgcaacctatcgtaaaaaggaagtatcagggaactaatgactgctttgtgttcaccaacgtagatggttgtcctgttatatgccatccaacaggtgctaataactattttacattttgctctaccgattatatggcaatgggaggtggtggtcacttcgcactttatctcgatggagacctgtaatctctgttcttcctttccatcacatgacacaaagttcctagtttctaggttttgtatgtatattgatggaaaattcctagaaagtatgactggttctagctccacctccgagacttttaacaacccatgcttatcccatacccaggaattcaaaatcaaagatgtcgagctgtggggtttcgtcaatgcttccaagtttgaagagatgctcatgatctgccgcaccgaaaagcaaggaatttggaacctgtgaccgtttggagttcactgagctgttgcttgttggtgtcaaccgatcctctgatgtggcttgtactgttgtacagttttgtagtaaacgtttgtatagcatgtagagagtttccatatggaatcagaagttgagaacatgtagagttttgctttgtagaataccaaatgccatttacagagaaaataccagtcactaacactcaaatgtatatatttcatagaaactaagaatgccctgcctacgttgcagatggaagttttaaaactggaaattgctatttgtatgcccggtgggggttgccactcgcaacaaccgctgatcttgcattttgagaattgttgcccctgttctgcttcttgatcgtttcctcaagactacgaccacttctctcggaagcttcatccaattggctcacca

SEQ ID NO: 79161 - DNA, 1698 bp, Zea Mays
cttccctcctgtcctagtcggctagtcccatcccatgttgcacacggatccatccccaacacggcaacacgccaacacccatcagtccatcacaggcgcagcgaactctgcgcttccacttctctctccaccgtccctttacccaaccaaccaccgcactgcgcgagggcggcgcggtctcaagccgggatggggtatctgccggcgctgggcgggaaggcggcccacctggtgaacgacctcgccactgtcatcctgaaccccgtctccgagcgcgagcgccagccacaccaccccacccacctcccggaggccactgaaggagaagacacactattcgttgacgatgattctgaccaaaattctgatggtcctgacacatcttcattcagagcatttctgatgtcctttgtgccttcctcaactgccagcaagaattcaatggagaccatacctgagcataatctagatgtggaatacccaactttaacacctgttgggaaggcgtgcagtgggaggaaaggcctgtttagtagagggaagcattcccttggtaggattattagcaaagcaggacttggtaatttgagacagaaacagacccacagcattgatggtgaaatcataggccaaaccgaatcagttgcacctagatttgaagtgaagggttcaaaagaatcaactttgcacgataaattgccagctatgtctgaaccttctcttcttctgacagaaatgatgcgagctgttctttatacatctcttcctgtacttgttcaaggaaggaactggatgctggtatatagcacctggaggcatggaatatctttgtctactctgtatcgaagaagcaggctttgtgctggctactcacttttgatagttggggatcgaagaggggcagtttttggtggcttggtcgaggccccactgcaacctatcgtaaaaaggaagtatcagggaactaatgactgctttgtgttcaccaacgtagatggttgtcctgttatatgccatccaacaggtgctaataactattttacattttgctctaccgattatatggcaatgggaggtggtggtcacttcgcactttatctcgatggagaccttatgactggttctagctccacctccgagacttttaacaacccatgcttatcccatacccaggaattcaaaatcaaagatgtcgagctgtggggtttcgtcaatgcttccaagtttgaagagatgctcatgatctgccgcaccgaaaagcaaggaatttggaacctgtgaccgtttggagttcactgagctgttgcttgttggtgtcaaccgatcctctgatgtggcttgtactgttgtacagttttgtagtaaacgtttgtatagcatgtagagagtttccatatggaatcagaagttgagaacatgtagagttttgctttgtagaataccaaatgccatttacagagaaaataccagtcactaacactcaaatgtatatatttcatagaaactaagaatgccctgcctacgttgcagatggaagttttaaaactggaaattgctatttgtatgcccggtgggggttgccactcgcaacaaccgctgatcttgcattttgagaattgttgcccctgttctgcttcttgatcgtttcctcaagactacgaccacttctctcggaagcttcatccaattggctcacca

SEQ ID NO: 79162 - DNA, 2326 bp, Zea Mays
ctcctgtcctagtcggctagtcccatcccatgttgcacacggatccatccccaacacggcaacacgccaacacccatcagtccatcacaggcgcagcgaactctgcgcttccacttctctctccaccgtccctttacccaaccaaccaccgcactgcgcgagggcggcgcggtctcaagccgggatggggtatctgccggcgctgggcgggaaggcggcccacctggtgaacgacctcgccactgtcatcctgaaccccgtctccgagcgcgagcgccagccacaccaccccacccacctcccggccactgaaggagaagacacactattcgttgacgatgattctgaccaaaattctgatggtcctgacacatcttcattcagagcatttctgatgtcctttgtgccttcctcaactgccagcaagaattcaatggagaccatacctgagcataatctagatgtggaatacccaactttaacacctgttgggaaggcgtgcagtgggaggaaaggcctgtttagtagagggaagcattcccttggtaggattattagcaaagcaggacttggtaatttgagacagaaacagacccacagcattgatggtgaaatcataggccaaaccgaatcagttgcacctagatttgaagtgaagggttcaaaagaatcaactttgcacgataaattgccagctatgtctgaaccttctcttcttctgacagaaatgatgcgagctgttctttatacatctcttcctgtacttgttcaaggaaggaactggatgctggtatatagcacctggaggcatggaatatctttgtctactctgtatcgaagaagcaggctttgtgctggctactcacttttggtatttttatgtattgttcatattttgcccttatgttacactaaacatgatacactcttttttcctcttacccttgcatgaaatatgattacaccactctagttgttattttttctataatgtcaaataatacagattatacaatacaatatcactgggaattttagtgcatgcaatgccatgtcaatacagtatcctccaaaaaccagaacactgtcactcttatcatgcatgcccaaaccttatgaattatggtaccctttcagataccaggaattttccatattttcttgcatttttatgtagtgcacatactagttcaattaaagaccttaatatggcaatgtttcttagtccaacaattacaaatacacccatgtaaaacaaattctattcatgtgataattcctttccttcagctgctgtgctgactgggttttgctgccttggaaagcttgccaaagaaatacatatccttcagcagcacatcagatttccataattgtattatccagctatttgagctgttgatgacagtgcacttgttttgatcatacattgtgggcgaggattgaggaatgatactacaatttagttactgctatccacatgataatttgttgtttgctgttgcagatagttggggatcgaagaggggcagtttttggtggcttggtcgaggccccactgcaacctatcgtaaaaaggaagtatcagggaactaatgactgctttgtgttcaccaacgtagatggttgtcctgttatatgccatccaacaggtgctaataactattttacattttgctctaccgattatatggcaatgggaggtggtggtcacttcgcactttatctcgatggagaccttatgactggttctagctccacctccgagacttttaacaacccatgcttatcccatacccaggaattcaaaatcaaagatgtcgagctgtggggtttcgtcaatgcttccaagtttgaagagatgctcatgatctgccgcaccgaaaagcaaggaatttggaacctgtgaccgtttggagttcactgagctgttgcttgttggtgtcaaccgatcctctgatgtggcttgtactgttgtacagttttgtagtaaacgtttgtatagcatgtagagagtttccatatggaatcagaagttgagaacatgtagagttttgctttgtagaataccaaatgccatttacagagaaaataccagtcactaacactcaaatgtatatatttcatagaaactaagaatgccctgcctacgttgcagatggaagttttaaaactggaaattgctatttgtatgcccggtgggggttgccactcgcaacaaccgctgatcttgcattttgagaattgttgcccctgttctgcttcttgatcgtttcctcaagactacgaccacttctctcggaagcttcatccaattggctcacca

SEQ ID NO: 79163 - DNA, 1685 bp, Zea Mays
gcacacggatccatccccaacacggcaacacgccaacacccatcagtccatcacaggcgcagcgaactctgcgcttccacttctctctccaccgtccctttacccaaccaaccaccgcactgcgcgagggcggcgcggtctcaagccgggatggggtatctgccggcgctgggcgggaaggcggcccacctggtgaacgacctcgccactgtcatcctgaaccccgtctccgagcgcgagcgccagccacaccaccccacccacctcccggaggccactgaaggagaagacacactattcgttgacgatgattctgaccaaaattctgatggtcctgacacatcttcattcagagcatttctgatgtcctttgtgccttcctcaactgccagcaagaattcaatggagaccatacctgagcataatctagatgtggaatacccaactttaacacctgttgggaaggcgtgcagtgggaggaaaggcctgtttagtagagggaagcattcccttggtaggattattagcaaagcaggacttggtaatttgagacagaaacagacccacagcattgatggtgaaatcataggccaaaccgaatcagttgcacctagatttgaagtgaagggttcaaaagaatcaactttgcacgataaattgccagctatgtctgaaccttctcttcttctgacagaaatgatgcgagctgttctttatacatctcttcctgtacttgttcaaggaaggaactggatgctggtatatagcacctggaggcatggaatatctttgtctactctgtatcgaagaagcaggctttgtgctggctactcacttttgatagttggggatcgaagaggggcagtttttggtggcttggtcgaggccccactgcaacctatcgtaaaaaggaagtatcagggaactaatgactgctttgtgttcaccaacgtagatggttgtcctgttatatgccatccaacaggtgctaataactattttacattttgctctaccgattatatggcaatgggaggtggtggtcacttcgcactttatctcgatggagaccttatgactggttctagctccacctccgagacttttaacaacccatgcttatcccatacccaggaattcaaaatcaaagatgtcgaggtacacaatcttctatactctaagatctgtggggtttcgtcaatgcttccaagtttgaagagatgctcatgatctgccgcaccgaaaagcaaggaatttggaacctgtgaccgtttggagttcactgagctgttgcttgttggtgtcaaccgatcctctgatgtggcttgtactgttgtacagttttgtagtaaacgtttgtatagcatgtagagagtttccatatggaatcagaagttgagaacatgtagagttttgctttgtagaataccaaatgccatttacagagaaaataccagtcactaacactcaaatgtatatatttcatagaaactaagaatgccctgcctacgttgcagatggaagttttaaaactggaaattgctatttgtatgcccggtgggggttgccactcgcaacaaccgctgatcttgcattttgagaattgttgcccctgttctgcttcttgatcgtttcctcaagactacgaccacttctctcggaagcttcatccaattggctcacca

SEQ ID NO: 79164 - DNA, 2487 bp, Zea Mays
gcacacggatccatccccaacacggcaacacgccaacacccatcagtccatcacaggcgcagcgaactctgcgcttccacttctctctccaccgtccctttacccaaccaaccaccgcactgcgcgagggcggcgcggtctcaagccgggatggggtatctgccggcgctgggcgggaaggcggcccacctggtgaacgacctcgccactgtcatcctgaaccccgtctccgagcgcgagcgccagccacaccaccccacccacctcccggaggccactgaaggagaagacacactattcgttgacgatgattctgaccaaaattctgatggtcctgacacatcttcattcagagcatttctgatgtcctttgtgccttcctcaactgccagcaagaattcaatggagaccatacctgagcataatctagatgtggaatacccaactttaacacctgttgggaaggcgtgcagtgggaggaaaggcctgtttagtagagggaagcattcccttggtaggattattagcaaagcaggacttggtaatttgagacagaaacagacccacagcattgatggtgaaatcataggccaaaccgaatcagttgcacctagatttgaagtgaagggttcaaaagaatcaactttgcacgataaattgccagctatgtctgaaccttctcttcttctgacagaaatgatgcgagctgttctttatacatctcttcctgtacttgttcaaggaaggaactggatgctggtatatagcacctggaggcatggaatatctttgtctactctgtatcgaagaagcaggctttgtgctggctactcacttttggtatttttatgtattgttcatattttgcccttatgttacactaaacatgatacactcttttttcctcttacccttgcatgaaatatgattacaccactctagttgttattttttctataatgtcaaataatacagattatacaatacaatatcactgggaattttagtgcatgcaatgccatgtcaatacagtatcctccaaaaaccagaacactgtcactcttatcatgcatgcccaaaccttatgaattatggtaccctttcagataccaggaattttccatattttcttgcatttttatgtagtgcacatactagttcaattaaagaccttaatatggcaatgtttcttagtccaacaattacaaatacacccatgtaaaacaaattctattcatgtgataattcctttccttcagctgctgtgctgactgggttttgctgccttggaaagcttgccaaagaaatacatatccttcagcagcacatcagatttccataattgtattatccagctatttgagctgttgatgacagtgcacttgttttgatcatacattgtgggcgaggattgaggaatgatactacaatttagttactgctatccacatgataatttgttgtttgctgttgcagatagttggggatcgaagaggggcagtttttggtggcttggtcgaggccccactgcaacctatcgtaaaaaggaagtatcagggaactaatgactgctttgtgttcaccaacgtagatggttgtcctgttatatgccatccaacaggtgctaataactattttacattttgctctaccgattatatggcaatgggaggtggtggtcacttcgcactttatctcgatggagacctgtaatctctgttcttcctttccatcacatgacacaaagttcctagtttctaggttttgtatgtatattgatggaaaattcctagaaaggttgatgtagtatatgccagcacgtcattttgtcttccatcggtcttatattatatcttatgcatctcccgtatttttcttggctgctctgttggcctgtgcagtatgactggttctagctccacctccgagacttttaacaacccatgcttatcccatacccaggaattcaaaatcaaagatgtcgagctgtggggtttcgtcaatgcttccaagtttgaagagatgctcatgatctgccgcaccgaaaagcaaggaatttggaacctgtgaccgtttggagttcactgagctgttgcttgttggtgtcaaccgatcctctgatgtggcttgtactgttgtacagttttgtagtaaacgtttgtatagcatgtagagagtttccatatggaatcagaagttgagaacatgtagagttttgctttgtagaataccaaatgccatttacagagaaaataccagtcactaacactcaaatgtatatatttcatagaaactaagaatgccctgcctacgttgcagatggaagttttaaaactggaaattgctatttgtatgcccggtgggggttgccactcgcaacaaccgctgatcttgcattttgagaattgttgcccctgttctgcttcttgatcgtttcctcaagactacgaccacttctctcggaagcttcatccaattggctcacca

SEQ ID NO: 79165 - DNA, 1756 bp, Zea Mays
cttcaatatgttgccagtttattaggcttctttgttttgaaaatatttttttctatcagcgccaggggtagggaagtgtctagggtcgagggagtagtgatgggatgaaaatggacacagaactgaacacttgaactccggtggcgctgcaatggctatcacactgaaagagaaggaggccactgaaggagaagacacactattcgttgacgatgattctgaccaaaattctgatggtcctgacacatcttcattcagagcatttctgatgtcctttgtgccttcctcaactgccagcaagaattcaatggagaccatacctgagcataatctagatgtggaatacccaactttaacacctgttgggaaggcgtgcagtgggaggaaaggcctgtttagtagagggaagcattcccttggtaggattattagcaaagcaggacttggtaatttgagacagaaacagacccacagcattgatggtgaaatcataggccaaaccgaatcagttgcacctagatttgaagtgaagggttcaaaagaatcaactttgcacgataaattgccagctatgtctgaaccttctcttcttctgacagaaatgatgcgagctgttctttatacatctcttcctgtacttgttcaaggaaggaactggatgctggtatatagcacctggaggcatggaatatctttgtctactctgtatcgaagaagcaggctttgtgctggctactcacttttgatagttggggatcgaagaggggcagtttttggtggcttggtcgaggccccactgcaacctatcgtaaaaaggaagtatcagggaactaatgactgctttgtgttcaccaacgtagatggttgtcctgttatatgccatccaacaggtgctaataactattttacattttgctctaccgattatatggcaatgggaggtggtggtcacttcgcactttatctcgatggagacctgtaatctctgttcttcctttccatcacatgacacaaagttcctagtttctaggttttgtatgtatattgatggaaaattcctagaaaggttgatgtagtatatgccagcacgtcattttgtcttccatcggtcttatattatatcttatgcatctcccgtatttttcttggctgctctgttggcctgtgcagtatgactggttctagctccacctccgagacttttaacaacccatgcttatcccatacccaggaattcaaaatcaaagatgtcgagctgtggggtttcgtcaatgcttccaagtttgaagagatgctcatgatctgccgcaccgaaaagcaaggaatttggaacctgtgaccgtttggagttcactgagctgttgcttgttggtgtcaaccgatcctctgatgtggcttgtactgttgtacagttttgtagtaaacgtttgtatagcatgtagagagtttccatatggaatcagaagttgagaacatgtagagttttgctttgtagaataccaaatgccatttacagagaaaataccagtcactaacactcaaatgtatatatttcatagaaactaagaatgccctgcctacgttgcagatggaagttttaaaactggaaattgctatttgtatgcccggtgggggttgccactcgcaacaaccgctgatcttgcattttgagaattgttgcccctgttctgcttcttgatcgtttcctcaagactacgaccacttctctcggaagcttcatccaattggctcacca

SEQ ID NO: 79166 - DNA, 2234 bp, Zea Mays
gtcagatatccgatggatatccgaacccgcgggtaaaattgtcatacctagagacggatcttaaactgctgatgtagttacagtcaaagccgttgtctcggggcgcatctacttccacggacggtctctcctgtcggctgccaccgtcgccgagaacctttcttttttgtggattcctaccactcccccgacgaggcaagcagcaagcgttaattccattccttaattgccaatggcgaccgccttcgccagtacggccttgcggcgggcgccttgggataaactccacggcaaggaaggcatccgaagcctcgggggccttaatagcttcttcctcccgtggctgagactctggtcccgcgggctggtagggcatcggcatgggtggtcttgctgtctccgccttcgtgctgttttcttgggtgcttttcttgtcctgcatcttctcagtggatggactgtctaaagtgaggggtgttaacttgggaggatggttggtcattgaagggtggattaagccatcactttttgacgggattccaaatggggatatgctcgatgggacacaggtgcagatccgctcagtggtattaaacaagtatgttagtgcggccaatggtggtggctcaaatgtgacagtggaccgtgatgtggcctcaacgtgggagacattctggctttggagggtttcagataatgaatttcagcttcggtgccttggaggtcaatttttgacatcaaacagtgaagatggtttgatcttggctacttcaaagcatccattgtccactgaaactttctccattgaaaggaatgctagaagggttcatatcagacttctgaatggaggctatgtgcaagatgggataataatttagcgacatttgaattggtgatcgttgccaataacttgcatggggactaccagcttgccaatggttatggccctgacaaggcgaagatggtcttagaagagcacagaagaagtttcattacagcaaaggactttgatttcctgtctcgccacggaattaatactatcttatggtttgaaatgtataatcgatcttcatgctgctcctggttctcaaaatggaatggaacatagtgcgagcagggatggttctgtggcctggccctctcctgaatatatctcacaaacattggaagtcattgacttcctggcgacaaggtatggaggccatccttcccttttgggtattgagcttctgaacgaaccttctgcagctacagttactttagatgttcttgtgtcctactatatgaggggataccaaattgtgcgaaaccattcgtcaactgcatatgttattctctgtcaaagaattgggaatgcagacccaattgaactgtttcaagctggtattggtctttcaaatgtcgtagttgatttacactactacaacttgttcaatccatactttgccaccatgaattccagtcagaatattgattttatttacaagatgagagcaccacagttacaagaccttaagggcatgaatgggcctcttgtcttcattggtgaatgggttaatgaatgggacgtgcaaaatgcatctcagtatgagtatcagaagtttggcagtgctcagttggatgtttatgccaacgctacctttgggtggtcgtactggacacttaagaatgacatgatccattgggacttcgagtggaatattaagaataagtacctattattcagtggttcatccatgctgaagacaccaagcttcctgctgctgctagcgttaggatggggaattcacctgatcatcatgccaagataacctggattctaggaactaagctgattggaagtgtggatgtacacatagactactcaaatccgaattatagttgaggcaaaattggtgcatatatctttcttatataaagtcatgtagttgctcctaggtttctccagtttttttatgaaaaaaaaagaaatcctggattactcgaacatctcgtagcacaccttcgtaatgcaatatgttactcagctgacgaaatgttcaggtgtgtacagcgtgccatttgatatttttacttttgaagatgttgaggtatcatttgttcaggatggagacagtagcactggacctcatgccatctccagcaagccatgtaaatggccgtgcaaaatattgttttgcattgtagattgtactgtttgtagagtgaaattcggaatagtgagtgagatagag

SEQ ID NO: 79167 - DNA, 2384 bp, Zea Mays
gtcagatatccgatggatatccgaacccgcgggtaaaattgtcatacctagagacggatcttaaactgctgatgtagttacagtcaaagccgttgtctcggggcgcatctacttccacggacggtctctcctgtcggctgccaccgtcgccgagaacctttcttttttgtggattcctaccactcccccgacgaggcaagcagcaagcgttaattccattccttaattgccaatggcgaccgccttcgccagtacggccttgcggcgggcgccttgggataaactccacggcaaggaaggcatccgaagcctcgggggccttaatagcttcttcctcccgtggctgagactctggtcccgcgggctggtagggcatcggcatgggtggtcttgctgtctccgccttcgtgctgttttcttgggtgcttttcttgtcctgcatcttctcagtggatggactgtctaaagtgaggggtgttaacttgggaggatggttggtcattgaagggtggattaagccatcactttttgacgggattccaaatggggatatgctcgatgggacacaggtgcagatccgctcagtggtattaaacaagtatgttagtgcggccaatggtggtggctcaaatgtgacagtggaccgtgatgtggcctcaacgtgggagacattctggctttggagggtttcagataatgaatttcagcttcggtgccttggaggtcaatttttgacatcaaacagtgaagatggtttgatcttggctacttcaaagcatccattgtccactgaaactttctccattgaaaggaatgctagaagggttcatatcagacttctgaatggaggctatgtgcaagcgacaaacgatcatctgcttatttccacttatcaattccaaccaggatgggataataatttagcgacatttgaattggtgatcgttgccaataacttgcatggggactaccagcttgccaatggttatggccctgacaaggcgaagatggtcttagaagagcacagaagaagtttcattacagcaaaggactttgatttcctgtctcgccacggaattaatactgtgagaattcctgtcggatggtggataacacaagatccttatccaccttctccatttgttggagggtctttggcagccctggacctagcattttcatgggcacaatcttatggtttgaaatgtataatcgatcttcatgctgctcctggttctcaaaatggaatggaacatagtgcgagcagggatggttctgtggcctggccctctcctgaatatatctcacaaacattggaagtcattgacttcctggcgacaaggtatggaggccatccttcccttttgggtattgagcttctgaacgaaccttctgcagctacagttactttagatgttcttgtgtcctactatatgaggggataccaaattgtgcgaaaccattcgtcaactgcatatgttattctctgtcaaagaattgggaatgcagacccaattgaactgtttcaagctggtattggtctttcaaatgtcgtagttgatttacactactacaacttgttcaatccatactttgccaccatgaattccagtcagaatattgattttatttacaagatgagagcaccacagttacaagaccttaagggcatgaatgggcctcttgtcttcattggtgaatgggttaatgaatgggacgtgcaaaatgcatctcagtatgagtatcagaagtttggcagtgctcagttggatgtttatgccaacgctacctttgggtggtcgtactggacacttaagaatgacatgatccattgggacttcgagtggaatattaagaataagtacctattattcagtggttcatccatgctgaagacaccaagcttcctgctgctgctagcgttaggatggggaattcacctgatcatcatgccaagataacctggattctaggaactaagctgattggaagtgtggatgtacacatagactactcaaatccgaattatagttgaggcaaaattggtgcatatatctttcttatataaagtcatgtagttgctcctaggtttctccagtttttttatgaaaaaaaaagaaatcctggattactcgaacatctcgtagcacaccttcgtaatgcaatatgttactcagctgacgaaatgttcaggtgtgtacagcgtgccatttgatatttttacttttgaagatgttgaggtatcatttgttcaggatggagacagtagcactggacctcatgccatctccagcaagccatgtaaatggccgtgcaaaatattgttttgcattgtagattgtactgtttgtagagtgaaattcggaatagtgagtgagatagag

SEQ ID NO: 79168 - DNA, 2324 bp, Zea Mays
ggcgcatctacttccacggacggtctctcctgtcggctgccaccgtcgccgagaacctttcttttttgtggattcctaccactcccccgacgaggcaagcagcaagcgttaattccattccttaattgccaatggcgaccgccttcgccagtacggccttgcggcgggcgccttgggataaactccacggcaaggaaggcatccgaagcctcgggggccttaatagcttcttcctcccgtggctgagactctggtcccgcgggctggtagggcatcggcatgggtggtcttgctgtctccgccttcgtgctgttttcttgggtgcttttcttgtcctgcatcttctcagtggatggactgtctaaagtgaggggtgttaacttgggaggatggttggtcattgaagggtggattaagccatcactttttgacgggattccaaatggggatatgctcgtaggatgggacacaggtgcagatccgctcagtggtattaaacaagtatgttagtgcggccaatggtggtggctcaaatgtgacagtggaccgtgatgtggcctcaacgtgggagacattctggctttggagggtttcagataatgaatttcagcttcggtgccttggaggtcaatttttgacatcaaacagtgaagatggtttgatcttggctacttcaaagcatccattgtccactgaaactttctccattgaaaggaatgctagaagggttcatatcagacttctgaatggaggctatgtgcaagatgggataataatttagcgacatttgaattggtgatcgttgccaataacttgcatggggactaccagcttgccaatggttatggccctgacaaggcgaagatggtcttagaagagcacagaagaagtttcattacagcaaaggactttgatttcctgtctcgccacggaattaatactgtgagaattcctgtcggatggtggataacacaagatccttatccaccttctccatttgttggagggtctttggcagccctggacctagcattttcatgggcacagtatgccgtgcctccaaactcttctttgcagtatttaatatccctgacctttcctgatgctatatttacttctgttggattagatcttatggtttgaaatgtataatcgatcttcatgctgctcctggttctcaaaatggaatggaacatagtgcgagcagggatggttctgtggcctggccctctcctgaatatatctcacaaacattggaagtcattgacttcctggcgacaaggtatggaggccatccttcccttttgggtattgagcttctgaacgaaccttctgcagctacagttactttagatgttcttgtgtcctactatatgaggggataccaaattgtgcgaaaccattcgtcaactgcatatgttattctctgtcaaagaattgggaatgcagacccaattgaactgtttcaagctggtattggtctttcaaatgtcgtagttgatttacactactacaacttgttcaatccatactttgccaccatgaattccagtcagaatattgattttatttacaagatgagagcaccacagttacaagaccttaagggcatgaatgggcctcttgtcttcattggtgaatgggttaatgaatgggacgtgcaaaatgcatctcagtatgagtatcagaagtttggcagtgctcagttggatgtttatgccaacgctacctttgggtggtcgtactggacacttaagaatgacatgatccattgggacttcgagtggaatattaagaataagtacctattattcagtggttcatccatgctgaagacaccaagcttcctgctgctgctagcgttaggatggggaattcacctgatcatcatgccaagataacctggattctaggaactaagctgattggaagtgtggatgtacacatagactactcaaatccgaattatagttgaggcaaaattggtgcatatatctttcttatataaagtcatgtagttgctcctaggtttctccagtttttttatgaaaaaaaaagaaatcctggattactcgaacatctcgtagcacaccttcgtaatgcaatatgttactcagctgacgaaatgttcaggtgtgtacagcgtgccatttgatatttttacttttgaagatgttgaggtatcatttgttcaggatggagacagtagcactggacctcatgccatctccagcaagccatgtaaatggccgtgcaaaatattgttttgcattgtagattgtactgtttgtagagtgaaattcggaatagtgagtgagatagag

SEQ ID NO: 79169 - DNA, 3148 bp, Zea Mays
ggtctctcctgtcggctgccaccgtcgccgagaacctttcttttttgtggattcctaccactcccccgacgaggcaagcagcaagcgttaattccattccttaattgccaatggcgaccgccttcgccagtacggccttgcggcgggcgccttgggataaactccacggcaaggaaggcatccgaagcctcgggggccttaatagcttcttcctcccgtggctgagactctggtcccgcgggctggtagggcatcggcatgggtggtcttgctgtctccgccttcgtgctgttttcttgggtgcttttcttgtcctgcatcttctcagtggatggactgtctaaagtgaggggtgttaacttgggaggatggttggtcattgaagggtggattaagccatcactttttgacgggattccaaatggggatatgctcgatgggacacaggtgcagatccgctcagtggtattaaacaagtatgttagtgcggccaatggtggtggctcaaatgtgacagtggaccgtgatgtggcctcaacgtgggagacattctgggtgagagtacatggaatgtattagtttgatttcaaagaaatattagtctgctgctttctgttttacaaggggctaattctctgcgttattacggcaaatgatagtatctcaaacgtattggtctgatttcaaagaagtatgaaatgtattggccttactgtttgttttagttaaactttacattagggtaaacctacaagaactgcttaagtacaggctaaattctagctatacctctcttgctatgaccttaagtatgttgtaatagactaccccttaattgcactccaagttatgccactgggtaaaatttctcagcttttgctatattgtttttctgacttagtttgaccagatatcatgaattgttattctttagttcttattaatcattatcattaaatcagtggccatggccactggtgtttcacattaggatatatatcacattacaagaaactaatgataatttaaaccgctgaaagtttaattgaacactgaattgcataggggaaggactgctggtacattttgtgttgtgtggtcaaaatgtttgtacactcaacagccatgcgcttccgaaacaattttaacgccaatttacatgtaggattgtcatgaacagatatgggacatctatagtttaacagttttttttccttaaatagttagaaatatgatcattatcattttattatcttttgcgatgtggttagtattgaagcaaccgcaagtcattgaattggtataatgctattatttacctgcaccttttggttttctaattgtcattcctcttagtattggttgagcttaagtatggccttagtggttttccttttaaaacagctttggagggtttcagataatgaatttcagcttcggtgccttggaggtcaatttttgacatcaaacagtgaagatggtttgatcttggctacttcaaagcatccattgtccactgaaactttctccattgaaaggaatgctagaagggttcatatcagacttctgaatggaggctatgtgcaagatgggataataatttagcgacatttgaattggtgatcgttgccaataacttgcatggggactaccagcttgccaatggttatggccctgacaaggcgaagatggtcttagaagagcacagaagaagtttcattacagcaaaggactttgatttcctgtctcgccacggaattaatactgtgagaattcctgtcggatggtggataacacaagatccttatccaccttctccatttgttggagggtctttggcagccctggacctagcattttcatgggcacagtatgccgtgcctccaaactcttctttgcagtatttaatatccctgacctttcctgatgctatatttacttctgttggattagatcttatggtttgaaatgtataatcgatcttcatgctgctcctggttctcaaaatggaatggaacatagtgcgagcagggatggttctgtggcctggccctctcctgaatatatctcacaaacattggaagtcattgacttcctggcgacaaggtatggaggccatccttcccttttgggtattgagcttctgaacgaaccttctgcagctacagttactttagatgttcttgtgtcctactatatgaggggataccaaattgtgcgaaaccattcgtcaactgcatatgttattctctgtcaaagaattgggaatgcagacccaattgaactgtttcaagctggtattggtctttcaaatgtcgtagttgatttacactactacaacttgttcaatccatactttgccaccatgaattccagtcagaatattgattttatttacaagatgagagcaccacagttacaagaccttaagggcatgaatgggcctcttgtcttcattggtgaatgggttaatgaatgggacgtgcaaaatgcatctcagtatgagtatcagaagtttggcagtgctcagttggatgtttatgccaacgctacctttgggtggtcgtactggacacttaagaatgacatgatccattgggacttcgagtggaatattaagaataagtacctattattcagtggttcatccatgctgaagacaccaagcttcctgctgctgctagcgttaggatggggaattcacctgatcatcatgccaagataacctggattctaggaactaagctgattggaagtgtggatgtacacatagactactcaaatccgaattatagttgaggcaaaattggtgcatatatctttcttatataaagtcatgtagttgctcctaggtttctccagtttttttatgaaaaaaaaagaaatcctggattactcgaacatctcgtagcacaccttcgtaatgcaatatgttactcagctgacgaaatgttcaggtgtgtacagcgtgccatttgatatttttacttttgaagatgttgaggtatcatttgttcaggatggagacagtagcactggacctcatgccatctccagcaagccatgtaaatggccgtgcaaaatattgttttgcattgtagattgtactgtttgtagagtgaaattcggaatagtgagtgagatagag

SEQ ID NO: 79170 - DNA, 2158 bp, Zea Mays
ggtctctcctgtcggctgccaccgtcgccgagaacctttcttttttgtggattcctaccactcccccgacgaggcaagcagcaagcgttaattccattccttaattgccaatggcgaccgccttcgccagtacggccttgcggcgggcgccttgggataaactccacggcaaggaaggcatccgaagcctcgggggccttaatagcttcttcctcccgtggctgagactctggtcccgcgggctggtagggcatcggcatgggtggtcttgctgtctccgccttcgtgctgttttcttgggtgcttttcttgtcctgcatcttctcagtggatggactgtctaaagtgaggggtgttaacttgggaggatggttggtcattgaagggtggattaagccatcactttttgacgggattccaaatggggatatgctcgatgggacacaggtgcagatccgctcagtggtattaaacaagtatgttagtgcggccaatggtggtggctcaaatgtgacagtggaccgtgatgtggcctcaacgtgggagacattctggctttggagggtttcagataatgaatttcagcttcggtgccttggaggtcaatttttgacatcaaacagtgaagatggtttgatcttggctacttcaaagcatccattgtccactgaaactttctccattgaaaggaatgctagaagggttcatatcagacttctgaatggaggctatgtgcaagcgacaaacgatcatctgcttatttccacttatcaattccaaccaggatgggataataatttagcgacatttgaattggtgatcgttgccaataacttgcatggggactaccagcttgccaatggttatggccctgacaaggcgaagatggtcttagaagagcacagaagaagtttcattacagcaaaggactttgatttcctgtctcgccacggaattaatactatcttatggtttgaaatgtataatcgatcttcatgctgctcctggttctcaaaatggaatggaacatagtgcgagcagggatggttctgtggcctggccctctcctgaatatatctcacaaacattggaagtcattgacttcctggcgacaaggtatggaggccatccttcccttttgggtattgagcttctgaacgaaccttctgcagctacagttactttagatgttcttgtgtcctactatatgaggggataccaaattgtgcgaaaccattcgtcaactgcatatgttattctctgtcaaagaattgggaatgcagacccaattgaactgtttcaagctggtattggtctttcaaatgtcgtagttgatttacactactacaacttgttcaatccatactttgccaccatgaattccagtcagaatattgattttatttacaagatgagagcaccacagttacaagaccttaagggcatgaatgggcctcttgtcttcattggtgaatgggttaatgaatgggacgtgcaaaatgcatctcagtatgagtatcagaagtttggcagtgctcagttggatgtttatgccaacgctacctttgggtggtcgtactggacacttaagaatgacatgatccattgggacttcgagtggaatattaagaataagtacctattattcagtggttcatccatgctgaagacaccaagcttcctgctgctgctagcgttaggatggggaattcacctgatcatcatgccaagataacctggattctaggaactaagctgattggaagtgtggatgtacacatagactactcaaatccgaattatagttgaggcaaaattggtgcatatatctttcttatataaagtcatgtagttgctcctaggtttctccagtttttttatgaaaaaaaaagaaatcctggattactcgaacatctcgtagcacaccttcgtaatgcaatatgttactcagctgacgaaatgttcaggtgtgtacagcgtgccatttgatatttttacttttgaagatgttgaggtatcatttgttcaggatggagacagtagcactggacctcatgccatctccagcaagccatgtaaatggccgtgcaaaatattgttttgcattgtagattgtactgtttgtagagtgaaattcggaatagtgagtgagatagag

SEQ ID NO: 79171 - DNA, 2291 bp, Zea Mays
ggtctctcctgtcggctgccaccgtcgccgagaacctttcttttttgtggattcctaccactcccccgacgaggcaagcagcaagcgttaattccattccttaattgccaatggcgaccgccttcgccagtacggccttgcggcgggcgccttgggataaactccacggcaaggaaggcatccgaagcctcgggggccttaatagcttcttcctcccgtggctgagactctggtcccgcgggctggtagggcatcggcatgggtggtcttgctgtctccgccttcgtgctgttttcttgggtgcttttcttgtcctgcatcttctcagtggatggactgtctaaagtgaggggtgttaacttgggaggatggttggtcattgaagggtggattaagccatcactttttgacgggattccaaatggggatatgctcgatgggacacaggtgcagatccgctcagtggtattaaacaagtatgttagtgcggccaatggtggtggctcaaatgtgacagtggaccgtgatgtggcctcaacgtgggagacattctggctttggagggtttcagataatgaatttcagcttcggtgccttggaggtcaatttttgacatcaaacagtgaagatggtttgatcttggctacttcaaagcatccattgtccactgaaactttctccattgaaaggaatgctagaagggttcatatcagacttctgaatggaggctatgtgcaagatgggataataatttagcgacatttgaattggtgatcgttgccaataacttgcatggggactaccagcttgccaatggttatggccctgacaaggcgaagatggtcttagaaaagaagtttcattacagcaaaggactttgatttcctgtctcgccacggaattaatactgtgagaattcctgtcggatggtggataacacaagatccttatccaccttctccatttgttggagggtctttggcagccctggacctagcattttcatgggcacagtatgccgtgcctccaaactcttctttgcagtatttaatatccctgacctttcctgatgctatatttacttctgttggattagatcttatggtttgaaatgtataatcgatcttcatgctgctcctggttctcaaaatggaatggaacatagtgcgagcagggatggttctgtggcctggccctctcctgaatatatctcacaaacattggaagtcattgacttcctggcgacaaggtatggaggccatccttcccttttgggtattgagcttctgaacgaaccttctgcagctacagttactttagatgttcttgtgtcctactatatgaggggataccaaattgtgcgaaaccattcgtcaactgcatatgttattctctgtcaaagaattgggaatgcagacccaattgaactgtttcaagctggtattggtctttcaaatgtcgtagttgatttacactactacaacttgttcaatccatactttgccaccatgaattccagtcagaatattgattttatttacaagatgagagcaccacagttacaagaccttaagggcatgaatgggcctcttgtcttcattggtgaatgggttaatgaatgggacgtgcaaaatgcatctcagtatgagtatcagaagtttggcagtgctcagttggatgtttatgccaacgctacctttgggtggtcgtactggacacttaagaatgacatgatccattgggacttcgagtggaatattaagaataagtacctattattcagtggttcatccatgctgaagacaccaagcttcctgctgctgctagcgttaggatggggaattcacctgatcatcatgccaagataacctggattctaggaactaagctgattggaagtgtggatgtacacatagactactcaaatccgaattatagttgaggcaaaattggtgcatatatctttcttatataaagtcatgtagttgctcctaggtttctccagtttttttatgaaaaaaaaagaaatcctggattactcgaacatctcgtagcacaccttcgtaatgcaatatgttactcagctgacgaaatgttcaggtgtgtacagcgtgccatttgatatttttacttttgaagatgttgaggtatcatttgttcaggatggagacagtagcactggacctcatgccatctccagcaagccatgtaaatggccgtgcaaaatattgttttgcattgtagattgtactgtttgtagagtgaaattcggaatagtgagtgagatagag

SEQ ID NO: 79172 - DNA, 2216 bp, Zea Mays
ggtctctcctgtcggctgccaccgtcgccgagaacctttcttttttgtggattcctaccactcccccgacgaggcaagcagcaagcgttaattccattccttaattgccaatggcgaccgccttcgccagtacggccttgcggcgggcgccttgggataaactccacggcaaggaaggcatccgaagcctcgggggccttaatagcttcttcctcccgtggctgagactctggtcccgcgggctggtagggcatcggcatgggtggtcttgctgtctccgccttcgtgctgttttcttgggtgcttttcttgtcctgcatcttctcagtggatggactgtctaaagtgaggggtgttaacttgggaggatggttggtcattgaagggtggattaagccatcactttttgacgggattccaaatggggatatgctcgatgggacacaggtgcagatccgctcagtggtattaaacaagtatgttagtgcggccaatggtggtggctcaaatgtgacagtggaccgtgatgtggcctcaacgtgggagacattctggctttggagggtttcagataatgaatttcagcttcggtgccttggaggtcaatttttgacatcaaacagtgaagatggtttgatcttggctacttcaaagcatccattgtccactgaaactttctccattgaaaggaatgctagaagggttcatatcagacttctgaatggaggctatgtgcaagatgggataataatttagcgacatttgaattggtgatcgttgccaataacttgcatggggactaccagcttgccaatggttatggccctgacaaggcgaagatggtcttagaagagcacagaagaagtttcattacagcaaaggactttgatttcctgtctcgccacggaattaatactgtgagaattcctgtcggatggtggataacacaagatccttatccaccttctccatttgttggagggtctttggcagccctggacctagcattttcatgggcacaatcttatggtttgaaatgtataatcgatcttcatgctgctcctggttctcaaaatggaatggaacatagtgcgagcagggatggttctgtggcctggccctctcctgaatatatctcacaaacattggaagtcattgacttcctggcgacaaggtatggaggccatccttcccttttgggtattgagcttctgaacgaaccttctgcagctacagttactttagatgttcttgtgtcctactatatgaggggataccaaattgtgcgaaaccattcgtcaactgcatatgttattctctgtcaaagaattgggaatgcagacccaattgaactgtttcaagctggtattggtctttcaaatgtcgtagttgatttacactactacaacttgttcaatccatactttgccaccatgaattccagtcagaatattgattttatttacaagatgagagcaccacagttacaagaccttaagggcatgaatgggcctcttgtcttcattggtgaatgggttaatgaatgggacgtgcaaaatgcatctcagtatgagtatcagaagtttggcagtgctcagttggatgtttatgccaacgctacctttgggtggtcgtactggacacttaagaatgacatgatccattgggacttcgagtggaatattaagaataagtacctattattcagtggttcatccatgctgaagacaccaagcttcctgctgctgctagcgttaggatggggaattcacctgatcatcatgccaagataacctggattctaggaactaagctgattggaagtgtggatgtacacatagactactcaaatccgaattatagttgaggcaaaattggtgcatatatctttcttatataaagtcatgtagttgctcctaggtttctccagtttttttatgaaaaaaaaagaaatcctggattactcgaacatctcgtagcacaccttcgtaatgcaatatgttactcagctgacgaaatgttcaggtgtgtacagcgtgccatttgatatttttacttttgaagatgttgaggtatcatttgttcaggatggagacagtagcactggacctcatgccatctccagcaagccatgtaaatggccgtgcaaaatattgttttgcattgtagattgtactgtttgtagagtgaaattcggaatagtgagtgagatagag

SEQ ID NO: 79173 - DNA, 697 bp, Zea Mays
gctcaccttcctcgctccccaccactccgtcccatccctcgcctgccttcgcacgggtgcgccgcccgttcgacggccacgccgcgccgcgccgctcagctgccccggcaccggcccttcctcgccgagctcgggatcgccgagcccggtgacctctcagccaagcgctccagacggttgcagtctccgcagtccgagcccacctgttccccattggctcagtgcgcccccccccatgggtcggttcaggtgtctcaggcatgcgtcgaggttccttgcgcttcagtcaggcgaggtggtcctgcagaggcgcgcatggattcagccgaacacatcttgcagttctactggcatctatattagcaataagttctatgatcgattcatgttgataccatttgtatggagccggagttttcatgctacagatcaccgttgttcgaaacacaaggactactacaaaattcttggtgttcccaaggatgcatcgcaggatgacatcaagaaggcatttcattctcttgcaaaaaagtatcatccagacacaaatagaggcaatactgctgcaaaaaggatgtttcaggaaataagagatgcatatgaggcaaacactacgggacccttcaaagagggagcaatatgacatgctattttctagagggtcaagggtggagtttgatgggtcctatcagacaga

SEQ ID NO: 79174 - DNA, 2874 bp, Zea Mays
cacctttctttttcacaagcacagggttggctaaccattccggatggaatacctctttgatgaaccctgcagccagaggcggatctctgttatgggccgctggggccatggccctactcgtgaggaaaaatatattaatacccttcttaattatttcggcccattattctatagcgtgcgtccgtaccgtcgtttgcccttccccatgccagttgatcgcgattagtttccgtccgccggcgacgccgccgtaaagcaaacgacgaagctgccagcctgctgcgtctggcgtctgcttcctgcttcctgcgtctggctattgctgcactgcacacgcagcacacccttcaggtcaggttcaacagattaagtaaagttagtttattttattgtctctcaattctacactcattttatttatttattgtagttgtagaaaatgaagagaagtagaacaatagcatcatattttactcaaccgatcactcctataatacaatccagtcaacctcctcatggaataaatttggaaccggtagtagagacggtagaaactgaagctcaacctagtaatgtgcagcaaactattcctagtgttgtacctaatcagaatggagttatagctgattctggcctttgagttccaattgaggatttggatccaaatattagggatgctataaaaagagagcatattttgatgggtccatgtcaaccaaaaggtcatagttatccacaaagaataatatgtgggcgcaatcgacgatttcagacagattggtttaataatcatgcatggttggagtacagtattgccaaggatgcagccttttgtttttattgctacctctttaagcaaccaagagctgaaaattatggtgttgattccttcacaaatgttgggttccgtggatggaaggatggtcgcaaattaattgagggacacgataaaggtgttgctcataataatgctagaagacattatgaagattacaaaaatcagaggcaaagtgtgccatatgctatgacatctggtgtcaataaggtggacaatgaatataaaagtcgtatgattgttatacttgaagttatcagatttcttttgcttcaggctcttgcatttcgcggacatgatgagtcctcttcctcgagcaacaagggaatttttttagagatgatagaatggtataagagcaaggataaaaatgttgcacatttgctccgtactaattaaatgacttcaccgtcaattcaaaaagacttgtgcaaagcttgtgctgatttaaccagcaaagctattattgaagatattggaggtagaaacttttcagttcttgttgatgaggcccgagatgcatctataaaggaacaaatggctgttatattgaggtatgttaatgcacgaggtcaagttattgaaagatttcttggtattgaagaggttgctgacacgacatcgtattctctaaagcaagctttggattctatgcttgcttttcatgggttgtcaatatccagattgcatggacaagggtatgatggggcatcaaatatgaggggagaatttcatggactgcaaagaagaatattagatgagaatccaaccttgtgcgacccggggatactcgatggggttcacatcataagaccttatgtcgtattcttcacatgtgggatgcaattctagaggtgttagagattgtatccgatgatgcctctagtggggaaaagaaatacacagcagctggattgttaaaacaaatggagagttttgagtttgttcttgtactgcatcttatgatcagactattgggcaaaactaatgatttgtcacagtgtttgcaaaagaaggatcaaaatattgttcgtgctatagggttgattgggacaacactgcagaaaatgaatgacatacgggagaatggttgggacgagttatttgtagaggtagaaaacttttgtcttctacatcacatcattgtgccaaagatggatgatacattaactgttcgaggtcgctcaagaggtcgtggtggatagttggtaacatattttcatcacttcaaaaatgaaatatttaatgttttccatgaccaaataattgtggaattaaataatcgttttgttgaaaggtccactcaactattgagatgcattgcttgtttagacccacggaattcttttgcaaactttgatgaagataaattaatagaacttgctcaaatttatgttgttgacttcacccaatatgattgcattgtccttcgcaaccaacttgagatgtttgttaatgatgcaagggcggatgcaagttttacatgttgcaatgaccttggagatcttgctataaagatggtgcagcctgatagacatacaacatttcctttggtctatcgtcttgttgagctggctttgattttgccggttactactgccacagttgaaagagctttctcagcgatgaaaattgtaaagactgatttgaggaataagacggggagtgactggctcaatcataggatggtatgatatattgaacgagacattttttcaagtattccaaatgataagattttataccattttcaagaaatgaagtcccgcatgaaaatgttgcctaaacaacatcaggctactagtgttaatggtctgcagtctgattcgattgttgatgcagaataaagaagctaagtggaacaaatacaataattcttcatcgattagtggttgatctagtagctaagaatcaagatctattcctacccacgaagaacctcaagttttcaataagcaaggcaagtggacttctccctctgcatactctgtttgatcccaaacaatacatttaataaagtttattctttgatatatata

SEQ ID NO: 79175 - DNA, 448 bp, Zea Mays
ccgccgtcaagttcctccctgaagctccccgcgcagcagcaaatcatctgctccctggatattttcagcgcttagcaatctttatctccagccgtgcgttcttcttctttgcgcagcaaatcctctgctctgctcccacggacggctccctcccatggcggcggctcgttccacctccctgcaccgcgccgtgaaggtctctgcctccctgctcggtttccggctccagctcgcgtcgagctcccttccctgcttcctgccgcgaagttccatggcgctcggcgtctagcttcctatgcgacggccgccggccatctccagctctcccttgcgcgcgcgtgctccctccctgcttctctccctcttctgctcggatccctgcttgtggagcttcattccgctcccagcttcctctgccggcgcccaagcttgtagttcttcaatccgc

SEQ ID NO: 79176 - DNA, 1237 bp, Zea Mays
ctaagatttgtgcatccttctctgttcggcctcggcaaaaactctggacgctcggaccccgccttgaccaagtcttccgttcctgccgtcgtaggttgtcatcgttcgccttcgcactgtgtgcgacagcatcatcgttttctctgtgtgctcgcgcagtttcctgttcgccagcgcgccctctcggctcgcttggccttaattctcgtcgcgtcgtcgattccgccggttagcgtcgttcgtcgtcgcgtcgcgtgtgtagctctatatatgccatcctcctatatcgtcgtcgaagctgtcatcccctagtcgaccccacctcaccagctcgctctaagcacgatctcgtcgtcgttccgcgtgtcagcaagaaatcccaagaatcgggtgaagacgaagccagcagtgtgatgttcaccaaatgcgtgacaaaaagctcgaacatcctgcgcgactcaagttcgactcgtcagaattattcagtcgaggaaaagatcttcagcaattgattaccgaagaaaagaagacctctggatggcatcaaccggaactatcgtcgtgcttgcgactatcgcgtcaaattagtcagggtaagttgattcgtattcccgttaactaggtctataaatagagtaaatagaattatttggtctcaataaatgttattaatttagcatgcgtatattgtgatgatcgatttagataaatcggtaactcaagtaattaagatacatagtttaaagagttaataaaaagctaggaataaaaatagatttctagtgtaatatgtcaatttggttaatggatgtagtcgatgctctgttgtgatatccatggtgcttaatgcttggttttaaagtgtttcatcctttttagtgtagattatctatattatactcgttatacatgtgctcatacatgtgcatcgtgcatctcatgaggtacgataaataatcgcgtgatgcggaagatgagccaagtcgaccccaagcacgggctactccgcgtggtgatgctgatggacctatgaaacaagtatcagaacaaaggatactcgtcaagcggacatcgcctaacaaacactaacctagtgttattcaggcaagccccggtgcatttgtcaccctccttgatgtttttaaaatctttctcacttgcttgatgcattaggtgacaggagttgattgataaaacaattcctgcattaccttccttgaatttgattaccttcctt

SEQ ID NO: 79177 - DNA, 2208 bp, Zea Mays
tcatgaagcatgcatgcatcgggacgatcgacgacgattatacagagaggcagctaccgactaccgtacggtcgagagagagatagcttagatcgatggaggcgaggaggagcagcgcggcgctcgtatccgtggccgccgccgccgccgccgtcgcgctgctgctggtgctcgccgccgagccgtcccgagcggagcggttcgtcgtcggcgacgcggcgcggtggacgtgggggtacaactacacggactgggtcatcaggaaggggcccttcttccagaacgacacccttgtgttcatgtacgacccgccgaacgcgacggtgcacgcgcacagcgtgtacctgatgcgcaccgccgcggactaccagtcgtgcaacctcaaggcggccaagctggtggccagcgtcacgcagggcgccggctccggcttcgagttcgtgctccggaagcgcaagcagcactacttcgtgtgcggcgagcgcggcggcatccactgcaccatgggccagatgaagttcgtcgtcaagcccaagagctctgcctgccgcgacgactgactgacacgccgccggacgccgatgtcggtgcgcgtacgtgtggcctcgatctcgtcctgtctttgttcgatctctgcatgccgccttctcagtcagatcattcctcctgtccaattgttgcgccctgcttgtaagttattattactatcagtcggtgtggatttactcagtgtgttgacgtatgattcgtgctgtctgatacaccagtgtttatggatgaaaaggttggttcaataaattagtgagtctttgtttctgaagtctcaagtgtcgttactcgttaagagctagtaatttcacaactccattttttcaagagatttttattttcctaggagaaaataaattaatttcctctcggaaaatagaaactgtcaaaagaagtcaggcacacttcctacaaatacaagtcgctagagaggactccctgaaaatggttgcgggtttcagccaaacttttttttagcagaaatggttctgctgaaggtcaccggacccagctgattctgaagtctgtttgccaaagcctaggcacgctctccgtcatcctgcactacctctacaatgacaactctcaagcaggtccatcgcttccactatccgtccatgtgacggcatcagctctacaccccttcttcatctccaaaacaagattcatgcccccatccacacttccatgcctgcagaggcagccgatcagcgcagtgtagtgtagctcacagcatctagcaccacaccagcattcctcatctcctgaaacaccgacctcgctgcctcaatgtctgctagtgcccattaaccagcgcgacataattgaaggcactgagctcacattcgttcttcctcaaaattccaaagattgtgcgagacttatccacctgccggagtctacagaacccaccgatgatcacattgtacagcagctgatcagggacaaatgcggtccttggcgataatctcctccaataagctcaaagccttccattatcttaccccccacggcagagcccaccgatcagtgtttaatatgtgaccaggctcggcgggtgtcctcgcgcatttcgtcgagcactttgaagacgggctccaactcgccgtttttggcacagtgcctgatgaggatgttgtagacgcatctcgcctgtgttcttggagcctgtcgagggcaccgtggcagcagccgcggaggagacgaggcggtcggtcgaggcagactgcgccttgtgtgacacgcggctcgtcagtcgtcactcgtacgaatcagcgcggcagcaagcggaggagggcgagcgcgtggtcgggcgggaggcggcggacgagcggaagcaactgcagctccaggaaccggcagggctcggaggcggcggcgcgcgaggcggacgaggagcgccgagaagatggccggcgtctgggagaagccgcgctgggaggaggccgcgttgaagaggtcgagcgcgcgctccggggagggggaggacgcgatgaggtgcgcaagttccgagtggtggaggtaccgcaatgttagcgtagtgggtactgggtagagaggaagaggattggagacgaagaaggcgaacgagatgcagagaagagagatagtatgtgacggaatcagctttctgttctttgttatcttcctcccgtatcg

SEQ ID NO: 79178 - DNA, 3890 bp, Zea Mays
aaaccattcatcaaactcacgccaggcagagaattaactaacatgctcacataatttttacagtcaccaaaaacaaaatcatttaaaaaaatacattcaacatgaacccaacaaagcttacatcaggcatcctattaacctgcaacttgcaagttcttagatacgagtagatggttcagttcgtccatattaacctggaagttcttctaagattcaaaaaaatacacaaatgtcacatatcagttctagagaaaaaagattgtcatattttttagacacactttttccctagaccgtagcatttcacaagacgtatggattaatgcatgccttagcattcagtgttttattcaacaataaaagaacatcgtaaatgttctgatagaattatgtcatgtttttttcagaaattattatgcgaacggccaaaaaattagaacctacttatacaagatctagtgaaattctagttgtgttgatgcatgctaccaacaatacatcttgcattcaatcggttccatcgagctgcccttggaagaggtgtgtcagatatgctgaaacaaaaacacagagaaagcatgcatcaaacttgcatatcatgcagcaagaatatatccaaaacagacatgaatttggatgcttccttctaaaaacatatgtatttctaaatggtaagcatgaatcatagacaagtgtgtacatccttacaacactgtaggcatatggtggtttcccttactggccaaaatgttttgccctgatggagaactctattgggtcccattcatctatttcaaaacaattgcctaatgtagccatataaagctgcagaccaccaaataaagttgtgtagaaaataaacaaaatagcacttccaaatctacaatcattgacaaaagctccttatatgtatttccatatcgaccataacacagctgaggagacttgttaattataccaaacaacatggaagaatggagagtgtattagagaacttgtgctttttattggccacccagaaacacactatttattctagagactggttcccttaaaaaacatttgggaggaaccttaaactggcggtatggggtagaaataatgaagcaccaaaacgaccacatgtttggagtatatggaaaatatatgggcatgtcagctcaatgggactatattgagcttttgatcaaggacatcgatacaatgtcagaacgcagtacaaaccagacagagtaagagtagtatgactcatattgtccaaaagttcatccgactatgattatgcagtagtaaacaaaccgcaccatgagctactgaggaaaatcaccaaaaatatcatagagaatgtaggataacatacatagatggttcaccggtagtgactctcagtttcaaatagaacagatattactcttaacagggattaaggcaaagatgatttaaacacatggaggcacttaagctaaaagttcaatagtacttaccccgacatggccagtagaagcatctacacctctacaggaaaacatcctccttgagagttccctttgaattattagttcaaatgacttatgattgtatagtataacaaattagactcaataaacagaaaggggatatatttaacatgaggacaaatcttcaatggtactcccttttaaccaaaaataataagcatattctcatcagggaaaaataataagattattctcatcagggaaaacaacaaaagttgtaattaccctgaatatacaggtcaagcttctccttctattatttccccttcacatcaatctattctagttctagaaaagaaaattggatgttgtataagcaagatataaatgggaataaaattagttaaaaatgataaaaaaacatagatgcaaaattaggaaactgcttgattgctagaaatacatgtaggggcctcccccaccattcacataaatatggtaaatatgctataaataaacaagaaagctggatttatatatttcaatggaatggtctgcaataacataaaaatgacctttgttggatttcccttccagttgatggagaacaatgttagatatgggaagtaagcttgatcctgtagaaagaaatagaaagtacatatgatccttcattgtttttacacagacgtaacaaaaaatgtatgctgaataaatacagacattgaaaatcatgatgactaaagatatatattaacaagattgcaatgcacacaataattgtacaaagcattaaaaaattaagcaccggaaagaaaatagtgttacagattcatgttcatacctctccacacctttgttgcagacacagaagagaagaaaaatctttgagaaaattagcatacaaagaaagtatcatctccaaacctagggaccaagctcggggaggttcggtagatcgtcgaagccggcggcgcaggcgcaacgactttctatcaaaactgtatactttttcccctaatgtttcttagtaatcaattcatacagatgatgaatattctagcttggggaattaaataaacacatggacttctctattgcctattgtgtttttagcacggtttttatttgatggtcttgtgtgcacttgaatggcaaatatttgcatcttgggtcatgagttcatctacatgagaattactgtgtatctctaaatggtatggttatggacacagattgttcaaaacagctccattgtcatgtttgtgggtctgtctcaatcgaagacacaatcagtcccctacctttcttgagaagattaatttttgaatatataacggtaaactaagtacttctgctaaagtttaagaaggaaatctcgcgtcactgaaggcgcctgactcaggtccaagctactgatggtgcgttcgaatctcccaaaaaaagagacagatcgacagaatacacaagcagaaaatcacatctgcggtggggtgctatgggggagcagtggtactcacgtagatccctagttgtagaggtcgaggaagacagtgacgcgctcgatgcctcggcctgggcaggagagcgaaaacttcttgtgcgcgacaacgacgacagtgatgagtttaaaaagttagtaccttcctaagaagaatagcaaaatcagcctatgctaggtaaataatgatttcagatagtgctagatatcaagaatgcaaaatgcagcatatgactgaatttgtggtcttagacctgtgcatggtgaattaggacttacaggccatctaaaatgcagcaaaatgcagaattgaactcctgctcttggtgacagacctacaagccatttaaaaggtgaggatcttggtatacagtatagtagacagtttttcctcatttcatcatcccatcaaacatgctaaaaaattcagaactactccattgtgaagaaacatttggattgtgatgtgttaccactgctaagtacatgttgaggactgaaaaacactacggagagagctggggtgcataatcttaagaaaggcaccataaaattgatacttcaatttcaatacaaaaatattggtactacctggttaacaggatcaaacatcagtaaacgatggaatagaagcatggcataaataatgcactcaggtcccaggttcccgcataaataaaccacgcttaatagggattgcccagtagtaaggagagctgttacacaaacctgcatataaaacattaaacctccattacatccaagtaactaaagttagcaagatacattcttaaattcttcgtatttagccactcacaagtgcattcatggcaccaaccttcttgtgatgttggaatccaagtcatttttcacgagacacagaaaccaaatgaggatgctgaagaaggcccaccaatacatttacctggcgt

SEQ ID NO: 79179 - DNA, 2472 bp, Zea Mays
gtgactgtgagaagaggaacccctccgccgcccccgaaaaaacatataaaacagaaccctcgcatcctgtaaatggcgacacgcctcgcctccatcttctctgccgtgcgcagccccacctcagccccgccccacactctccgccgcgctctcccaagcttcagctaccggcgagcgcatccatctcagccccgcatgtcctcctcttcagccgcctcctccgcgccgccggccgccgagaagcctacagtggcgccgttcgggtcctggaggtcgcccatcactgcggacgtcgtatctggcgcggataggcgcctcggcggtatcgctctcgctggagatggacgccttctctggatcgagggccgccccgaggagaaagggcgtatggttattgtaaaggaggaggataatcctgtggatgtcatacctcaggaatttgcagcacgcacactggctcaagaatatggaggtggtgcatttgcagtcgacaagagtgttgttgtgttctcaaattacaaggatcaacgtctatacaagcaaacaataggaactggtggtccacctgtgcctcttacacccgattatggtgcgccaaatgtcagttatgctgatggtgtatttgatcctcacttcgaccgttatgttactgtgatggaagatcgtcgaaaggatagcttgaatcccaccacaacaattgctgctataaacttgagtggcagtgatgttcatgcttacatatgctctatattgaagaaccaaaggtgctgatcagcggcaacgatttctatgcatttcctcgcattgatcaaaataaaaagcggatagcatggattgaatggagccatccaaacatgccctgggataaatcagaactctgggttggttacttcgccgaaagcggagacttgaccaaacgggtctgtattgccggtggcaatcggctgctgattgaatctcctagtgaacctaaatggtcaccgaaaggagaactgttttttgttactgacagagggagtggattttggaatatttataaatgggttgaacaaaccaatgaaattgttccagtgtattcactagatgctgaatttacgagaccattgtgggtttttggcatcagctcgtatgattttcttggaaacagcgaccacattgttttcagttataggttctatttcattgcttgacatccctttctctgatttatctgatgtggttgctgcagatgattacttctatattgaaggtgcttccgcgagtattccacggtcgattgctaaggtgacattaaatgaaagcaaaaccaaagtagtcaatttctcaatagcctggtcgtcctcaccagacctcgtacaatatagacctttcttcagcacaccagaacttgttgagttccctacatccaagtctggccagaaagcttatgcctatttctacccaccatcaaatcccaattttcaaggtttgcctgatgaaaagcctcctttgcttgtcaaaacacatggaggaccaactgctgaaacacgtgcaattctggacctcagtgtccagtattggacaagtagagggtgggcatatgtcgatgtcaactatggaggaagcactggttatggaagagagtatcgggagagactattgaacaaatggggtattgttgatgttgatgattgctgcggctgtgcgagattcctggtggagagtgggaaagtagatgggcagcgcctttgtattactggtagatcagcaggtggatacactactttagcttcacttgcattcagagacacgttcaaggctggagcttctctctatggtgttggggacttgactctgttgagagcggagacgcacaaatttgagtctcattatatggacaatcttgtaggaaatgaaagagcttactacgagagatcaccaatcaactttgtcaaccagtttacttgtccagtcattttgtttcaagggttggaggataaggttgtgccaccagatcaggcacgcaaaatatacagtgccttgaaagagaaaggtttgcctgttgctttggttgaatatgaaggagagcagcatgggttccgtaaggcggagaacatcaagttcaccttggagcagcagatgttgttctttgcaagattagttgggaagtttgaggtggcagatgatataactccaatcaagattgagaacttcgattgatctcttggagagtggtgtccggttcgaagttttgttcacgtaacccgattatatgttcagtacattagccgttgcagtaccttttaggaatacgacttcatcttatttttgagggttgatggaaatctcttttttgcgctgtaacgatgaagtcaccttgttttctgttcggttctagaatgaaatagaacggaatgacactatcctttatttggttgatgagtgaaaatagataatttcataactataatacattcatacaaccatatatat

SEQ ID NO: 79180 - DNA, 2249 bp, Zea Mays
aacccctccgccgcccccgaaaaaacatataaaacagaaccctcgcatcctgtaaatggcgacacgcctcgcctccatcttctctgccgtgcgcagccccacctcagccccgccccacactctccgccgcgctctcccaagcttcagctaccggcgagcgcatccatctcagccccgcatgtcctcctcttcagccgcctcctccgcgccgccggccgccgagaagcctacagtggcgccgttcgggtcctggaggtcgcccatcactgcggacgtcgtatctggcgcggataggcgcctcggcggtatcgctctcgctggagatggacgccttctctggatcgagggccgccccgaggagaaagggcgtatggttattgtaaaggaggaggataatcctgtggatgtcatacctcaggaatttgcagcacgcacactggctcaagaatatggaggtggtgcatttgcagtcgacaagagtgttgttgtgttctcaaattacaaggatcaacgtctatacaagcaaacaataggaactggtggtccacctgtgcctcttacacccgattatggtgcgccaaatgtcagttatgctgatggtgtatttgatcctcacttcgaccgttatgttactgtgatggaagatcgtcgaaaggatagcttgaatcccaccacaacaattgctgctataaacttgagtggcagtgatgttcatggtgctgatcagcggcaacgatttctatgcatttcctcgcattgatcaaaataaaaagcggatagcatggattgaatggagccatccaaacatgccctgggataaatcagaactctgggttggttacttcgccgaaagcggagacttgaccaaacgggtctgtattgccggtggcaatcggctgctgattgaatctcctagtgaacctaaatggtcaccgaaaggagaactgttttttgttactgacagagggagtggattttggaatatttataaatgggttgctgcagatgattacttctatattgaaggtgcttccgcgagtattccacggtcgattgctaaggtgacattaaatgaaagcaaaaccaaagtagtcaatttctcaatagcctggtcgtcctcaccagacctcgtacaatatagacctttcttcagcacaccagaacttgttgagttccctacatccaagtctggccagaaagcttatgcctatttctacccaccatcaaatcccaattttcaaggtttgcctgatgaaaagcctcctttgcttgtcaaaacacatggaggaccaactgctgaaacacgtgcaattctggacctcagtgtccagtattggacaagtagagggtgggcatatgtcgatgtcaactatggaggaagcactggttatggaagagagtatcgggagagactattgaacaaatggggtattgttgatgttgatgattgctgcggctgtgcgagattcctggtggagagtgggaaagtagatgggcagcgcctttgtattactggtagatcagcaggtggatacactactttagcttcacttgcattcagagacacgttcaaggctggagcttctctctatggtgttggggacttgactctgttgagagcggagacgcacaaatttgagtctcattatatggacaatcttgtaggaaatgaaagagcttactacgagagatcaccaatcaactttgtcaaccagtttacttgtccagtcattttgtttcaagggttggaggataaggttgtgccaccagatcaggcacgcaaaatatacagtgccttgaaagagaaaggtttgcctgttgctttggttgaatatgaaggagagcagcatgggttccgtaaggcggagaacatcaagttcaccttggagcagcagatgttgttctttgcaagattagttgggaagtttgaggtggcagatgatataactccaatcaagattgagaacttcgattgatctcttggagagtggtgtccggttcgaagttttgttcacgtaacccgattatatgttcagtacattagccgttgcagtaccttttaggaatacgacttcatcttatttttgagggttgatggaaatctcttttttgcgctgtaacgatgaagtcaccttgttttctgttcggttctagaatgaaatagaacggaatgacactatcctttatttggttgatgagtgaaaatagataatttcataactataatacattcatacaaccatatatat

SEQ ID NO: 79181 - DNA, 2424 bp, Zea Mays
aacccctccgccgcccccgaaaaaacatataaaacagaaccctcgcatcctgtaaatggcgacacgcctcgcctccatcttctctgccgtgcgcagccccacctcagccccgccccacactctccgccgcgctctcccaagcttcagctaccggcgagcgcatccatctcagccccgcatgtcctcctcttcagccgcctcctccgcgccgccggccgccgagaagcctacagtggcgccgttcgggtcctggaggtcgcccatcactgcggacgtcgtatctggcgcggataggcgcctcggcggtatcgctctcgctggagatggacgccttctctggatcgagggccgccccgaggagaaagggaatttgcagcacgcacactggctcaagaatatggaggtggtgcatttgcagtcgacaagagtgttgttgtgttctcaaattacaaggatcaacgtctatacaagcaaacaataggaactggtggtccacctgtgcctcttacacccgattatggtgcgccaaatgtcagttatgctgatggtgtatttgatcctcacttcgaccgttatgttactgtgatggaagatcgtcgaaaggatagcttgaatcccaccacaacaattgctgctataaacttgagtggcagtgatgttcatgaaccaaaggtgctgatcagcggcaacgatttctatgcatttcctcgcattgatcaaaataaaaagcggatagcatggattgaatggagccatccaaacatgccctgggataaatcagaactctgggttggttacttcgccgaaagcggagacttgaccaaacgggtctgtattgccggtggcaatcggctgctgattgaatctcctagtgaacctaaatggtcaccgaaaggagaactgttttttgttactgacagagggagtggattttggaatatttataaatgggttgaacaaaccaatgaaattgttccagtgtattcactagatgctgaatttacgagaccattgtgggtttttggcatcagctcgtatgattttcttggaaacagcgaccacattgttttcagttatagacagcaaggaaagtcacatcttggtgtgcttgattgtgattcaggttctatttcattgcttgacatccctttctctgatttatctgatgtggttgctgcagatgattacttctatattgaaggtgcttccgcgagtattccacggtcgattgctaaggtgacattaaatgaaagcaaaaccaaagtagtcaatttctcaatagcctggtcgtcctcaccagacctcgtacaatatagacctttcttcagcacaccagaacttgttgagttccctacatccaagtctggccagaaagcttatgcctatttctacccaccatcaaatcccaattttcaaggtttgcctgatgaaaagcctcctttgcttgtcaaaacacatggaggaccaactgctgaaacacgtgcaattctggacctcagtgtccagtattggacaagtagagggtgggcatatgtcgatgtcaactatggaggaagcactggttatggaagagagtatcgggagagactattgaacaaatggggtattgttgatgttgatgattgctgcggctgtgcgagattcctggtggagagtgggaaagtagatgggcagcgcctttgtattactggtagatcagcaggtggatacactactttagcttcacttgcattcagagacacgttcaaggctggagcttctctctatggtgttggggacttgactctgttgagagcggagacgcacaaatttgagtctcattatatggacaatcttgtaggaaatgaaagagcttactacgagagatcaccaatcaactttgtcaaccagtttacttgtccagtcattttgtttcaagggttggaggataaggttgtgccaccagatcaggcacgcaaaatatacagtgccttgaaagagaaaggtttgcctgttgctttggttgaatatgaaggagagcagcatgggttccgtaaggcggagaacatcaagttcaccttggagcagcagatgttgttctttgcaagattagttgggaagtttgaggtggcagatgatataactccaatcaagattgagaacttcgattgatctcttggagagtggtgtccggttcgaagttttgttcacgtaacccgattatatgttcagtacattagccgttgcagtaccttttaggaatacgacttcatcttatttttgagggttgatggaaatctcttttttgcgctgtaacgatgaagtcaccttgttttctgttcggttctagaatgaaatagaacggaatgacactatcctttatttggttgatgagtgaaaatagataatttcataactataatacattcatacaaccatatatat

SEQ ID NO: 79182 - DNA, 2472 bp, Zea Mays
aacccctccgccgcccccgaaaaaacatataaaacagaaccctcgcatcctgtaaatggcgacacgcctcgcctccatcttctctgccgtgcgcagccccacctcagccccgccccacactctccgccgcgctctcccaagcttcagctaccggcgagcgcatccatctcagccccgcatgtcctcctcttcagccgcctcctccgcgccgccggccgccgagaagcctacagtggcgccgttcgggtcctggaggtcgcccatcactgcggacgtcgtatctggcgcggataggcgcctcggcggtatcgctctcgctggagatggacgccttctctggatcgagggccgccccgaggagaaagggcgtatggttattgtaaaggaggaggataatcctgtggatgtcatacctcaggaatttgcagcacgcacactggctcaagaatatggaggtggtgcatttgcagtcgacaagagtgttgttgtgttctcaaattacaaggatcaacgtctatacaagcaaacaataggaactggtggtccacctgtgcctcttacacccgattatggtgcgccaaatgtcagttatgctgatggtgtatttgatcctcacttcgaccgttatgttactgtgatggaagatcgtcgaaaggatagcttgaatcccaccacaacaattgctgctataaacttgagtggcagtgatgttcatgaaccaaaggtgctgatcagcggcaacgatttctatgcatttcctcgcattgatcaaaataaaaagcggatagcatggattgaatggagccatccaaacatgccctgggataaatcagaactctgggttggttacttcgccgaaagcggagacttgaccaaacgggtctgtattgccggtggcaatcggctgctgattgaatctcctagtgaacctaaatggtcaccgaaaggagaactgttttttgttactgacagagggagtggattttggaatatttataaatgggttgaacaaaccaatgaaattgttccagtgtattcactagatgctgaatttacgagaccattgtgggtttttggcatcagctcgtatgattttcttggaaacagcgaccacattgttttcagttatagacagcaaggaaagtcacatcttggtgtgcttgattgtgattcaggttctatttcattgcttgacatccctttctctgatttatctgatgtggttgctgcagatgattacttctatattgaaggtgcttccgcgagtattccacggtcgattgctaaggtgacattaaatgaaagcaaaaccaaagtagtcaatttctcaatagcctggtcgtcctcaccagacctcgtacaatatagacctttcttcagcacaccagaacttgttgagttccctacatccaagtctggccagaaagcttatgcctatttctacccaccatcaaatcccaattttcaaggtttgcctgatgaaaagcctcctttgcttgtcaaaacacatggaggaccaactgctgaaacacgtgcaattctggacctcagtgtccagtattggacaagtagagggtgggcatatgtcgatgtcaactatggaggaagcactggttatggaagagagtatcgggagagactattgaacaaatggggtattgttgatgttgatgattgctgcggctgtgcgagattcctggtggagagtgggaaagtagatgggcagcgcctttgtattactggtagatcagcaggtggatacactactttagcttcacttgcattcagagacacgttcaaggctggagcttctctctatggtgttggggacttgactctgttgagagcggagacgcacaaatttgagtctcattatatggacaatcttgaaatgaaagagcttactacgagagatcaccaatcaactttgtcaaccagtttacttgtccagtcattttgtttcaagggttggaggataaggttgtgccaccagatcaggcacgcaaaatatacagtgccttgaaagagaaaggtttgcctgttgctttggttgaatatgaaggagagcagcatgggttccgtaaggcggagaacatcaagttcaccttggagcagcagatgttgttctttgcaagattagttgggaagtttgaggtggcagatgatataactccaatcaagattgagaacttcgattgatctcttggagagtggtgtccggttcgaagttttgttcacgtaacccgattatatgttcagtacattagccgttgcagtaccttttaggaatacgacttcatcttatttttgagggttgatggaaatctcttttttgcgctgtaacgatgaagtcaccttgttttctgttcggttctagaatgaaatagaacggaatgacactatcctttatttggttgatgagtgaaaatagataatttcataactataatacattcatacaaccatatatat

SEQ ID NO: 79183 - DNA, 1779 bp, Zea Mays
gcctccagcatgtcgtcgtcgacaagcatgtggcgtgagatcctgctccggttggcgctgagtattcgacatagacttgaccaaacgggtctgtattgccggtggcaatcggctgctgattgaatctcctagtgaacctaaatggtcaccgaaaggagaactgttttttgttactgacagagggagtggattttggaatatttataaatgggttgaacaaaccaatgaaattgttccagtgtattcactagatgctgaatttacgagaccattgtgggtttttggcatcagctcgtatgattttcttggaaacagcgaccacattgttttcagttataggtatcgataatattgaagaaaaaaaatctatgttgcttttgtttgtgagacatcttcaattcttcatggaccatcatgataactatgccttgcagacagcaaggaaagtcacatcttggtgtgcttgattgtgattcaggttctatttcattgcttgacatccctttctctgatttatctgatgtggttgctgcagatgattacttctatattgaaggtgcttccgcgagtattccacggtcgattgctaaggtgacattaaatgaaagcaaaaccaaagtagtcaatttctcaatagcctggtcgtcctcaccagacctcgtacaatatagacctttcttcagcacaccagaacttgttgagttccctacatccaagtctggccagaaagcttatgcctatttctacccaccatcaaatcccaattttcaaggtttgcctgatgaaaagcctcctttgcttgtcaaaacacatggaggaccaactgctgaaacacgtgcaattctggacctcagtgtccagtattggacaagtagagggtgggcatatgtcgatgtcaactatggaggaagcactggttatggaagagagtatcgggagagactattgaacaaatggggtattgttgatgttgatgattgctgcggctgtgcgagattcctggtggagagtgggaaagtagatgggcagcgcctttgtattactggtagatcagcaggtggatacactactttagcttcacttgcattcagagacacgttcaaggctggagcttctctctatggtgttggggacttgactctgttgagagcggagacgcacaaatttgagtctcattatatggacaatcttgtaggaaatgaaagagcttactacgagagatcaccaatcaactttgtcaaccagtttacttgtccagtcattttgtttcaagggttggaggataaggttgtgccaccagatcaggcacgcaaaatatacagtgccttgaaagagaaaggtttgcctgttgctttggttgaatatgaaggagagcagcatgggttccgtaaggcggagaacatcaagttcaccttggagcagcagatgttgttctttgcaagattagttgggaagtttgaggtggcagatgatataactccaatcaagattgagaacttcgattgatctcttggagagtggtgtccggttcgaagttttgttcacgtaacccgattatatgttcagtacattagccgttgcagtaccttttaggaatacgacttcatcttatttttgagggttgatggaaatctcttttttgcgctgtaacgatgaagtcaccttgttttctgttcggttctagaatgaaatagaacggaatgacactatcctttatttggttgatgagtgaaaatagataatttcataactataatacattcatacaaccatatatat

SEQ ID NO: 79184 - DNA, 1739 bp, Zea Mays
acaaggcgtgcgacatggtggccatggtcctgtatgtgtcgtaggtgttcagacacgtcaagatgacctcaaagcgtgccgctcggtgccaccatccgtcctcgaagctgccaagatggtggcaaatagacttgaccaaacgggtctgtattgccggtggcaatcggctgctgattgaatctcctagtgaacctaaatggtcaccgaaaggagaactgttttttgttactgacagagggagtggattttggaatatttataaatgggttgaacaaaccaatgaaattgttccagtgtattcactagatgctgaatttacgagaccattgtgggtttttggcatcagctcgtatgattttcttggaaacagcgaccacattgttttcagttatagacagcaaggaaagtcacatcttggtgtgcttgattgtgattcaggttctatttcattgcttgacatccctttctctgatttatctgatgtggttgctgcagatgattacttctatattgaaggtgcttccgcgagtattccacggtcgattgctaaggtgacattaaatgaaagcaaaaccaaagtagtcaatttctcaatagcctggtcgtcctcaccagacctcgtacaatatagacctttcttcagcacaccagaacttgttgagttccctacatccaagtctggccagaaagcttatgcctatttctacccaccatcaaatcccaattttcaaggtttgcctgatgaaaagcctcctttgcttgtcaaaacacatggaggaccaactgctgaaacacgtgcaattctggacctcagtgtccagtattggacaagtagagggtgggcatatgtcgatgtcaactatggaggaagcactggttatggaagagagtatcgggagagactattgaacaaatggggtattgttgatgttgatgattgctgcggctgtgcgagattcctggtggagagtgggaaagtagatgggcagcgcctttgtattactggtagatcagcaggtggatacactactttagcttcacttgcattcagagacacgttcaaggctggagcttctctctatggtgttggggacttgactctgttgagagcggagacgcacaaatttgagtctcattatatggacaatcttgtaggaaatgaaagagcttactacgagagatcaccaatcaactttgtcaaccagtttacttgtccagtcattttgtttcaagggttggaggataaggttgtgccaccagatcaggcacgcaaaatatacagtgccttgaaagagaaaggtttgcctgttgctttggttgaatatgaaggagagcagcatgggttccgtaaggcggagaacatcaagttcaccttggagcagcagatgttgttctttgcaagattagttgggaagtttgaggtggcagatgatataactccaatcaagattgagaacttcgattgatctcttggagagtggtgtccggttcgaagttttgttcacgtaacccgattatatgttcagtacattagccgttgcagtaccttttaggaatacgacttcatcttatttttgagggttgatggaaatctcttttttgcgctgtaacgatgaagtcaccttgttttctgttcggttctagaatgaaatagaacggaatgacactatcctttatttggttgatgagtgaaaatagataatttcataactataatacattcatacaaccatatatat

SEQ ID NO: 79185 - DNA, 1670 bp, Zea Mays
gtcaagatgacctcaaagcgtgccgctcggtgccaccatccgtcctcgaagctgccaagatggtggcaaatagacttgaccaaacgggtctgtattgccggtggcaatcggctgctgattgaatctcctagtgaacctaaatggtcaccgaaaggagaactgttttttgttactgacagagggagtggattttggaatatttataaatgggttgaacaaaccaatgaaattgttccagtgtattcactagatgctgaatttacgagaccattgtgggtttttggcatcagctcgtatgattttcttggaaacagcgaccacattgttttcagttatagacagcaaggaaagtcacatcttggtgtgcttgattgtgattcaggttctatttcattgcttgacatccctttctctgatttatctgatgtggttgctgcagatgattacttctatattgaaggtgcttccgcgagtattccacggtcgattgctaaggtgacattaaatgaaagcaaaaccaaagtagtcaatttctcaatagcctggtcgtcctcaccagacctcgtacaatatagacctttcttcagcacaccagaacttgttgagttccctacatccaagtctggccagaaagcttatgcctatttctacccaccatcaaatcccaattttcaaggtttgcctgatgaaaagcctcctttgcttgtcaaaacacatggaggaccaactgctgaaacacgtgcaattctggacctcagtgtccagtattggacaagtagagggtgggcatatgtcgatgtcaactatggaggaagcactggttatggaagagagtatcgggagagactattgaacaaatggggtattgttgatgttgatgattgctgcggctgtgcgagattcctggtggagagtgggaaagtagatgggcagcgcctttgtattactggtagatcagcaggtggatacactactttagcttcacttgcattcagagacacgttcaaggctggagcttctctctatggtgttggggacttgactctgttgagagcggagacgcacaaatttgagtctcattatatggacaatcttgtaggaaatgaaagagcttactacgagagatcaccaatcaactttgtcaaccagtttacttgtccagtcattttgtttcaagggttggaggataagatcaggcacgcaaaatatacagtgccttgaaagagaaaggtttgcctgttgctttggttgaatatgaaggagagcagcatgggttccgtaaggcggagaacatcaagttcaccttggagcagcagatgttgttctttgcaagattagttgggaagtttgaggtggcagatgatataactccaatcaagattgagaacttcgattgatctcttggagagtggtgtccggttcgaagttttgttcacgtaacccgattatatgttcagtacattagccgttgcagtaccttttaggaatacgacttcatcttatttttgagggttgatggaaatctcttttttgcgctgtaacgatgaagtcaccttgttttctgttcggttctagaatgaaatagaacggaatgacactatcctttatttggttgatgagtgaaaatagataatttcataactataatacattcatacaaccatatatat

SEQ ID NO: 79186 - DNA, 1702 bp, Zea Mays
accatatccacctaatccatatggtattccttttcacggactggattgggtaatgagtgagtggactgggtggtttagaaacccatgcacaggctagcgattatgtgccactgttattttaagcttacatcatgagacttgaccaaacgggtctgtattgccggtggcaatcggctgctgattgaatctcctagtgaacctaaatggtcaccgaaaggagaactgttttttgttactgacagagggagtggattttggaatatttataaatgggttgaacaaaccaatgaaattgttccagtgtattcactagatgctgaatttacgagaccattgtgggtttttggcatcagctcgtatgattttcttggaaacagcgaccacattgttttcagttataggttctatttcattgcttgacatccctttctctgatttatctgatgtggttgctgcagatgattacttctatattgaaggtgcttccgcgagtattccacggtcgattgctaaggtgacattaaatgaaagcaaaaccaaagtagtcaatttctcaatagcctggtcgtcctcaccagacctcgtacaatatagacctttcttcagcacaccagaacttgttgagttccctacatccaagtctggccagaaagcttatgcctatttctacccaccatcaaatcccaattttcaaggtttgcctgatgaaaagcctcctttgcttgtcaaaacacatggaggaccaactgctgaaacacgtgcaattctggacctcagtgtccagtattggacaagtagagggtgggcatatgtcgatgtcaactatggaggaagcactggttatggaagagagtatcgggagagactattgaacaaatggggtattgttgatgttgatgattgctgcggctgtgcgagattcctggtggagagtgggaaagtagatgggcagcgcctttgtattactggtagatcagcaggtggatacactactttagcttcacttgcattcagagacacgttcaaggctggagcttctctctatggtgttggggacttgactctgttgagagcggagacgcacaaatttgagtctcattatatggacaatcttgtaggaaatgaaagagcttactacgagagatcaccaatcaactttgtcaaccagtttacttgtccagtcattttgtttcaagggttggaggataaggttgtgccaccagatcaggcacgcaaaatatacagtgccttgaaagagaaaggtttgcctgttgctttggttgaatatgaaggagagcagcatgggttccgtaaggcggagaacatcaagttcaccttggagcagcagatgttgttctttgcaagattagttgggaagtttgaggtggcagatgatataactccaatcaagattgagaacttcgattgatctcttggagagtggtgtccggttcgaagttttgttcacgtaacccgattatatgttcagtacattagccgttgcagtaccttttaggaatacgacttcatcttatttttgagggttgatggaaatctcttttttgcgctgtaacgatgaagtcaccttgttttctgttcggttctagaatgaaatagaacggaatgacactatcctttatttggttgatgagtgaaaatagataatttcataactataatacattcatacaaccatatatat

SEQ ID NO: 79187 - DNA, 2717 bp, Zea Mays
actgcgcgtgtgcgccactacaccaaccgtttggtccgccgttcggggattccttccgcactactacatagtagcacccgtgtggccgtgtccgagctacccacgcccccaacgccaagaacgtcgacgggcacgacggcatggcggcggcggacccggacaccgaagtgcaggcggagttcccacccctcgtccgccagtacaaaagcggccggcaccgacccggccacgggcgtcgtgtccaaggacgtcgtcgtcgacccggccaccggcctctgggcgcgcctcttcctccccgccggcagccacgggaagaagctccccgtcgtcgtctactaccatggcggcgcctacgtgatcggctcggcggccgacccgatgacgcacggctacctcaacgcgctcgtcgccaaggccggcgtcctcgcggtcgcgctcgagtaccgcctcgcgccggagcacccgctcccggccgcctacgaggactcatgggagggactcaagtgggtggccacccacgcctccgcctccgccgccgcgggaggaggaccggccgccgagccgtggctaaccgagcacggcgacttctcccgcgtgttcctggccggggccagcgcgggggccaccatcgctcacttcgtagcagtccgtgccggtgagcagcacaagagcggcggcctcgggatgcggatcagggggctgctgatagtgcacccctacttcagcggcgcggcggacatcggcgacgaggggacgacggggaaggcgcgcaaggcgcgggccgacgcgttctggcggttcctgtgccctggcacccccgggctcgacgaccctctctccaacccgttctcggaggccgccggcgggagcgcggcgcgcgtcgccgccgagcgcgtgctcgtctgcgtcgccgagaaggacgacctcagggacaggggcgtctggtactacgagagcctcaaggccagcggctaccctggcgaggtggagctgctcgagtccatgggcgagggccacgtcttctactgcatgaacccgcgctgcgacagggcgcgggagatggaggagcgcgtcctcggcttcctgcgcaagtgagcgagcgacggagcgcgcgccttgctacgcgattgagatggaataatttcaccgtttccagatgtggaggcgtttgagcatgaggccatgagggtcttatttgtttgcttaagatcaattgattgaagtttcgaaatctatctcaccgcacttgtcatgtgtctaaatttaaaagaaatgaaaacgaacccataccgtctcccgaattgcaaatttgtaacctgttttacttgtttgttttagatttttgctagcttcttacagcgacagaaataaccaggctatttgttcggctagttttgagaaaataaactaataacgtgttcaggtaatacaaaaaactagccaaaaactaaaagtaggatgccagattaagtttaaaccaaaagaccgaatgctccgaatcaaacgccctacatttacagttcgagcatccgacagaagtacagaacgaatatattatttcgggatcgggaatcgaacaactttcggtgtactattacaattgaagtatccaaatgatatatttaaaatagcataaaaaactcttattcatcatctcggtggtgctcatttgttgatgaaagccacgatccgctcctggagctggacgccctgctccgagtccagcatgtcgaaatggaacgcgtggccgacgcccttagactcgaacagctcgacctcgccagcgtacccgctggccttgatctcccggtggtaccacagcgcgcgctccttgagcaggaagtcgttctcggccacgcacaccagcacgcgctggcacgggatccccgcggaggccctgcgcgccgcgtcgtccacgaacgggttcacgcgcgggtcgtccagccccaccgtgtcggagaccacgaaccgccaggtgcggtccatgaacggccggatctcggggccgaaggctatctcgccgcccacggcctcgctgcccgtgaagtaggggtgcaccacggcgagcccgcggatggtcacgccgtcggggagcgcgccggcggcggaggcccgcacggccgtgttgtgcgcgatgttggcgccggcgctgcagcccgccaggaacacgcgggacaggtcggcgtgctccagcagccacgggtcctcgccgccgccgagcgtcgccgcccaccgtagcgccgcccacgcgtcgtcgtacgccgcgggcagcttgtgctccggcgcgaggcggtagtagacggacacgccgatggcgcccgagcgggcgaccaggtcgttgaggtagttgtgcgtgcccggccgcgccggcgagccgaccacgaacccgccgccgtggaagtagacgaccaccgggatcttgccggctgcgccgggagggaggtagactcgcgcggaggcggggccggcgcggatgtccttggacacgacgccggtggctgggtccgtgccagctgggacggtgggggcgccgccggggcggtggatgcggccgctcttgtactggcagaggtagggcgggaagtcgaagacgacctcggagtcgggatccatggctgcggtcggcgaggaggggttggtggcggtggagtcgcccatttgggttgggggaggaaacgagctggctacctagcagtgcaacacagcgaggcgatcga

SEQ ID NO: 79188 - DNA, 1411 bp, Zea Mays
cgccgtttgtgttggcccgatggggaagtacatgaggaagcgcaagcgcaacgtggggaggacgacgccggccgcggagcacggcgtgaggacgcgtgcccaatccgacgccgtcgcgagcacagcttctgcggcggcggcggcggcgcccaagaggccgaggaagcagacgacggcggcagtgactgggaacaccagcggggcagcggcgccagggtcctgctacctgcacctgcggaccaggaggctgcagttcctgcccgggggtgagggcgaggtgcagcgtccggtgccgccgttgcctgcggcggcggcacagcggtcgtcgtctgtagcttccggggagccggtggagggtgccgggagctcgaggtgctccagcacggcgtcgtcttcggtggacgtcgtcgtcctggcggtggcaccggctagcgagaggggcggcggtgaagcggaggaggcacgcaacgacgacgacgactactgcggcgacgtcgagagcgtcgtcagcgactcggccgagtgctgccgccgcgacaggaggagggagacgacgccgtcgagccaggcacgggtagatcgtccctgcagcgacgaggagtgcagccaggccgcagacggcccaacgcgccaccgtcggcgacggaaggctttggcggccaccgcgacagccgcggtcgcttgcagagcgagggcgacgccaccggcagaagagatcgagcagttcttcgcggccgcggagaaggcccaggccgagcgcttcgcagccaagtacaatttcgacgtcgcacgcgggctgccgctcggcgccggccggtacgaatggaccccggtagccagcggttggtgacgacgcacgtgcgcgtgcgcgccggccggaaagctagcggcggtggcgcagaagaatgagtagctaggaggaaggagacgccactgggaaagtgggacgagcgtacagacgataaaaggactgaaggagagcagagacagagcattttcacagcagtagctgtagctccccccctgttttgttcagaattctgctggtgagtgtaactcctgcttctgcacagccggcattcaatatgtccagtacagttccacatcagctgacgccgccacgacagttttaccacaccgtcaccttgtttttgctgacaacgcctcggtacctcgcagtctttttgttgctttcctaccaactctctgtctctcaagcaaacgaaaccgctgctgggcataataaggtcagtaccgactggcgcctccaacatcagtcgggttggctgatcagtctacggcctgccgtccgaccgtgtacgaaataattcgtattttaatgggtgcaaaaaaaactagagacatatcttagtgaaataacctgtctagcacggttcgtgtttgggttgag

SEQ ID NO: 79189 - DNA, 1763 bp, Zea Mays
aaaatgggcgctcgagtaatcctcgaaaaagaaaacaaaatccgcaacaaaccaaacgcgttcccgtctggccgtcgccgtctcctccacccctcacctccttctctcaaccagaacaaccaagtgaaaccgcgcaaacccttgctccgatccccctctcctcggtctcctcgacggaagtagtagagcaggggccgaggccatgtggcccggctgcggtgggcggttctactgggcgccggaatcggcgccgccggggcaagcgaggggtgtcgcggtcttgttcgcgtgggtgtggagcgacgaggcgcagctgcggccgttcgttgagctgtactcctcgctcgggtggcgctgcctcgtctgccaccccgacctcgtcgcgctatatctctctgagaaagcaacatctctggcaactggtgttattagtgagctggttaaggaactgagagtaaaacctgtgccaactgttcttgcttccttttctggtggctcaaaagggtgcatgtacaaggttattcagttactagctggaatatgtgaaggagatgcaaccatgaaggattatcggttagtgagaaactgtatctgcgggcaaatttatgactctagccctgtagattttgtcagtgatgtgggcacccagtttctccaaaagcctgctgttggaaatttatctcagtcaactatattacgttcatggatggcaaaggttctagcttctggcatggatactctcttcccaagcaggattgaagctcagcgtgcagagtactggcacacactatactcagcagcaggattgggtcctgttcttatattttgctcagaagatgataatcttgctccatgccatattatctgtggctttgcaaggcgattgattgaactaggcacagatgttaaacttatgaaatggagcgactcccaacatgccattacaattcacatgaaattgaatacaggaaagctgtagatgatacgttgaagaaggctcttgttaccttctgccaccgaagccaactatatgactcaaatatggctggtgaccaggagtataagatagcgcactcagtgtgcagtctacacaatgctgcagccaattcaaatgagagcttaagaagggttgctaacagtcctagtgatcacttcttcttgccaagttcgaaggaccatgatgaatctcgggaacccagttctctaattgaggatcagaggcgccacatctcacatccaccctgcatggagcctaaaggagtccttggccaaatcctgtttgatgtttgtgttccaaataatgttgaaggatgggacattaagccgacagtgtccccgaatggacggccaacgtttgcttctgcccggcaacttggtccattcaatcccataaggtacttccggcgctcaagactgtagttttctgcaggagttgaggtttttgtatatatataaccgaggcaaggtggctagtagcaactctgagcaagattttacctatgtaagttccctgtaattgtttctgtttctgcttttgcaccgcttggcgagagaatgcacatatgctttgtatatcatatgagtgtgtgtactagaagggagatcctggacatatagtttctaggcgggttgcaaggtgcacgctaacattgtagccaaggggaatggattattatgttcctgtagtttcctctatatttcatgtttgtgaaatataattattgggaaaaaaaaacttatcttcatttttagcgatcatagtt

SEQ ID NO: 79190 - DNA, 1745 bp, Zea Mays
gagtaatcctcgaaaaagaaaacaaaatccgcaacaaaccaaacgcgttcccgtctggccgtcgccgtctcctccacccctcacctccttctctcaaccagaacaaccaagtgaaaccgcgcaaacccttgctccgatccccctctcctcggtctcctcgacggaagtagtagagcaggggccgaggccatgtggcccggctgcggtgggcggttctactgggcgccggaatcggcgccgccggggcaagcgaggggtgtcgcggtcttgttcgcgtgggtgtggagcgacgaggcgcagctgcggccgttcgttgagctgtactcctcgctcgggtggcgctgcctcgtctgccaccccgacctcgtcgcgctatatctctctgagaaagcaacatctctggcaactggtgttattagtgagctggttaaggaactgagagtaaaacctgtgccaactgttcttgcttccttttctggtggctcaaaagggtgcatgtacaagttactagctggaatatgtgaaggagatgcaaccatgaaggattatcggttagtgagaaactgtatctgcgggcaaatttatgactctagccctgtagattttgtcagtgatgtgggcacccagtttctccaaaagcctgctgttggaaatttatctcagtcaactatattacgttcatggatggcaaaggttctagcttctggcatggatactctcttcccaagcaggattgaagctcagcgtgcagagtactggcacacactatactcagcagcaggattgggtcctgttcttatattttgctcagaagatgataatcttgctccatgccatattatctgtggctttgcaaggcgattgattgaactaggcacagatgttaaacttatgaaatggagcgactcccaacatgtcggccattacaattcacatgaaattgaatacaggaaagctgtagatgatacgttgaagaaggctcttgttaccttctgccaccgaagccaactatatgactcaaatatggctggtgaccaggagtataagatagcgcactcagtgtgcagtctacacaatgctgcagccaattcaaatgagagcttaagaagggttgctaacagtcctagtgatcacttcttcttgccaagttcgaaggaccatgatgaatctcgggaacccagttctctaattgaggatcagaggcgccacatctcacatccaccctgcatggagcctaaaggagtccttggccaaatcctgtttgatgtttgtgttccaaataatgttgaaggatgggacattaagccgacagtgtccccgaatggacggccaacgtttgcttctgcccggcaacttggtccattcaatcccataaggtacttccggcgctcaagactgtagttttctgcaggagttgaggtttttgtatatatataaccgaggcaaggtggctagtagcaactctgagcaagattttacctatgtaagttccctgtaattgtttctgtttctgcttttgcaccgcttggcgagagaatgcacatatgctttgtatatcatatgagtgtgtgtactagaagggagatcctggacatatagtttctaggcgggttgcaaggtgcacgctaacattgtagccaaggggaatggattattatgttcctgtagtttcctctatatttcatgtttgtgaaatataattattgggaaaaaaaaacttatcttcatttttagcgatcatagtt

SEQ ID NO: 79191 - DNA, 1769 bp, Zea Mays
gagtaatcctcgaaaaagaaaacaaaatccgcaacaaaccaaacgcgttcccgtctggccgtcgccgtctcctccacccctcacctccttctctcaaccagaacaaccaagtgaaaccgcgcaaacccttgctccgatccccctctcctcggtctcctcgacggaagtagtagagcaggggccgaggccatgtggcccggctgcggtgggcggttctactgggcgccggaatcggcgccgccggggcaagcgaggggtgtcgcggtcttgttcgcgtgggtgtggagcgacgaggcgcagctgcggccgttcgttgagctgtactcctcgctcgggtggcgctgcctcgtctgccaccccgacctcgtcgcgctatatctctctgagaaagcaacatctctggcaactggtgttattagtgagctggttaaggaactgagagtaaaacctgtgccaactgttcttgcttccttttctggtggctcaaaagggtgcatgtacaaggttattcaggtgcatgagttataattactagctggaatatgtgaaggagatgcaaccatgaaggattatcggttagtgagaaactgtatctgcgggcaaatttatgactctagccctgtagattttgtcagtgatgtgggcacccagtttctccaaaagcctgctgttggaaatttatctcagtcaactatattacgttcatggatggcaaaggttctagcttctggcatggatactctcttcccaagcaggattgaagctcagcgtgcagagtactggcacacactatactcagcagcaggattgggtcctgttcttatattttgctcagaagatgataatcttgctccatgccatattatctgtggctttgcaaggcgattgattgaactaggcacagatgttaaacttatgaaatggagcgactcccaacatgtcggccattacaattcacatgaaattgaatacaggaaagctgtagatgatacgttgaagaaggctcttgttaccttctgccaccgaagccaactatatgactcaaatatggctggtgaccaggagtataagatagcgcactcagtgtgcagtctacacaatgctgcagccaattcaaatgagagcttaagaagggttgctaacagtcctagtgatcacttcttcttgccaagttcgaaggaccatgatgaatctcgggaacccagttctctaattgaggatcagaggcgccacatctcacatccaccctgcatggagcctaaaggagtccttggccaaatcctgtttgatgtttgtgttccaaataatgttgaaggatgggacattaagccgacagtgtccccgaatggacggccaacgtttgcttctgcccggcaacttggtccattcaatcccataaggtacttccggcgctcaagactgtagttttctgcaggagttgaggtttttgtatatatataaccgaggcaaggtggctagtagcaactctgagcaagattttacctatgtaagttccctgtaattgtttctgtttctgcttttgcaccgcttggcgagagaatgcacatatgctttgtatatcatatgagtgtgtgtactagaagggagatcctggacatatagtttctaggcgggttgcaaggtgcacgctaacattgtagccaaggggaatggattattatgttcctgtagtttcctctatatttcatgtttgtgaaatataattattgggaaaaaaaaacttatcttcatttttagcgatcatagtt

SEQ ID NO: 79192 - DNA, 1402 bp, Zea Mays
atcggcagcatttaattcacagatatctctctgagaaagcaacatctctggcaactggtgttattagtgagctggttaaggaactgagagtaaaacctgtgccaactgttcttgcttccttttctggtggctcaaaagggtgcatgtacaaggttattcagttactagctggaatatgtgaaggagatgcaaccatgaaggattatcggttagtgagaaactgtatctgcgggcaaatttatgactctagccctgtagattttgtcagtgatgtgggcacccagtttctccaaaagcctgctgttggaaatttatctcagtcaactatattacgttcatggatggcaaaggttctagcttctggcatggatactctcttcccaagcaggattgaagctcagcgtgcagagtactggcacacactatactcagcagcaggattgggtcctgttcttatattttgctcagaagatgataatcttgctccatgccatattatctgtggctttgcaaggcgattgattgaactaggcacagatgttaaacttatgaaatggagcgactcccaacatgtcggccattacaattcacatgaaattgaatacaggaaagctgtagatgatacgttgaagaaggctcttgttaccttctgccaccgaagccaactatatgactcaaatatggctggtgaccaggagtataagatagcgcactcagtgtgcagtctacacaatgctgcagccaattcaaatgagagcttaagaagggttgctaacagtcctagtgatcacttcttcttgccaagttcgaaggaccatgatgaatctcgggaacccagttctctaattgaggatcagaggcgccacatctcacatccaccctgcatggagcctaaaggagtccttggccaaatcctgtttgatgtttgtgttccaaataatgttgaaggatgggacattaagccgacagtgtccccgaatggacggccaacgtttgcttctgcccggcaacttggtccattcaatcccataaggtacttccggcgctcaagactgtagttttctgcaggagttgaggtttttgtatatatataaccgaggcaaggtggctagtagcaactctgagcaagattttacctatgtaagttccctgtaattgtttctgtttctgcttttgcaccgcttggcgagagaatgcacatatgctttgtatatcatatgagtgtgtgtactagaagggagatcctggacatatagtttctaggcgggttgcaaggtgcacgctaacattgtagccaaggggaatggattattatgttcctgtagtttcctctatatttcatgtttgtgaaatataattattgggaaaaaaaaacttatcttcatttttagcgatcatagtt

SEQ ID NO: 79193 - DNA, 1349 bp, Zea Mays
cattcattgatttcaacatacatttctatcaataaaagtaggcaaagacattgtaacctatgaacaaatcttaatattttgaactatattcaggacacgtggagactaagtaacaaggtaacagtgtatcagtggtcatatggattagaaggattatcggttagtgagaaactgtatctgcgggcaaatttatgactctagccctgtagattttgtcagtgatgtgggcacccagtttctccaaaagcctgctgttggaaatttatctcagtcaactatattacgttcatggatggcaaaggttctagcttctggcatggatactctcttcccaagcaggattgaagctcagcgtgcagagtactggcacacactatactcagcagcaggattgggtcctgttcttatattttgctcagaagatgataatcttgctccatgccatattatctgtggctttgcaaggcgattgattgaactaggcacagatgttaaacttatgaaatggagcgactcccaacatgccattacaattcacatgaaattgaatacaggaaagctgtagatgatacgttgaagaaggctcttgttaccttctgccaccgaagccaactatatgactcaaatatggctggtgaccaggagtataagatagcgcactcagtgtgcagtctacacaatgctgcagccaattcaaatgagagcttaagaagggttgctaacagtcctagtgatcacttcttcttgccaagttcgaaggaccatgatgaatctcgggaacccagttctctaattgaggatcagaggcgccacatctcacatccaccctgcatggagcctaaaggagtccttggccaaatcctgtttgatgtttgtgttccaaataatgttgaaggatgggacattaagccgacagtgtccccgaatggacggccaacgtttgcttctgcccggcaacttggtccattcaatcccataaggtacttccggcgctcaagactgtagttttctgcaggagttgaggtttttgtatatatataaccgaggcaaggtggctagtagcaactctgagcaagattttacctatgtaagttccctgtaattgtttctgtttctgcttttgcaccgcttggcgagagaatgcacatatgctttgtatatcatatgagtgtgtgtactagaagggagatcctggacatatagtttctaggcgggttgcaaggtgcacgctaacattgtagccaaggggaatggattattatgttcctgtagtttcctctatatttcatgtttgtgaaatataattattgggaaaaaaaaacttatcttcatttttagcgatcatagtt

SEQ ID NO: 79194 - DNA, 1751 bp, Zea Mays
gccgcaatccgcaactctgcacttggggttgggctcaaccgaatcgcccccgcgccaggccgttctcgtcgacgccgccgaccaataaggagcctcgcacgccacgccaccaccgccgccgcaacccacgcgatggcgccaccggactccatctccacgtgctcctcccttcccctcgccgctgcgcccatgtccgaaccgacccccttccccttcgctgcgtcgccgcttccaaacccgctcgtagccaccgcctccttcctacagcaccacctctcccgtttggcttcccacctgaacgtcccgcgccccgccctcgctgccgcggctgcgcgcacgccgggcccccagggcgcctccctatctctctctctcgcgcccgatgaggtcgcgcgcgctcttaccggcactcccgtcttcactgtctgcaactccagcaacgagttcgtgcttgtctccgaccctgccaccggcctccgctccctcggcctcctctgcttccgttcggaggacgccgacgccctcctgtcgcatgtgaggacgcggcaaccggtgctaggcaagggggcaaaagtggtgcctattacacttgatcaggtctatatgttaaaggctgaaggtatcgcatttaggttcttacccgaccctcttcaaataaagaatgcactggagatgaaatcgggcttaactgcttttgatggtgttcctgtttttcagtcagatctgctggttgtgaagaagcagaagaagcgctactgtccagtatattttcaaaaggaagacatagaaagagaacttacaagggcttccaaaggttcaagagggttggaagtttggaggatgtcctgaagaaaatggagataaatgaaagagattctggctgggatgatttgatctttataccccctgggaagagcctcaaccaacatatcaatgaggtatcagcatgattttgttccacggtgatagctcagagtttgaacagactattcactttaaatgctatgatggtcagccaaacgaaatatcaaattgctgcctgagcttttcctttggatagctattttcatggtcagctttgtcagggaaaattaactaaagtgatagaatatggctgtgaaacaattttcttgttgcttcgattcacaaaattaacacaggttacacaagaagatttgatgaagagtaagttgcgacattggtaaatcaccttgcaatatagtttcatgaaaggggttatacaatagaaaaagagacgaatgtttatggccctattcggatgcatagtatataccatgattttttaaatattttggttttcgaatgctaaggtgtttggacgtcacaaccttgtagttttgaaaaccatgcttttgctaaaactatagtcgtcttgtttttttagaagcttagcttcgtgcttaaactgttgtgtttgtaacctccgtttttggtatgagtgatatatttgtattcccaaaaatttgaatttcactgctttggccgatatttgtcacgaggatctagatctggatccaaaagcaaacacaaccctttgctgggttggttccttggttcctcgtgtgcattgagtgcaatttatgtttgtggtacggaagaatgaacgggaaatacgagcagcacagatttcatgacttcttggcagtcactctacgttgttttacacactttccgatctttagaagagtccagagacaactggaagtcaacatacagaatttcttgggcca

SEQ ID NO: 79195 - DNA, 1554 bp, Zea Mays
gccgcaatccgcaactctgcacttggggttgggctcaaccgaatcgcccccgcgccaggccgttctcgtcgacgccgccgaccaataaggagcctcgcacgccacgccaccaccgccgccgcaacccacgcgatggcgccaccggactccatctccacgtgctcctcccttcccctcgccgctgcgcccatgtccgaaccgacccccttccccttcgctgcgtcgccgcttccaaacccgctcgtagccaccgcctccttcctacagcaccacctctcccgtttggcttcccacctgaacgtcccgcgccccgccctcgctgccgcggctgcgcgcacgccgggcccccagggcgcctccctatctctctctctcgcgcccgatgaggtcgcgcgcgctcttaccggcactcccgtcttcactgtctgcaactccagcaacgagttcgtgcttgtctccgaccctgccaccggcctccgctccctcggcctcctctgcttccgttcggaggacgccgacgccctcctgtcgcatgtgaggacgcggcaaccggtgctaggcaagggggcaaaagtggtgcctattacacttgatcaggtctatatgttaaaggctgaaggtatcgcatttaggttcttacccgaccctcttcaaataaagaatgcactggagatgaaatcgggcttaactgcttttgatggtgttcctgtttttcagtcagatctgctggttgtgaagaagcagaagaagcgctactgtccagtatattttcaaaaggaagacatagaaagagaacttacaagggcttccaaaggttcaagagggtcagccttatctaagaaaattatggttggaagtttggaggatgtcctgaagaaaatggagataaatgaaagagattctggctgggatgatttgatctttataccccctgggaagagcctcaaccaacatatcaatgaggttacacaagaagatttgatgaagagtaagttgcgacattggtaaatcaccttgcaatatagtttcatgaaaggggttatacaatagaaaaagagacgaatgtttatggccctattcggatgcatagtatataccatgattttttaaatattttggttttcgaatgctaaggtgtttggacgtcacaaccttgtagttttgaaaaccatgcttttgctaaaactatagtcgtcttgtttttttagaagcttagcttcgtgcttaaactgttgtgtttgtaacctccgtttttggtatgagtgatatatttgtattcccaaaaatttgaatttcactgctttggccgatatttgtcacgaggatctagatctggatccaaaagcaaacacaaccctttgctgggttggttccttggttcctcgtgtgcattgagtgcaatttatgtttgtggtacggaagaatgaacgggaaatacgagcagcacagatttcatgacttcttggcagtcactctacgttgttttacacactttccgatctttagaagagtccagagacaactggaagtcaacatacagaatttcttgggcca

SEQ ID NO: 79196 - DNA, 1786 bp, Zea Mays
gccgcaatccgcaactctgcacttggggttgggctcaaccgaatcgcccccgcgccaggccgttctcgtcgacgccgccgaccaataaggagcctcgcacgccacgccaccaccgccgccgcaacccacgcgatggcgccaccggactccatctccacgtgctcctcccttcccctcgccgctgcgcccatgtccgaaccgacccccttccccttcgctgcgtcgccgcttccaaacccgctcgtagccaccgcctccttcctacagcaccacctctcccgtttggcttcccacctgaacgtcccgcgccccgccctcgctgccgcggctgcgcgcacgccgggcccccagggcgcctccctatctctctctctcgcgcccgatgaggtcgcgcgcgctcttaccggcactcccgtcttcactgtctgcaactccagcaacgagttcgtgcttgtctccgaccctgccaccggcctccgctccctcggcctcctctgcttccgttcggaggacgccgacgccctcctgtcgcatgtgaggacgcggcaaccggtgctaggcaagggggcaaaagtggtgcctattacacttgatcaggtctatatgttaaaggctgaaggtatcgcatttaggttcttacccgaccctcttcaaataaagaatgcactggagatgaaatcgggcttaactgcttttgatggtgttcctgtttttcagtgctgtgcagtcagatctgctggttgtgaagaagcagaagaagcgctactgtccagtatattttcaaaaggaagacatagaaagagaacttacaagggcttccaaaggttcaagagggtcagccttatctaagaaaattatggttggaagtttggaggatgtcctgaagaaaatggagataaatgaaagagattctggctgggatgatttgatctttataccccctgggaagagcctcaaccaacatatcaatgaggtatcagcatgattttgttccacggtgatagctcagagtttgaacagactattcactttaaatgctatgatggtcagccaaacgaaatatcaaattgctgcctgagcttttcctttggatagctattttcatggtcagctttgtcagggaaaattaactaaagtgatagaatatggctgtgaaacaattttcttgttgcttcgattcacaaaattaacacaggttacacaagaagatttgatgaagagtaagttgcgacattggtaaatcaccttgcaatatagtttcatgaaaggggttatacaatagaaaaagagacgaatgtttatggccctattcggatgcatagtatataccatgattttttaaatattttggttttcgaatgctaaggtgtttggacgtcacaaccttgtagttttgaaaaccatgcttttgctaaaactatagtcgtcttgtttttttagaagcttagcttcgtgcttaaactgttgtgtttgtaacctccgtttttggtatgagtgatatatttgtattcccaaaaatttgaatttcactgctttggccgatatttgtcacgaggatctagatctggatccaaaagcaaacacaaccctttgctgggttggttccttggttcctcgtgtgcattgagtgcaatttatgtttgtggtacggaagaatgaacgggaaatacgagcagcacagatttcatgacttcttggcagtcactctacgttgttttacacactttccgatctttagaagagtccagagacaactggaagtcaacatacagaatttcttgggcca

SEQ ID NO: 79197 - DNA, 1219 bp, Zea Mays
caaaaaactaccaagataaagtgaaaattcatacaaaccacaatgaatcaaactgcacttgttgcattagtgtagataaagtaattgccaagctgattagagtttcatacattgtacactccagcttcagcttcagcagaatggtgtctatctttttctgtcagatctgctggttgtgaagaagcagaagaagcgctactgtccagtatattttcaaaaggaagacatagaaagagaacttacaagggcttccaaaggttcaagagggtcagccttatctaagaaaattatggttggaagtttggaggatgtcctgaagaaaatggagataaatgaaagagattctggctgggatgatttgatctttataccccctgggaagagcctcaaccaacatatcaatgaggtatcagcatgattttgttccacggtgatagctcagagtttgaacagactattcactttaaatgctatgatggtcagccaaacgaaatatcaaattgctgcctgagcttttcctttggatagctattttcatggtcagctttgtcagggaaaattaactaaagtgatagaatatggctgtgaaacaattttcttgttgcttcgattcacaaaattaacacaggttacacaagaagatttgatgaagagtaagttgcgacattggtaaatcaccttgcaatatagtttcatgaaaggggttatacaatagaaaaagagacgaatgtttatggccctattcggatgcatagtatataccatgattttttaaatattttggttttcgaatgctaaggtgtttggacgtcacaaccttgtagttttgaaaaccatgcttttgctaaaactatagtcgtcttgtttttttagaagcttagcttcgtgcttaaactgttgtgtttgtaacctccgtttttggtatgagtgatatatttgtattcccaaaaatttgaatttcactgctttggccgatatttgtcacgaggatctagatctggatccaaaagcaaacacaaccctttgctgggttggttccttggttcctcgtgtgcattgagtgcaatttatgtttgtggtacggaagaatgaacgggaaatacgagcagcacagatttcatgacttcttggcagtcactctacgttgttttacacactttccgatctttagaagagtccagagacaactggaagtcaacatacagaatttcttgggcca

SEQ ID NO: 79198 - DNA, 2912 bp, Zea Mays
atgccgtgtcagtcgagtcccaggcttgcaccatgggacccgccatgcatcaccacgaggacgtcagccacgaaccactgcagggataagaacaacaagtggcatggagcgctacttcacgcaaccagaagaagggggtccgggcaacagatgaaagacttcttctctctctctgaagaaggaacaatgactgggtgggctgccgctgccgacgcaacctacgccgcagccctagccagagccgaggccttcatcggtatcttctccggcgacgagcacccacaggtggatgtctcctacaaagagaagaggacttggtcgccgtggtcatggtcgtggaaggggtgccacggcagaaaaggatatggatcatctcgatatctctgtaccttcttcaccaagtactacctctgacagagaagatcagcctctgttgattccaagacaatccccagcttgctatgtaggaccgtcagaagtatccaccatgttactgaaccctaagatcaaccatcgttccgatgcgatttttggtgatcaggctgtggagcagctgaagttacgtcatcacaagcctctgaaatttcatgagagatatcgtccttacctgagagatgcaggtttgcttgggctctcacaaatttgccagaagatgcctcagttggacaaagcattgataactgcccttgttgagcgttggaggccagagacccatagcttccatttggcatctggggagataactgttacacttcaagatgttgcaatgttgtttgctcttcctattgatggtcgtccggtttgttctaccactgatcatgattatgcgcaagtggtccttgattgtttaggcctggatgcaaggggtccagcaatgcctggaaagtctttcctgcattacaaatggcttaagaaacacttttatgaattaccagaggaggtggatgatatgacagttgaaaggcatgttcgggcatatatactgagccttttatgtggggtgctctttccagatgggacaggaaggatgagtctgatatatcttcctctgatcgctgatctttcacgtgttagcacatacagctgggcttctgcagttctggcattcctgtaccgatctctttgctcggttgcctcctcccacaatatcaagaatattggtggttcattgcttctcttgcagctttggagttgggagcgctttcatgttggcagaccattggttcggtcacctttatgcacagagatgggcattgaacatgacttacctccaatcggcttccgttgggtggggtcacgcacacaaagtgagagtgctaatcgctgccttaagcagtacagagatgaactgaacgttcagcgagttgatcaggtgaagtgggaaccctacctgcaggtagagtcctcaaccttacccccactttgtacaagagacgcagacctgtggcttacacaagctccattaataaacttccctatagttgaaatgtatttgcccgagcgagtgatgcggcaatttgggcttcggcagtgcattccaccacctttccggcctacactacagtcgttacatcgtatcagtagacgtggcaaagaacgagagaactgggaagaaacacaccatgagtatatccaggaatgggaagcacgacgacagcgcatatttcgagatacagagcaatatgatccatcttcttatgaggagtatctgcgctggtactcaggagcaacacggcggtaccttgtcccagcaaccagtgacgacggtgaagcgggaccttcagctccaactgacgatttctcagatcttcagtaccaagccaaatctccaataatccgcaaagcagttgataaactggaaagcatggttaagaaagccaagagagccatgacaaccacagctgatacaaccactcaagccttggttgctgagtttctgcttggctttgaggatgtgttacaagatcttggcgagatccagaataatagtggttcaactgttccaccttttcacttggatagtccacattttgatgctgccgcaagtcaacagacacctcaacttttgcttgaagctgaggaaaatttaggtaccaaccaagaagcacaactagaggaagatgaagaacttaacacagtggagcgtgcttcattggcactggagactgtggaagaggaaaacgacttctccaacgacgtgctccctggaaatctttcactgggcgtggaggaagactgtgattcagccacaccagccaatgggatttgtgatgcagccactcccatgaccgatttggttgttcctcggtcagatgagggtctccatcaagatcaacatctagaagaccacaccgaaattgagccggctacattgatggtggagcctaagtgtgaggagggcgatggttccagcttcgtgctcccaccaagccctccagaactgatgctcgaggaacaggacgattcagggttaatagctctaggtactggatcatgtaccgaacagcagagccttggagtaggagaggctgaggatcaggaaaaccctcgcacaggcacagctcagcatggcatcatgatagtggagcgtacgggtgaggaaaacagcagttgcaatggcgtttattcttcctgcccaccgtcatctgtcattgttgaatcgagcagtgattatctgtgttagttatgtagggagtagaagctttttttatatttaaagatctgacatgagattgttagttcctttgttgctggtggcatggggtttgattctgtaacttgtttcgtcgtgattgtcttgataatatgagggtcttgaaaaccgggggccgttatacgccgacccagttggagtgtaatcctcagcgttccgttatacagcctcgtttgtctcctgcctgcaccgaggtaat

SEQ ID NO: 79199 - DNA, 2839 bp, Zea Mays
atgccgtgtcagtcgagtcccaggcttgcaccatgggacccgccatgcatcaccacgaggacgtcagccacgaaccactgcagggataagaacaacaagtggcatggagcgctacttcacgcaaccagaagaagggggtccgggcaacagatgaaagacttcttctctctctctgaagaaggaacaatgactgggtgggctgccgctgccgacgcaacctacgccgcagccctagccagagccgaggccttcatcggtatcttctccggcgacgagcacccacagtgctatgtaaaggtggatgtctcctacaaagagaagaggacttggtcgccgtggtcatggtcgtggaaggggtgccacggcagaaaaggatatggatcatctcgatatctctgtaccttcttcaccaagtactacctctgacagagaagatcagcctctgttgattccaagacaatccccagcttgctatgtaggaccgtcagaagtatccaccatgttactgaaccctaagatcaaccatcgttccgatgcgatttttggtgatcaggctgtggagcagctgaagttacgtcatcacaagcctctgaaatttcatgagagatatcgtccttacctgagagatgcaggtttgcttgggctctcacaaatttgccagaagatgcctcagttggacaaagcattgataactgcccttgttgagcgttggaggccagagacccatagcttccatttggcatctggggagataactgttacacttcaagatgttgcaatgttgtttgctcttcctattgatggtcgtccggtttgttctaccactgatcatgattatgcgcaagtggtccttgattgtttaggcctggatgcaaggggtccagcaatgcctggaaagtctttcctgcattacaaatggcttaagaaacacttttatgaattaccagaggaggtggatgatatgacagttgaaaggcatgttcgggcatatatactgagccttttatgtggggtgctctttccagatgggacaggaaggatgagtctgatatatcttcctctgatcgctgatctttcacgtgttagcacatacagctgggcttctgcagttctggcattcctgtaccgatctctttgctcggttgcctcctcccacaatatcaagaatattggtggttcattgcttctcttgcagctttggagttgggagcgctttcatgttggcagaccattggttcggtcacctttatgcacagagatgggcattgaacatgacttacctccaatcggcttccgttgggtggggtcacgcacacaaagtgagagtgctaatcgctgccttaagcagtacagagatgaactgaacgttcagcgagttgatcaggtgaagtgggaaccctacctgcagttgaaatgtatttgcccgagcgagtgatgcggcaatttgggcttcggcagtgcattccaccacctttccggcctacactacagtcgttacatcgtatcagtagacgtggcaaagaacgagagaactgggaagaaacacaccatgagtatatccaggaatgggaagcacgacgacagcgcatatttcgagatacagagcaatatgatccatcttcttatgaggagtatctgcgctggtactcaggagcaacacggcggtaccttgtcccagcaaccagtgacgacggtgaagcgggaccttcagctccaactgacgatttctcagatcttcagtaccaagccaaatctccaataatccgcaaagcagttgataaactggaaagcatggttaagaaagccaagagagccatgacaaccacagctgatacaaccactcaagccttggttgctgagtttctgcttggctttgaggatgtgttacaagatcttggcgagatccagaataatagtggttcaactgttccaccttttcacttggatagtccacattttgatgctgccgcaagtcaacagacacctcaacttttgcttgaagctgaggaaaatttaggtaccaaccaagaagcacaactagaggaagatgaagaacttaacacagtggagcgtgcttcattggcactggagactgtggaagaggaaaacgacttctccaacgacgtgctccctggaaatctttcactgggcgtggaggaagactgtgattcagccacaccagccaatgggatttgtgatgcagccactcccatgaccgatttggttgttcctcggtcagatgagggtctccatcaagatcaacatctagaagaccacaccgaaattgagccggctacattgatggtggagcctaagtgtgaggagggcgatggttccagcttcgtgctcccaccaagccctccagaactgatgctcgaggaacaggacgattcagggttaatagctctaggtactggatcatgtaccgaacagcagagccttggagtaggagaggctgaggatcaggaaaaccctcgcacaggcacagctcagcatggcatcatgatagtggagcgtacgggtgaggaaaacagcagttgcaatggcgtttattcttcctgcccaccgtcatctgtcattgttgaatcgagcagtgattatctgtgttagttatgtagggagtagaagctttttttatatttaaagatctgacatgagattgttagttcctttgttgctggtggcatggggtttgattctgtaacttgtttcgtcgtgattgtcttgataatatgagggtcttgaaaaccgggggccgttatacgccgacccagttggagtgtaatcctcagcgttccgttatacagcctcgtttgtctcctgcctgcaccgaggtaat

SEQ ID NO: 79200 - DNA, 2897 bp, Zea Mays
cccaaaccctaacttaaatcaatttggctatttgatgcatactagcttcgaacattttgcaaaaattatcggctgttcatgtgttcatcgatgtccctttactgggtctacccctggtgctagtagttccagtagcagctgctagccgcttctgtttacagtatttgtttcgatgaacacgtgaaagataatttgagaagtaaccctgtggatgaacactcgaacaattgctaagcgacagttccttcacaagctaagtgctatgtaaaggtggatgtctcctacaaagagaagaggacttggtcgccgtggtcatggtcgtggaaggggtgccacggcagaaaaggatatggatcatctcgatatctctgtaccttcttcaccaagtactacctctgacagagaagatcagcctctgttgattccaagacaatccccagcttgctatgtaggaccgtcagaagtatccaccatgttactgaaccctaagatcaaccatcgttccgatgcgatttttggtgatcaggctgtggagcagctgaagttacgtcatcacaagcctctgaaatttcatgagagatatcgtccttacctgagagatgcaggtttgcttgggctctcacaaatttgccagaagatgcctcagttggacaaagcattgataactgcccttgttgagcgttggaggccagagacccatagcttccatttggcatctggggagataactgttacacttcaagatgttgcaatgttgtttgctcttcctattgatggtcgtccggtttgttctaccactgatcatgattatgcgcaagtggtccttgattgtttaggcctggatgcaaggggtccagcaatgcctggaaagtctttcctgcattacaaatggcttaagaaacacttttatgaattaccagaggaggtggatgatatgacagttgaaaggcatgttcgggcatatatactgagccttttatgtggggtgctctttccagatgggacaggaaggatgagtctgatatatcttcctctgatcgctgatctttcacgtgttagcacatacagctgggcttctgcagttctggcattcctgtaccgatctctttgctcggttgcctcctcccacaatatcaagaatattggtggttcattgcttctcttgcagctttggagttgggagcgctttcatgttggcagaccattggttcggtcacctttatgcacagagatgggcattgaacatgacttacctccaatcggcttccgttgggtggggtcacgcacacaaagtgagagtgctaatcgctgccttaagcagtacagagatgaactgaacgttcagcgagttgatcaggtgaagtgggaaccctacctgcaggtagagtcctcaaccttacccccactttgtacaagagacgcagacctgtggcttacacaagctccattaataaacttccctatagttgaaatgtatttgcccgagcgagtgatgcggcaatttgggcttcggcagtgcattccaccacctttccggcctacactacagtcgttacatcgtatcagtagacgtggcaaagaacgagagaactgggaagaaacacaccatgagtatatccaggaatgggaagcacgacgacagcgcatatttcgagatacagagcaatatgatccatcttcttatgaggagtatctgcgctggtactcaggagcaacacggcggtaccttgtcccagcaaccagtgacgacggtgaagcgggaccttcagctccaactgacgatttctcagatcttcagtaccaagccaaatctccaataatccgcaaagcagttgataaactggaaagcatggttaagaaagccaagagagccatgacaaccacagctgatacaaccactcaagccttggttgctgagtttctgcttggctttgaggatgtgttacaagatcttggcgagatccagaataatagtggttcaactgttccaccttttcacttggatagtccacattttgatgctgccgcaagtcaacagacacctcaacttttgcttgaagctgaggaaaatttaggtaccaaccaagaagcacaactagaggaagatgaagaacttaacacagtggagcgtgcttcattggcactggagactgtggaagaggaaaacgacttctccaacgacgtgctccctggaaatctttcactgggcgtggaggaagactgtgattcagccacaccagccaatgggatttgtgatgcagccactcccatgaccgatttggttgttcctcggtcagatgagggtctccatcaagatcaacatctagaagaccacaccgaaattgagccggctacattgatggtggagcctaagtgtgaggagggcgatggttccagcttcgtgctcccaccaagccctccagaactgatgctcgaggaacaggacgattcagggttaatagctctaggtactggatcatgtaccgaacagcagagccttggagtaggagaggctgaggatcaggaaaaccctcgcacaggcacagctcagcatggcatcatgatagtggagcgtacgggtgaggaaaacagcagttgcaatggcgtttattcttcctgcccaccgtcatctgtcattgttgaatcgagcagtgattatctgtgttagttatgtagggagtagaagctttttttatatttaaagatctgacatgagattgttagttcctttgttgctggtggcatggggtttgattctgtaacttgtttcgtcgtgattgtcttgataatatgagggtcttgaaaaccgggggccgttatacgccgacccagttggagtgtaatcctcagcgttccgttatacagcctcgtttgtctcctgcctgcaccgaggtaat

SEQ ID NO: 79201 - DNA, 2711 bp, Zea Mays
tggagacgtgtctgcaatggttctatgttttattggattgatgtttggatttgtagcacctgagttcattagtgctatgtaaaggtggatgtctcctacaaagagaagaggacttggtcgccgtggtcatggtcgtggaaggggtgccacggcagaaaaggatatggatcatctcgatatctctgtaccttcttcaccaagtactacctctgacagagaagatcagcctctgttgattccaagacaatccccagcttgctatgtaggaccgtcagaagtatccaccatgttactgaaccctaagatcaaccatcgttccgatgcgatttttggtgatcaggctgtggagcagctgaagttacgtcatcacaagcctctgaaatttcatgagagatatcgtccttacctgagagatgcaggtttgcttgggctctcacaaatttgccagaagatgcctcagttggacaaagcattgataactgcccttgttgagcgttggaggccagagacccatagcttccatttggcatctggggagataactgttacacttcaagatgttgcaatgttgtttgctcttcctattgatggtcgtccggtttgttctaccactgatcatgattatgcgcaagtggtccttgattgtttaggcctggatgcaaggggtccagcaatgcctggaaagtctttcctgcattacaaatggcttaagaaacacttttatgaattaccagaggaggtggatgatatgacagttgaaaggcatgttcgggcatatatactgagccttttatgtggggtgctctttccagatgggacaggaaggatgagtctgatatatcttcctctgatcgctgatctttcacgtgttagcacatacagctgggcttctgcagttctggcattcctgtaccgatctctttgctcggttgcctcctcccacaatatcaagaatattggtggttcattgcttctcttgcagctttggagttgggagcgctttcatgttggcagaccattggttcggtcacctttatgcacagagatgggcattgaacatgacttacctccaatcggcttccgttgggtggggtcacgcacacaaagtgagagtgctaatcgctgccttaagcagtacagagatgaactgaacgttcagcgagttgatcaggtgaagtgggaaccctacctgcaggtagagtcctcaaccttacccccactttgtacaagagacgcagacctgtggcttacacaagctccattaataaacttccctatagttgaaatgtatttgcccgagcgagtgatgcggcaatttgggcttcggcagtgcattccaccacctttccggcctacactacagtcgttacatcgtatcagtagacgtggcaaagaacgagagaactgggaagaaacacaccatgagtatatccaggaatgggaagcacgacgacagcgcatatttcgagatacagagcaatatgatccatcttcttatgaggagtatctgcgctggtactcaggagcaacacggcggtaccttgtcccagcaaccagtgacgacggtgaagcgggaccttcagctccaactgacgatttctcagatcttcagtaccaagccaaatctccaataatccgcaaagcagttgataaactggaaagcatggttaagaaagccaagagagccatgacaaccacagctgatacaaccactcaagccttggttgctgagtttctgcttggctttgaggatgtgttacaagatcttggcgagatccagaataatagtggttcaactgttccaccttttcacttggatagtccacattttgatgctgccgcaagtcaacagacacctcaacttttgcttgaagctgaggaaaatttaggtaccaaccaagaagcacaactagaggaagatgaagaacttaacacagtggagcgtgcttcattggcactggagactgtggaagaggaaaacgacttctccaacgacgtgctccctggaaatctttcactgggcgtggaggaagactgtgattcagccacaccagccaatgggatttgtgatgcagccactcccatgaccgatttggttgttcctcggtcagatgagggtctccatcaagatcaacatctagaagaccacaccgaaattgagccggctacattgatggtggagcctaagtgtgaggagggcgatggttccagcttcgtgctcccaccaagccctccagaactgatgctcgaggaacaggacgattcagggttaatagctctaggtactggatcatgtaccgaacagcagagccttggagtaggagaggctgaggatcaggaaaaccctcgcacaggcacagctcagcatggcatcatgatagtggagcgtacgggtgaggaaaacagcagttgcaatggcgtttattcttcctgcccaccgtcatctgtcattgttgaatcgagcagtgattatctgtgttagttatgtagggagtagaagctttttttatatttaaagatctgacatgagattgttagttcctttgttgctggtggcatggggtttgattctgtaacttgtttcgtcgtgattgtcttgataatatgagggtcttgaaaaccgggggccgttatacgccgacccagttggagtgtaatcctcagcgttccgttatacagcctcgtttgtctcctgcctgcaccgaggtaat

SEQ ID NO: 79202 - DNA, 3122 bp, Zea Mays
gttttcttgggtgttctattcttttattttgggtatcctattttggcagcatcctgctgccttgttttttagtgtgggtctgggatttacgttagggtggtactttcagaacattcgtttttgagtgtgggtctggggttcatgttggggtggtactttgagaacattccttttgcctgtggaatttctactgctcactgagtaaaggtgaaagcacaactgagctcataagggctcatgagatggtgaaagaagcagaccacgtgacaatttaacagagtgctggactgagctattggtatcagatacatgtgctatttagcaaggggaagaaaactaatgataggtggatgtctcctacaaagagaagaggacttggtcgccgtggtcatggtcgtggaaggggtgccacggcagaaaaggatatggatcatctcgatatctctgtaccttcttcaccaagtactacctctgacagagaagatcagcctctgttgattccaagacaatccccagcttgctatgtaggaccgtcagaagtatccaccatgttactgaaccctaagatcaaccatcgttccgatgcgatttttggtgatcaggctgtggagcagctgaagttacgtcatcacaagcctctgaaatttcatgagagatatcgtccttacctgagagatgcaggtttgcttgggctctcacaaatttgccagaagatgcctcagttggacaaagcattgataactgcccttgttgagcgttggaggccagagacccatagcttccatttggcatctggggagataactgttacacttcaagatgttgcaatgttgtttgctcttcctattgatggtcgtccggtttgttctaccactgatcatgattatgcgcaagtggtccttgattgtttaggcctggatgcaaggggtccagcaatgcctggaaagtctttcctgcattacaaatggcttaagaaacacttttatgaattaccagaggaggtggatgatatgacagttgaaaggcatgttcgggcatatatactgagccttttatgtggggtgctctttccagatgggacaggaaggatgagtctgatatatcttcctctgatcgctgatctttcacgtgttagcacatacagctgggcttctgcagttctggcattcctgtaccgatctctttgctcggttgcctcctcccacaatatcaagaatattggtggttcattgcttctcttgcagctttggagttgggagcgctttcatgttggcagaccattggttcggtcacctttatgcacagagatgggcattgaacatgacttacctccaatcggcttccgttgggtggggtcacgcacacaaagtgagagtgctaatcgctgccttaagcagtacagagatgaactgaacgttcagcgagttgatcaggtgaagtgggaaccctacctgcaggtagagtcctcaaccttacccccactttgtacaagagacgcagacctgtggcttacacaagctccattaataaacttccctatagttgaaatgtatttgcccgagcgagtgatgcggcaatttgggcttcggcagtgcattccaccacctttccggcctacactacagtcgttacatcgtatcagtagacgtggcaaagaacgagagaactgggaagaaacacaccatgagtatatccaggaatgggaagcacgacgacagcgcatatttcgagatacagagcaatatgatccatcttcttatgaggagtatctgcgctggtactcaggagcaacacggcggtaccttgtcccagcaaccagtgacgacggtgaagcgggaccttcagctccaactgacgatttctcagatcttcagtaccaagccaaatctccaataatccgcaaagcagtaaaacacgaatcacttatttagttcatatttctggaaacaaaaattcatgcactatttaagatttgagtacaatcacagcttctctcaaaattactatgcatatagtggaccagtatttaatttgaagttttccctaactgttgtaggttgataaactggaaagcatggttaagaaagccaagagagccatgacaaccacagctgatacaaccactcaagccttggttgctgagtttctgcttggctttgaggatgtgttacaagatcttggcgagatccagaataatagtggttcaactgttccaccttttcacttggatagtccacattttgatgctgccgcaagtcaacagacacctcaacttttgcttgaagctgaggaaaatttaggtaccaaccaagaagcacaactagaggaagatgaagaacttaacacagtggagcgtgcttcattggcactggagactgtggaagaggaaaacgacttctccaacgacgtgctccctggaaatctttcactgggcgtggaggaagactgtgattcagccacaccagccaatgggatttgtgatgcagccactcccatgaccgatttggttgttcctcggtcagatgagggtctccatcaagatcaacatctagaagaccacaccgaaattgagccggctacattgatggtggagcctaagtgtgaggagggcgatggttccagcttcgtgctcccaccaagccctccagaactgatgctcgaggaacaggacgattcagggttaatagctctaggtactggatcatgtaccgaacagcagagccttggagtaggagaggctgaggatcaggaaaaccctcgcacaggcacagctcagcatggcatcatgatagtggagcgtacgggtgaggaaaacagcagttgcaatggcgtttattcttcctgcccaccgtcatctgtcattgttgaatcgagcagtgattatctgtgttagttatgtagggagtagaagctttttttatatttaaagatctgacatgagattgttagttcctttgttgctggtggcatggggtttgattctgtaacttgtttcgtcgtgattgtcttgataatatgagggtcttgaaaaccgggggccgttatacgccgacccagttggagtgtaatcctcagcgttccgttatacagcctcgtttgtctcctgcctgcaccgaggtaat

SEQ ID NO: 79203 - DNA, 2937 bp, Zea Mays
gcatcctgctgccttgttttttagtgtgggtctgggatttacgttagggtggtactttcagaacattcgtttttgagtgtgggtctggggttcatgttggggtggtactttgagaacattccttttgcctgtggaatttctactgctcactgagtaaaggtgaaagcacaactgagctcataagggctcatgagatggtgaaagaagcagaccacgtgacaatttaacagagtgctggactgagctattggtatcagatacatgtgctatttagcaaggggaagaaaactaatgatagtgctatgtaaaggtggatgtctcctacaaagagaagaggacttggtcgccgtggtcatggtcgtggaaggggtgccacggcagaaaaggatatggatcatctcgatatctctgtaccttcttcaccaagtactacctctgacagagaagatcagcctctgttgattccaagacaatccccagcttgctatgtaggaccgtcagaagtatccaccatgttactgaaccctaagatcaaccatcgttccgatgcgatttttggtgatcaggctgtggagcagctgaagttacgtcatcacaagcctctgaaatttcatgagagatatcgtccttacctgagagatgcaggtttgcttgggctctcacaaatttgccagaagatgcctcagttggacaaagcattgataactgcccttgttgagcgttggaggccagagacccatagcttccatttggcatctggggagataactgttacacttcaagatgttgcaatgttgtttgctcttcctattgatggtcgtccggtttgttctaccactgatcatgattatgcgcaagtggtccttgattgtttaggcctggatgcaaggggtccagcaatgcctggaaagtctttcctgcattacaaatggcttaagaaacacttttatgaattaccagaggaggtggatgatatgacagttgaaaggcatgttcgggcatatatactgagccttttatgtggggtgctctttccagatgggacaggaaggatgagtctgatatatcttcctctgatcgctgatctttcacgtgttagcacatacagctgggcttctgcagttctggcattcctgtaccgatctctttgctcggttgcctcctcccacaatatcaagaatattggtggttcattgcttctcttgcagctttggagttgggagcgctttcatgttggcagaccattggttcggtcacctttatgcacagagatgggcattgaacatgacttacctccaatcggcttccgttgggtggggtcacgcacacaaagtgagagtgctaatcgctgccttaagcagtacagagatgaactgaacgttcagcgagttgatcaggtgaagtgggaaccctacctgcaggtagagtcctcaaccttacccccactttgtacaagagacgcagacctgtggcttacacaagctccattaataaacttccctatagttgaaatgtatttgcccgagcgagtgatgcggcaatttgggcttcggcagtgcattccaccacctttccggcctacactacagtcgttacatcgtatcagtagacgtggcaaagaacgagagaactgggaagaaacacaccatgagtatatccaggaatgggaagcacgacgacagcgcatatttcgagatacagagcaatatgatccatcttcttatgaggagtatctgcgctggtactcaggagcaacacggcggtaccttgtcccagcaaccagtgacgacggtgaagcgggaccttcagctccaactgacgatttctcagatcttcagtaccaagccaaatctccaataatccgcaaagcagttgataaactggaaagcatggttaagaaagccaagagagccatgacaaccacagctgatacaaccactcaagccttggttgctgagtttctgcttggctttgaggatgtgttacaagatcttggcgagatccagaataatagtggttcaactgttccaccttttcacttggatagtccacattttgatgctgccgcaagtcaacagacacctcaacttttgcttgaagctgaggaaaatttaggtaccaaccaagaagcacaactagaggaagatgaagaacttaacacagtggagcgtgcttcattggcactggagactgtggaagaggaaaacgacttctccaacgacgtgctccctggaaatctttcactgggcgtggaggaagactgtgattcagccacaccagccaatgggatttgtgatgcagccactcccatgaccgatttggttgttcctcggtcagatgagggtctccatcaagatcaacatctagaagaccacaccgaaattgagccggctacattgatggtggagcctaagtgtgaggagggcgatggttccagcttcgtgctcccaccaagccctccagaactgatgctcgaggaacaggacgattcagggttaatagctctaggtactggatcatgtaccgaacagcagagccttggagtaggagaggctgaggatcaggaaaaccctcgcacaggcacagctcagcatggcatcatgatagtggagcgtacgggtgaggaaaacagcagttgcaatggcgtttattcttcctgcccaccgtcatctgtcattgttgaatcgagcagtgattatctgtgttagttatgtagggagtagaagctttttttatatttaaagatctgacatgagattgttagttcctttgttgctggtggcatggggtttgattctgtaacttgtttcgtcgtgattgtcttgataatatgagggtcttgaaaaccgggggccgttatacgccgacccagttggagtgtaatcctcagcgttccgttatacagcctcgtttgtctcctgcctgcaccgaggtaat

SEQ ID NO: 79204 - DNA, 3547 bp, Zea Mays
cccactctggccgcgaatctcagcgctccggacaggaatccaacggccttggtcgacggcagccttacgcgcggcttcgcggagttgcgaggcggctcggctctacaccctcgcgctcgccgctctcggtctcgcctcttcttcgctcacacgattcgccgcgaggagtttccccttccgctgcgtgcatcccgcgagagctcgaaaacctagccgcaaaatcgatggctcggcgcggccacgacgacgacgacgacgaggtcgatgaggaggaagaggaggatgcctatgacctggacgacgacgaggatgaggatgaggaggacgactacgaggaggagacgaggcgcgggaaggcctcccgcggcggcggcggcgccaagagcggcggcgggcggaagcggtcgcgggaagacaactttatcgacgactcggccatcgaggacgaggacgatgaggatgacgacggcggtggccgaccgaggaagaagggtggcggcggggtgcgaggattcttcgacgaggaggcccaggtcgacgaggatgaggaagaagaggacgaaggagagggcgaggacgattttattaatgatgctggggcggacctccctgatgaggatgttgttaggggttcaagacgtcattctattcctatgagggatgaagaagaggacattgatgaaatggagagacaagtgcgggagagatacgcaagatctactcatattgaatacggtgaggaagctgcagaagtagaacagcaagctctgctgccctcggtgaaggatcctaaactatggatggtcaaatgtgcgattgggcatgagagagagactgcgatttgtctgatgcaaaagttcattgataggtcagaccttcaaataaagtcagtcgtggcgttggatcatctaaaaaattatatttatgttgaagctgagaaggaggcccatgtcaaagaggcttgcaaaggtctacgaaacatttatgcttcggcaaaaataacattagtgcctataaaagaaatggcagatgtcctctctgttgagagcaaatctgtcgatctgtcaagggattcttgggtccgaatgaaattgggcatatataaaggtgaccttgctaaggttgttgatgttgacaatgtacgtcaaagagtagatgtgaagctgatccctagaatagatctacaagctttggctagtaaactggaagggagagacattgtaaagaagaaagcatttgtcccaccaccacgattcttcaatatcgatgaggcgagggagatgcatattcgtgtggaacggaggcgagataaagaatctggggagtactttgagtgggttgataatttgaagtttaaagatggtttcttgtacaaatcagtctcaactaaatcaatccacaaaagtaatattcaaccgactttcgatgagcttgagaagtttaagaagcctggtgatgacatgaatggcgacatggctagtttgtctactctatttgcaaacaggaaaaaagggcattttatgaagggtgatgctgtcattgttattaaaggcgacttgaaaaatctggagggatgggttgaaaaagtagaggatgaaaccgttcacatcagaccaaaaatatctgatcttccgaaaacattagccttcaatgaaaaggagctttgcaaatatttcaagcctggtgaccatgtcaaggtgatctcaggtgtccaagaaggtgctactggcatggtcgttaaagtggaagggcatgtcttgatcattttgtctgacacaactaaagaacatatccgtgtgtttgctgatcatgtcgtcgaaagctctgaaatcaccacaggaataaccagaattggtgattatgaactgcatgatcttgtccttttagacaacttgtcatttggagtaattataagggtggaagctgaagcatttcaggttctgaaaggagtgccagatagacctgaagttgtgctcgtgaaactaagagaaataaaaagcaaaattgaaaggcgctcatcagctaaagatcgttctaataatattatctctgcaaaggatgttgtaagggttgttgaaggagcatgcaaggggaaacaaggacctgtggaacacatacacaaggggatgctgtttatctatgacaggcatcaccttgaacatgcaggttttatttgtgcaaaagcgcaatcttgccttcttgttggtggatcaactggtggccgtcgaggaaatggtatggacacagctgatgcacggcttgatgctttgcgatcttcagcaagcattctgcaatctccaggaaggctgcccccaagaggacctaatatgaattatggtggaaggtttggaggcggccgtggtggtagaggatatgatgccttggtgggtaaatgtatcaaaattaaatctggcccttataagggataccgtggccgtgttaaagaggtgactggtgcactcgtacgtgtagagcttgattcattgatgaagattgtcacagttaaaagagatgatatcgctgacacacctacagtcgcgacgccattccgtgaacctcgttattcattgggtggtgaaacaccaatgcacccgtctcgaacaccgcatcatgcttatcagactccaatgcgggaccctggagcaacaccaatacatgatggaatgcggactcccatgcgaagtcgagcctgggctcctatgagtcctccaagggacaattgggaagatggaaatcctgctacttggggtagcagtccagcttaccaggaaccccacaagctcggccatatgaagcccccacacctggatcggggtgggcaaatactccaggagttagtttcaatgacgctcctactcccagggataactatgcaaatgccccaagtccatacgtgccttccacacctgttggtcaaccaatgacgccaaactcagcctcgtaccttccaggcacacctggtggtcaaccaatgaccccaggcaatgctgggatggatatgctgtccccaataataggtggtgatggtgaagttgcatggctgttgccggatgttttggtcaatgtgttgaggggaggtgatgacggccctggcgtggttagggaagtactcggggatggatcttgccgggttgcacttgggtcgtcgggcaacggtgacgtggtgacggtccttgcgaacgaggtcgaggtcatcaggccgaagaagagcgacaggatcaagatattgaacggcaatttccgtgggtacacaggaaagctcataggtatagatggttctgacggaatagtgaggcttgacgaaacatacgaagttaagatcttagatatggtgattttggccaaactggccacttaagatcttagatgtatatgttgtaacgtgtccgtcatagaacgtattctgtaacaatgccctcgtttgcaataaagctttgcttatttgcaccatcattttcgattttctgcagctctttgttctgcttgagggacttttcgttgaaacgcatgtcacaaatcgaactataagttgtaacatatgaaaaag

SEQ ID NO: 79205 - DNA, 3475 bp, Zea Mays
ctcagcgctccggacaggaatccaacggccttggtcgacggcagccttacgcgcggcttcgcggagttgcgaggcggctcggctctacaccctcgcgctcgccgctctcggtctcgcctcttcttcgctcacacgattcgccgcgaggagtttccccttccgctgcgtgcatcccgcgagagctcgaaaacctagccgcaaaatcgatggctcggcgcggccacgacgacgacgacgacgaggtcgatgaggaggaagaggaggatgcctatgacctggacgacgacgaggatgaggatgaggaggacgactacgaggaggagacgaggcgcgggaaggcctcccgcggcggcggcggcgccaagagcggcggcgggcggaagcggtcgcgggaagacaactttatcgacgactcggccatcgaggacgaggacgatgaggatgacgacggcggtggccgaccgaggaagaagggtggcggcggggtgcgaggattcttcgacgaggaggcccaggtcgacgaggatgaggaagaagaggacgaaggagagggcgaggacgattttattaatgatgctggggcggacctccctgatgaggatgttgttaggggttcaagacgtcattctattcctatgagggatgaagaagaggacattgatgaaatggagagacaagtgcgggagagatacgcaagatctactcatattgaatacggtgaggaagctgcagaagtagaacagcaagctctgctgccctcggtgaaggatcctaaactatggatggtcaaatgtgcgaccttcaaataaagtcagtcgtggcgttggatcatctaaaaaattatatttatgttgaagctgagaaggaggcccatgtcaaagaggcttgcaaaggtctacgaaacatttatgcttcggcaaaaataacattagtgcctataaaagaaatggcagatgtcctctctgttgagagcaaatctgtcgatctgtcaagggattcttgggtccgaatgaaattgggcatatataaaggtgaccttgctaaggttgttgatgttgacaatgtacgtcaaagagtagatgtgaagctgatccctagaatagatctacaagctttggctagtaaactggaagggagagacattgtaaagaagaaagcatttgtcccaccaccacgattcttcaatatcgatgaggcgagggagatgcatattcgtgtggaacggaggcgagataaagaatctggggagtactttgagtgggttgataatttgaagtttaaagatggtttcttgtacaaatcagtctcaactaaatcaatccacaaaagtaatattcaaccgactttcgatgagcttgagaagtttaagaagcctggtgatgacatgaatggcgacatggctagtttgtctactctatttgcaaacaggaaaaaagggcattttatgaagggtgatgctgtcattgttattaaaggcgacttgaaaaatctggagggatgggttgaaaaagtagaggatgaaaccgttcacatcagaccaaaaatatctgatcttccgaaaacattagccttcaatgaaaaggagctttgcaaatatttcaagcctggtgaccatgtcaaggtgatctcaggtgtccaagaaggtgctactggcatggtcgttaaagtggaagggcatgtcttgatcattttgtctgacacaactaaagaacatatccgtgtgtttgctgatcatgtcgtcgaaagctctgaaatcaccacaggaataaccagaattggtgattatgaactgcatgatcttgtccttttagacaacttgtcatttggagtaattataagggtggaagctgaagcatttcaggttctgaaaggagtgccagatagacctgaagttgtgctcgtgaaactaagagaaataaaaagcaaaattgaaaggcgctcatcagctaaagatcgttctaataatattatctctgcaaaggatgttgtaagggttgttgaaggagcatgcaaggggaaacaaggacctgtggaacacatacacaaggggatgctgtttatctatgacaggcatcaccttgaacatgcaggttttatttgtgcaaaagcgcaatcttgccttcttgttggtggatcaactggtggccgtcgaggaaatggtatggacacagctgatgcacggcttgatgctttgcgatcttcagcaagcattctgcaatctccaggaaggctgcccccaagaggacctaatatgaattatggtggaaggtttggaggcggccgtggtggtagaggatatgatgccttggtgggtaaatgtatcaaaattaaatctggcccttataagggataccgtggccgtgttaaagaggtgactggtgcactcgtacgtgtagagcttgattcattgatgaagattgtcacagttaaaagagatgatatcgctgacacacctacagtcgcgacgccattccgtgaacctcgttattcattgggtggtgaaacaccaatgcacccgtctcgaacaccgcatcatgcttatcagactccaatgcgggaccctggagcaacaccaatacatgatggaatgcggactcccatgcgaagtcgagcctgggctcctatgagtcctccaagggacaattgggaagatggaaatcctgctacttggggtagcagtccagcttaccagccaggaaccccacaagctcggccatatgaagcccccacacctggatcggggtgggcaaatactccaggagttagtttcaatgacgctcctactcccagggataactatgcaaatgccccaagtccatacgtgccttccacacctgttggtcaaccaatgacgccaaactcagcctcgtaccttccaggcacacctggtggtcaaccaatgaccccaggcaatgctgggatggatatgctgtccccaataataggtggtgatggtgaagttgcatggctgttgccggatgttttggtcaatgtgttgaggggaggtgatgacggccctggcgtggttagggaagtactcggggatggatcttgccgggttgcacttgggtcgtcgggcaacggtgacgtggtgacggtccttgcgaacgaggtcgaggtcatcaggccgaagaagagcgacaggatcaagatattgaacggcaatttccgtgggtacacaggaaagctcataggtatagatggttctgacggaatagtgaggcttgacgaaacatacgaagttaagatcttagatatggtgattttggccaaactggccacttaagatcttagatgtatatgttgtaacgtgtccgtcatagaacgtattctgtaacaatgccctcgtttgcaataaagctttgcttatttgcaccatcattttcgattttctgcagctctttgttctgcttgagggacttttcgttgaaacgcatgtcacaaatcgaactataagttgtaacatatgaaaaag

SEQ ID NO: 79206 - DNA, 3418 bp, Zea Mays
ggagttgcgaggcggctcggctctacaccctcgcgctcgccgctctcggtctcgcctcttcttcgctcacacgattcgccgcgaggagtttccccttccgctgcgtgcatcccgcgagagctcgaaaacctagccgcaaaatcgatggctcggcgcggccacgacgacgacgacgacgaggtcgatgaggaggaagaggaggatgcctatgacctggacgacgacgaggatgaggatgaggaggacgactacgaggaggagacgaggcgcgggaaggcctcccgcggcggcggcggcgccaagagcggcggcgggcggaagcggtcgcgggaagacaactttatcgacgactcggccatcgaggacgaggacgatgaggatgacgacggcggtggccgaccgaggaagaagggtggcggcggggtgcgaggattcttcgacgaggaggcccaggtcgacgaggatgaggaagaagaggacgaaggagagggcgaggacgattttattaatgatgctggggcggacctccctgatgaggatgttgttaggggttcaagacgtcattctattcctatgagggatgaagaagaggacattgatgaaatggagagacaagtgcgggagagatacgcaagatctactcatattgaatacggtgaggaagctgcagaagtagaacagcaagctctgctgccctcggtgaaggatcctaaactatggatggtcaaatgtgcggtcagaccttcaaataaagtcagtcgtggcgttggatcatctaaaaaattatatttatgttgaagctgagaaggaggcccatgtcaaagaggcttgcaaaggtctacgaaacatttatgcttcggcaaaaataacattagtgcctataaaagaaatggcagatgtcctctctgttgagagcaaatctgtcgatctgtcaagggattcttgggtccgaatgaaattgggcatatataaaggtgaccttgctaaggttgttgatgttgacaatgtacgtcaaagagtagatgtgaagctgatccctagaatagatctacaagctttggctagtaaactggaagggagagacattgtaaagaagaaagcatttgtcccaccaccacgattcttcaatatcgatgaggcgagggagatgcatattcgtgtggaacggaggcgagataaagaatctggggagtactttgagtgggttgataatttgaagtttaaagatggtttcttgtacaaatcagtctcaactaaatcaatccacaaaagtaatattcaaccgactttcgatgagcttgagaagtttaagaagcctggtgatgacatgaatggcgacatggctagtttgtctactctatttgcaaacaggaaaaaagggcattttatgaagggtgatgctgtcattgttattaaaggcgacttgaaaaatctggagggatgggttgaaaaagtagaggatgaaaccgttcacatcagaccaaaaatatctgatcttccgaaaacattagccttcaatgaaaaggagctttgcaaatatttcaagcctggtgaccatgtcaaggtgatctcaggtgtccaagaaggtgctactggcatggtcgttaaagtggaagggcatgtcttgatcattttgtctgacacaactaaagaacatatccgtgtgtttgctgatcatgtcgtcgaaagctctgaaatcaccacaggaataaccagaattggtgattatgaactgcatgatcttgtccttttagacaacttgtcatttggagtaattataagggtggaagctgaagcatttcaggttctgaaaggagtgccagatagacctgaagttgtgctcgtgaaactaagagaaataaaaagcaaaattgaaaggcgctcatcagctaaagatcgttctaataatattatctctgcaaaggatgttgtaagggttgttgaaggagcatgcaaggggaaacaaggacctgtggaacacatacacaaggggatgctgtttatctatgacaggcatcaccttgaacatgcaggttttatttgtgcaaaagcgcaatcttgccttcttgttggtggatcaactggtggccgtcgaggaaatggtatggacacagctgatgcacggcttgatgctttgcgatcttcagcaagcattctgcaatctccaggaaggctgcccccaagaggacctaatatgaattatggtggaaggtttggaggcggccgtggtggtagaggatatgatgccttggtgggtaaatgtatcaaaattaaatctggcccttataagggataccgtggccgtgttaaagaggtgactggtgcactcgtacgtgtagagcttgattcattgatgaagattgtcacagttaaaagagatgatatcgctgacacacctacagtcgcgacgccattccgtgaacctcgttattcattgggtggtgaaacaccaatgcacccgtctcgaacaccgcatcatgcttatcagactccaatgcgggaccctggagcaacaccaatacatgatggaatgcggactcccatgcgaagtcgagcctgggctcctatgagtcctccaagggacaattgggaagatggaaatcctgctacttggggtagcagtccagcttaccagccaggaaccccacaagctcggccatatgaagcccccacacctggatcggggtgggcaaatactccaggagttagtttcaatgacgctcctactcccagggataactatgcaaatgccccaagtccatacgtgccttccacacctgttggtcaaccaatgacgccaaactcagcctcgtaccttccaggcacacctggtggtcaaccaatgaccccaggcaatgctgggatggatatgctgtccccaataataggtggtgatggtgaagttgcatggctgttgccggatgttttggtcaatgtgttgaggggaggtgatgacggccctggcgtggttagggaagtactcggggatggatcttgccgggttgcacttgggtcgtcgggcaacggtgacgtggtgacggtccttgcgaacgaggtcgaggtcatcaggccgaagaagagcgacaggatcaagatattgaacggcaatttccgtgggtacacaggaaagctcataggtatagatggttctgacggaatagtgaggcttgacgaaacatacgaagttaagatcttagatatggtgattttggccaaactggccacttaagatcttagatgtatatgttgtaacgtgtccgtcatagaacgtattctgtaacaatgccctcgtttgcaataaagctttgcttatttgcaccatcattttcgattttctgcagctctttgttctgcttgagggacttttcgttgaaacgcatgtcacaaatcgaactataagttgtaacatatgaaaaag

SEQ ID NO: 79207 - DNA, 3459 bp, Zea Mays
cgaggcggctcggctctacaccctcgcgctcgccgctctcggtctcgcctcttcttcgctcacacgattcgccgcgaggagtttccccttccgctgcgtgcatcccgcgagagctcgaaaacctagccgcaaaatcgatggctcggcgcggccacgacgacgacgacgacgaggtcgatgaggaggaagaggaggatgcctatgacctggacgacgacgaggatgaggatgaggaggacgactacgaggaggagacgaggcgcgggaaggcctcccgcggcggcggcggcgccaagagcggcggcgggcggaagcggtcgcgggaagacaactttatcgacgactcggccatcgaggacgaggacgatgaggatgacgacggcggtggccgaccgaggaagaagggtggcggcggggtgcgaggattcttcgacgaggaggcccaggtcgacgaggatgaggaagaagaggacgaaggagagggcgaggacgattttattaatgatgctggggcggacctccctgatgaggatgttgttaggggttcaagacgtcattctattcctatgagggatgaagaagaggacattgatgaaatggagagacaagtgcgggagagatacgcaagatctactcatattgaatacggtgaggaagctgcagaagtagaacagcaagctctgctgccctcggtgaaggatcctaaactatggatggtcaaatgtgcgattgggcatgagagagagactgcgatttgtctgatgcaaaagttcattgataggtcagaccttcaaataaagtcagtcgtggcgttggatcatctaaaaaattatatttatgttgaagctgagaaggaggcccatgtcaaagaggcttgcaaaggtctacgaaacatttatgcttcggcaaaaataacattagtgcctataaaagaaatggcagatgtcctctctgttgagagcaaatctgtcgatctgtcaagggattcttgggtccgaatgaaattgggcatatataaaggtgaccttgctaaggttgttgatgttgacaatgtacgtcaaagagtagatgtgaagctgatccctagaatagatctacaagctttggctagtaaactggaagggagagacattgtaaagaagaaagcatttgtcccaccaccacgattcttcaatatcgatgagggagatgcatattcgtgtggaacggaggcgagataaagaatctggggagtactttgagtgggttgataatttgaagtttaaagatggtttcttgtacaaatcagtctcaactaaatcaatccacaaaagtaatattcaaccgactttcgatgagcttgagaagtttaagaagcctggtgatgacatgaatggcgacatggctagtttgtctactctatttgcaaacaggaaaaaagggcattttatgaagggtgatgctgtcattgttattaaaggcgacttgaaaaatctggagggatgggttgaaaaagtagaggatgaaaccgttcacatcagaccaaaaatatctgatcttccgaaaacattagccttcaatgaaaaggagctttgcaaatatttcaagcctggtgaccatgtcaaggtgatctcaggtgtccaagaaggtgctactggcatggtcgttaaagtggaagggcatgtcttgatcattttgtctgacacaactaaagaacatatccgtgtgtttgctgatcatgtcgtcgaaagctctgaaatcaccacaggaataaccagaattggtgattatgaactgcatgatcttgtccttttagacaacttgtcatttggagtaattataagggtggaagctgaagcatttcaggttctgaaaggagtgccagatagacctgaagttgtgctcgtgaaactaagagaaataaaaagcaaaattgaaaggcgctcatcagctaaagatcgttctaataatattatctctgcaaaggatgttgtaagggttgttgaaggagcatgcaaggggaaacaaggacctgtggaacacatacacaaggggatgctgtttatctatgacaggcatcaccttgaacatgcaggttttatttgtgcaaaagcgcaatcttgccttcttgttggtggatcaactggtggccgtcgaggaaatggtatggacacagctgatgcacggcttgatgctttgcgatcttcagcaagcattctgcaatctccaggaaggctgcccccaagaggacctaatatgaattatggtggaaggtttggaggcggccgtggtggtagaggatatgatgccttggtgggtaaatgtatcaaaattaaatctggcccttataagggataccgtggccgtgttaaagaggtgactggtgcactcgtacgtgtagagcttgattcattgatgaagattgtcacagttaaaagagatgatatcgctgacacacctacagtcgcgacgccattccgtgaacctcgttattcattgggtggtgaaacaccaatgcacccgtctcgaacaccgcatcatgcttatcagactccaatgcgggaccctggagcaacaccaatacatgatggaatgcggactcccatgcgaagtcgagcctgggctcctatgagtcctccaagggacaattgggaagatggaaatcctgctacttggggtagcagtccagcttaccagccaggaaccccacaagctcggccatatgaagcccccacacctggatcggggtgggcaaatactccaggagttagtttcaatgacgctcctactcccagggataactatgcaaatgccccaagtccatacgtgccttccacacctgttggtcaaccaatgacgccaaactcagcctcgtaccttccaggcacacctggtggtcaaccaatgaccccaggcaatgctgggatggatatgctgtccccaataataggtggtgatggtgaagttgcatggctgttgccggatgttttggtcaatgtgttgaggggaggtgatgacggccctggcgtggttagggaagtactcggggatggatcttgccgggttgcacttgggtcgtcgggcaacggtgacgtggtgacggtccttgcgaacgaggtcgaggtcatcaggccgaagaagagcgacaggatcaagatattgaacggcaatttccgtgggtacacaggaaagctcataggtatagatggttctgacggaatagtgaggcttgacgaaacatacgaagttaagatcttagatatggtgattttggccaaactggccacttaagatcttagatgtatatgttgtaacgtgtccgtcatagaacgtattctgtaacaatgccctcgtttgcaataaagctttgcttatttgcaccatcattttcgattttctgcagctctttgttctgcttgagggacttttcgttgaaacgcatgtcacaaatcgaactataagttgtaacatatgaaaaag

SEQ ID NO: 79208 - DNA, 3386 bp, Zea Mays
ctcggctctacaccctcgcgctcgccgctctcggtctcgcctcttcttcgctcacacgattcgccgcgaggagtttccccttccgctgcgtgcatcccgcgagagctcgaaaacctagccgcaaaatcgatggctcggcgcggccacgacgacgacgacgacgaggtcgatgaggaggaagaggaggatgcctatgacctggacgacgacgaggatgaggatgaggaggacgactacgaggaggagacgaggcgcgggaaggcctcccgcggcggcggcggcgccaagagcggcggcgggcggaagcggtcgcgggaagacaactttatcgacgactcggccatcgaggacgaggacgatgaggatgacgacggcggtggccgaccgaggaagaagggtggcggcggggtgcgaggattcttcgacgaggaggcccaggtcgacgaggatgaggaagaagaggacgaaggagagggcgaggacgattttattaatgatgctggggcggacctccctgatgaggatgttgttaggggttcaagacgtcattctattcctatgagggatgaagaagaggacattgatgaaatggagagacaagtgcgggagagatacgcaagatctactcatattgaatacggtgaggaagctgcagaagtagaacagcaagctctgctgccctcggtgaaggatcctaaactatggatggtcaaatgtgcgattgggcatgagagagagactgcgatttgtctgatgcaaaagttcattgataggtcagaccttcaaataaagtcagtcgtggcgttggatcatctaaaaaattatatttatgttgaagctgagaaggaggcccatgtcaaagaggcttgcaaaggtctacgaaacatttatgcttcggcaaaaataacattagtgcctataaaagaaatggcagatgtcctctctgttgagagcaaatctgtcgatctgtcaagggattcttgggtccgaatgaaattgggcatatataaaggtgaccttgctaaggttgttgatgttgacaatgtacgtcaaagagtagatgtgaagctgatccctagaatagatctacaagctttggctagtaaactggaagggagagacattgtaaagaagaaagcatttgtcccaccaccacgattcttcaatatcgatgaggcgagggagatgcatattcgtgtggaacggaggcgagataaagaatctggggagtactttgagtgggttgataatttgaagtttaaagatggtttcttgtacaaatcagtctcaactaaatcaatccacaaaagtaatattcaaccgactttcgatgagcttgagaagtttaagaagcctggtgatgacatgaatggcgacatggctagtttgtctactctatttgcaaacaggaaaaaagggcattttatgaagggtgatgctgtcattgttattaaaggcgacttgaaaaatctggagggatgggttgaaaaagtagaggatgaaaccgttcacatcagaccaaaaatatctgatcttccgaaaacattagccttcaatgaaaaggagctttgcaaatatttcaagcctggtgaccatgtcaaggtgatctcaggtgtccaagaaggtgctactggcatggtcgttaaagtggaagggcatgtcttgatcattttgtctgacacaactaaagaacatatccgtgtgtttgctgatcatgtcgtcgaaagctctgaaatcaccacaggaataaccagaattggtgattatgaactgcatgatcttgtccttttagacaacttgtcatttggagtaattataagggtggaagctgaagcatttcaggttctgaaaggagtgccagatagacctgaagttgtgctcgtgaaactaagagaaataaaaagcaaaattgaaaggcgctcatcagctaaagatcgttctaataatattatctctgcaaaggatgttgtaagggttgttgaaggagcatgcaaggggaaacaaggacctgtggaacacatacacaaggggatgctgtttatctatgacaggcatcaccttgaacatgcaggttttatttgtgcaaaagcgcaatcttgccttcttgttggtggatcaactggtggccgtcgaggaaatggtatggacacagctgatgcacggcttgatgctttgcgatcttcagcaagcattctgcaatctccaggaaggctgcccccaagaggacctaatatgaattatggtggaaggtttggaggcggccgtggtggtagaggatatgatgccttggtgggtaaatgtatcaaaattaaatctggcccttataagggataccgtggccgtgttaaagaggtgactggtgcactcgtacgtgtagagcttgattcattgatgaagattgtcacagttaaaagagatgatatcgctgacacacctacagtcgcgacgccattccgtgaacctcgttattcattgggtggtgaaacaccaatgcacccgtctcgaacaccgcatcatgcttatcagactccaatgcgggaccctggagggacaattgggaagatggaaatcctgctacttggggtagcagtccagcttaccagccaggaaccccacaagctcggccatatgaagcccccacacctggatcggggtgggcaaatactccaggagttagtttcaatgacgctcctactcccagggataactatgcaaatgccccaagtccatacgtgccttccacacctgttggtcaaccaatgacgccaaactcagcctcgtaccttccaggcacacctggtggtcaaccaatgaccccaggcaatgctgggatggatatgctgtccccaataataggtggtgatggtgaagttgcatggctgttgccggatgttttggtcaatgtgttgaggggaggtgatgacggccctggcgtggttagggaagtactcggggatggatcttgccgggttgcacttgggtcgtcgggcaacggtgacgtggtgacggtccttgcgaacgaggtcgaggtcatcaggccgaagaagagcgacaggatcaagatattgaacggcaatttccgtgggtacacaggaaagctcataggtatagatggttctgacggaatagtgaggcttgacgaaacatacgaagttaagatcttagatatggtgattttggccaaactggccacttaagatcttagatgtatatgttgtaacgtgtccgtcatagaacgtattctgtaacaatgccctcgtttgcaataaagctttgcttatttgcaccatcattttcgattttctgcagctctttgttctgcttgagggacttttcgttgaaacgcatgtcacaaatcgaactataagttgtaacatatgaaaaag

SEQ ID NO: 79209 - DNA, 3382 bp, Zea Mays
ctcggctctacaccctcgcgctcgccgctctcggtctcgcctcttcttcgctcacacgattcgccgcgaggagtttccccttccgctgcgtgcatcccgcgagagctcgaaaacctagccgcaaaatcgatggctcggcgcggccacgacgacgacgacgacgaggtcgatgaggaggaagaggaggatgcctatgacctggacgacgacgaggatgaggatgaggaggacgactacgaggaggagacgaggcgcgggaaggcctcccgcggcggcggcggcgccaagagcggcggcgggcggaagcggtcgcgggaagacaactttatcgacgactcggccatcgaggacgaggacgatgaggatgacgacggcggtggccgaccgaggaagaagggtggcggcggggtgcgaggattcttcgacgaggaggcccaggtcgacgaggatgaggaagaagaggacgaaggagagggcgaggacgattttattaatgatgctggggcggacctccctgatgaggatgttgttaggggttcaagacgtcattctattcctatgagggatgaagaagaggacattgatgaaatggagagacaagtgcgggagagatacgcaagatctactcatattgaatacggtgaggaagctgcagaagtagaacagcaagctctgctgccctcggtgaaggatcctaaactatggatggtcaaatgtgcgattgggcatgagagagagactgcgatttgtctgatgcaaaagttcattgataggtcagaccttcaaataaagtcagtcgtggcgttggatcatctaaaaaattatatttatgttgaagctgagaaggaggcccatgtcaaagaggcttgcaaaggtctacgaaacatttatgcttcggcaaaaataacattagtgcctataaaagaaatggcagatgtcctctctgttgagagcaaatctgtcgatctgtcaagggattcttgggtccgaatgaaattgggcatatataaaggtgaccttgctaaggttgttgatgttgacaatgtacgtcaaagagtagatgtgaagctgatccctagaatagatctacaagctttggctagtaaactggaagggagagacattgtaaagaagaaagcatttgtcccaccaccacgattcttcaatatcgatgaggcgagggagatgcatattcgtgtggaacggaggcgagataaagaatctggggagtactttgagtgggttgataatttgaagtttaaagatggtttcttgtacaaatcagtctcaactaaatcaatccacaaaagtaatattcaaccgactttcgatgagcttgagaagtttaagaagcctggtgatgacatgaatggcgacatggctagtttgtctactctatttgcaaacaggaaaaaagggcattttatgaagggtgatgctgtcattgttattaaaggcgacttgaaaaatctggagggatgggttgaaaaagtagaggatgaaaccgttcacatcagaccaaaaatatctgatcttccgaaaacattagccttcaatgaaaaggagctttgcaaatatttcaagcctggtgaccatgtcaaggtgatctcaggtgtccaagaaggtgctactggcatggtcgttaaagtggaagggcatgtcttgatcattttgtctgacacaactaaagaacatatccgtgtgtttgctgatcatgtcgtcgaaagctctgaaatcaccacaggaataaccagaattggtgattatgaactgcatgatcttgtccttttagacaacttgtcatttggagtaattataagggtggaagctgaagcatttcaggttctgaaaggagtgccagatagacctgaagttgtgctcgtgaaactaagagaaataaaaagcaaaattgaaaggcgctcatcagctaaagatcgttctaataatattatctctgcaaaggatgttgtaagggttgttgaaggagcatgcaaggggaaacaaggacctgtggaacacatacacaaggggatgctgtttatctatgacaggcatcaccttgaacatgcaggttttatttgtgcaaaagcgcaatcttgccttcttgttggtggatcaactggtggccgtcgaggaaatggtatggacacagctgatgcacggcttgatgctttgcgatcttcagcaagcattctgcaatctccaggaaggctgcccccaagaggacctaatatgaattatggtggaaggtttggaggcggccgtggtggtagaggatatgatgccttggtgggtaaatgtatcaaaattaaatctggcccttataagggataccgtggccgtgttaaagaggtgactggtgcactcgtacgtgtagagcttgattcattgatgaagattgtcacagttaaaagagatgatatcgctgacacacctacagtcgcgacgccattccgtgaacctcgttattcattgggtggtgaaacaccaatgcacccgtctcgaacaccgcatcatgcttatcagactccaatgcgggaccctggagggacaattgggaagatggaaatcctgctacttggggtagcagtccagcttaccaggaaccccacaagctcggccatatgaagcccccacacctggatcggggtgggcaaatactccaggagttagtttcaatgacgctcctactcccagggataactatgcaaatgccccaagtccatacgtgccttccacacctgttggtcaaccaatgacgccaaactcagcctcgtaccttccaggcacacctggtggtcaaccaatgaccccaggcaatgctgggatggatatgctgtccccaataataggtggtgatggtgaagttgcatggctgttgccggatgttttggtcaatgtgttgaggggaggtgatgacggccctggcgtggttagggaagtactcggggatggatcttgccgggttgcacttgggtcgtcgggcaacggtgacgtggtgacggtccttgcgaacgaggtcgaggtcatcaggccgaagaagagcgacaggatcaagatattgaacggcaatttccgtgggtacacaggaaagctcataggtatagatggttctgacggaatagtgaggcttgacgaaacatacgaagttaagatcttagatatggtgattttggccaaactggccacttaagatcttagatgtatatgttgtaacgtgtccgtcatagaacgtattctgtaacaatgccctcgtttgcaataaagctttgcttatttgcaccatcattttcgattttctgcagctctttgttctgcttgagggacttttcgttgaaacgcatgtcacaaatcgaactataagttgtaacatatgaaaaag

SEQ ID NO: 79210 - DNA, 3455 bp, Zea Mays
ctcggctctacaccctcgcgctcgccgctctcggtctcgcctcttcttcgctcacacgattcgccgcgaggagtttccccttccgctgcgtgcatcccgcgagagctcgaaaacctagccgcaaaatcgatggctcggcgcggccacgacgacgacgacgacgaggtcgatgaggaggaagaggaggatgcctatgacctggacgacgacgaggatgaggatgaggaggacgactacgaggaggagacgaggcgcgggaaggcctcccgcggcggcggcggcgccaagagcggcggcgggcggaagcggtcgcgggaagacaactttatcgacgactcggccatcgaggacgaggacgatgaggatgacgacggcggtggccgaccgaggaagaagggtggcggcggggtgcgaggattcttcgacgaggaggcccaggtcgacgaggatgaggaagaagaggacgaaggagagggcgaggacgattttattaatgatgctggggcggacctccctgatgaggatgttgttaggggttcaagacgtcattctattcctatgagggatgaagaagaggacattgatgaaatggagagacaagtgcgggagagatacgcaagatctactcatattgaatacggtgaggaagctgcagaagtagaacagcaagctctgctgccctcggtgaaggatcctaaactatggatggtcaaatgtgcgattgggcatgagagagagactgcgatttgtctgatgcaaaagttcattgataggtcagaccttcaaataaagtcagtcgtggcgttggatcatctaaaaaattatatttatgttgaagctgagaaggaggcccatgtcaaagaggcttgcaaaggtctacgaaacatttatgcttcggcaaaaataacattagtgcctataaaagaaatggcagatgtcctctctgttgagagcaaatctgtcgatctgtcaagggattcttgggtccgaatgaaattgggcatatataaaggtgaccttgctaaggttgttgatgttgacaatgtacgtcaaagagtagatgtgaagctgatccctagaatagatctacaagctttggctagtaaactggaagggagagacattgtaaagaagaaagcatttgtcccaccaccacgattcttcaatatcgatgaggcgagggagatgcatattcgtgtggaacggaggcgagataaagaatctggggagtactttgagtgggttgataatttgaagtttaaagatggtttcttgtacaaatcagtctcaactaaatcaatccacaaaagtaatattcaaccgactttcgatgagcttgagaagtttaagaagcctggtgatgacatgaatggcgacatggctagtttgtctactctatttgcaaacaggaaaaaagggcattttatgaagggtgatgctgtcattgttattaaaggcgacttgaaaaatctggagggatgggttgaaaaagtagaggatgaaaccgttcacatcagaccaaaaatatctgatcttccgaaacattagccttcaatgaaaaggagctttgcaaatatttcaagcctggtgaccatgtcaaggtgatctcaggtgtccaagaaggtgctactggcatggtcgttaaagtggaagggcatgtcttgatcattttgtctgacacaactaaagaacatatccgtgtgtttgctgatcatgtcgtcgaaagctctgaaatcaccacaggaataaccagaattggtgattatgaactgcatgatcttgtccttttagacaacttgtcatttggagtaattataagggtggaagctgaagcatttcaggttctgaaaggagtgccagatagacctgaagttgtgctcgtgaaactaagagaaataaaaagcaaaattgaaaggcgctcatcagctaaagatcgttctaataatattatctctgcaaaggatgttgtaagggttgttgaaggagcatgcaaggggaaacaaggacctgtggaacacatacacaaggggatgctgtttatctatgacaggcatcaccttgaacatgcaggttttatttgtgcaaaagcgcaatcttgccttcttgttggtggatcaactggtggccgtcgaggaaatggtatggacacagctgatgcacggcttgatgctttgcgatcttcagcaagcattctgcaatctccaggaaggctgcccccaagaggacctaatatgaattatggtggaaggtttggaggcggccgtggtggtagaggatatgatgccttggtgggtaaatgtatcaaaattaaatctggcccttataagggataccgtggccgtgttaaagaggtgactggtgcactcgtacgtgtagagcttgattcattgatgaagattgtcacagttaaaagagatgatatcgctgacacacctacagtcgcgacgccattccgtgaacctcgttattcattgggtggtgaaacaccaatgcacccgtctcgaacaccgcatcatgcttatcagactccaatgcgggaccctggagcaacaccaatacatgatggaatgcggactcccatgcgaagtcgagcctgggctcctatgagtcctccaagggacaattgggaagatggaaatcctgctacttggggtagcagtccagcttaccagccaggaaccccacaagctcggccatatgaagcccccacacctggatcggggtgggcaaatactccaggagttagtttcaatgacgctcctactcccagggataactatgcaaatgccccaagtccatacgtgccttccacacctgttggtcaaccaatgacgccaaactcagcctcgtaccttccaggcacacctggtggtcaaccaatgaccccaggcaatgctgggatggatatgctgtccccaataataggtggtgatggtgaagttgcatggctgttgccggatgttttggtcaatgtgttgaggggaggtgatgacggccctggcgtggttagggaagtactcggggatggatcttgccgggttgcacttgggtcgtcgggcaacggtgacgtggtgacggtccttgcgaacgaggtcgaggtcatcaggccgaagaagagcgacaggatcaagatattgaacggcaatttccgtgggtacacaggaaagctcataggtatagatggttctgacggaatagtgaggcttgacgaaacatacgaagttaagatcttagatatggtgattttggccaaactggccacttaagatcttagatgtatatgttgtaacgtgtccgtcatagaacgtattctgtaacaatgccctcgtttgcaataaagctttgcttatttgcaccatcattttcgattttctgcagctctttgttctgcttgagggacttttcgttgaaacgcatgtcacaaatcgaactataagttgtaacatatgaaaaag

SEQ ID NO: 79211 - DNA, 3356 bp, Zea Mays
ctcggctctacaccctcgcgctcgccgctctcggtctcgcctcttcttcgctcacacgattcgccgcgaggagtttccccttccgctgcgtgcatcccgcgagagctcgaaaacctagccgcaaaatcgatggctcggcgcggccacgacgacgacgacgacgaggtcgatgaggaggaagaggaggatgcctatgacctggacgacgacgaggatgaggatgaggaggacgactacgaggaggagacgaggcgcgggaaggcctcccgcggcggcggcggcgccaagagcggcggcgggcggaagcggtcgcgggaagacaactttatcgacgactcggccatcgaggacgaggacgatgaggatgacgacggcggtggccgaccgaggaagaagggtggcggcggggtgcgaggattcttcgacgaggaggcccaggtcgacgaggatgaggaagaagaggacgaaggagagggcgaggacgattttattaatgatgctggggcggacctccctgatgaggatgttgttaggggttcaagacgtcattctattcctatgagggatgaagaagaggacattgatgaaatggagagacaagtgcgggagagatacgcaagatctactcatattgaatacggtgaggaagctgcagaagtagaacagcaagctctgctgccctcggtgaaggatcctaaactatggatggtcaaatgtgcgattgggcatgagagagagactgcgatttgtctgatgcaaaagttcattgataggtcagaccttcaaataaagtcagtcgtggcgttggatcatctaaaaaattatatttatgttgaagctgagaaggaggcccatgtcaaagaggcttgcaaaggtctacgaaacatttatgcttcggcaaaaataacattagtgcctataaaagaaatggcagatgtcctctctgttgagagcaaatctgtcgatctgtcaagggattcttgggtccgaatgaaattgggcatatataaaggtgaccttgctaaggttgttgatgttgacaatgtacgtcaaagagtagatgtgaagctgatccctagaatagatctacaagctttggctagtaaactggaagggagagacattgtaaagaagaaagcatttgtcccaccaccacgattcttcaatatcgatgaggcgagggagatgcatattcgtgtggaacggaggcgagataaagaatctggggagtactttgagtgggttgataatttgaagtttaaagatggtttcttgtacaaatcagtctcaactaaatcaatccacaaaagaaaaaagggcattttatgaagggtgatgctgtcattgttattaaaggcgacttgaaaaatctggagggatgggttgaaaaagtagaggatgaaaccgttcacatcagaccaaaaatatctgatcttccgaaaacattagccttcaatgaaaaggagctttgcaaatatttcaagcctggtgaccatgtcaaggtgatctcaggtgtccaagaaggtgctactggcatggtcgttaaagtggaagggcatgtcttgatcattttgtctgacacaactaaagaacatatccgtgtgtttgctgatcatgtcgtcgaaagctctgaaatcaccacaggaataaccagaattggtgattatgaactgcatgatcttgtccttttagacaacttgtcatttggagtaattataagggtggaagctgaagcatttcaggttctgaaaggagtgccagatagacctgaagttgtgctcgtgaaactaagagaaataaaaagcaaaattgaaaggcgctcatcagctaaagatcgttctaataatattatctctgcaaaggatgttgtaagggttgttgaaggagcatgcaaggggaaacaaggacctgtggaacacatacacaaggggatgctgtttatctatgacaggcatcaccttgaacatgcaggttttatttgtgcaaaagcgcaatcttgccttcttgttggtggatcaactggtggccgtcgaggaaatggtatggacacagctgatgcacggcttgatgctttgcgatcttcagcaagcattctgcaatctccaggaaggctgcccccaagaggacctaatatgaattatggtggaaggtttggaggcggccgtggtggtagaggatatgatgccttggtgggtaaatgtatcaaaattaaatctggcccttataagggataccgtggccgtgttaaagaggtgactggtgcactcgtacgtgtagagcttgattcattgatgaagattgtcacagttaaaagagatgatatcgctgacacacctacagtcgcgacgccattccgtgaacctcgttattcattgggtggtgaaacaccaatgcacccgtctcgaacaccgcatcatgcttatcagactccaatgcgggaccctggagcaacaccaatacatgatggaatgcggactcccatgcgaagtcgagcctgggctcctatgagtcctccaagggacaattgggaagatggaaatcctgctacttggggtagcagtccagcttaccagccaggaaccccacaagctcggccatatgaagcccccacacctggatcggggtgggcaaatactccaggagttagtttcaatgacgctcctactcccagggataactatgcaaatgccccaagtccatacgtgccttccacacctgttggtcaaccaatgacgccaaactcagcctcgtaccttccaggcacacctggtggtcaaccaatgaccccaggcaatgctgggatggatatgctgtccccaataataggtggtgatggtgaagttgcatggctgttgccggatgttttggtcaatgtgttgaggggaggtgatgacggccctggcgtggttagggaagtactcggggatggatcttgccgggttgcacttgggtcgtcgggcaacggtgacgtggtgacggtccttgcgaacgaggtcgaggtcatcaggccgaagaagagcgacaggatcaagatattgaacggcaatttccgtgggtacacaggaaagctcataggtatagatggttctgacggaatagtgaggcttgacgaaacatacgaagttaagatcttagatatggtgattttggccaaactggccacttaagatcttagatgtatatgttgtaacgtgtccgtcatagaacgtattctgtaacaatgccctcgtttgcaataaagctttgcttatttgcaccatcattttcgattttctgcagctctttgttctgcttgagggacttttcgttgaaacgcatgtcacaaatcgaactataagttgtaacatatgaaaaag

SEQ ID NO: 79212 - DNA, 3389 bp, Zea Mays
acacgattcgccgcgaggagtttccccttccgctgcgtgcatcccgcgagagctcgaaaacctagccgcaaaatcgatggctcggcgcggccacgacgacgacgacgacgaggtcgatgaggaggaagaggaggatgcctatgacctggacgacgacgaggatgaggatgaggaggacgactacgaggaggagacgaggcgcgggaaggcctcccgcggcggcggcggcgccaagagcggcggcgggcggaagcggtcgcgggaagacaactttatcgacgactcggccatcgaggacgaggacgatgaggatgacgacggcggtggccgaccgaggaagaagggtggcggcggggtgcgaggattcttcgacgaggaggcccaggtcgacgaggatgaggaagaagaggacgaaggagagggcgaggacgattttattaatgatgctggggcggacctccctgatgaggatgttgttaggggttcaagacgtcattctattcctatgagggatgaagaagaggacattgatgaaatggagagacaagtgcgggagagatacgcaagatctactcatattgaatacggtgaggaagctgcagaagtagaacagcaagctctgctgccctcggtgaaggatcctaaactatggatggtcaaatgtgcgattgggcatgagagagagactgcgatttgtctgatgcaaaagttcattgataggtcagaccttcaaataaagtcagtcgtggcgttggatcatctaaaaaattatatttatgttgaagctgagaaggaggcccatgtcaaagaggcttgcaaaggtctacgaaacatttatgcttcggcaaaaataacattagtgcctataaaagaaatggcagatgtcctctctgttgagagcaaatctgtcgatctgtcaagggattcttgggtccgaatgaaattgggcatatataaaggttgttgatgttgacaatgtacgtcaaagagtagatgtgaagctgatccctagaatagatctacaagctttggctagtaaactggaagggagagacattgtaaagaagaaagcatttgtcccaccaccacgattcttcaatatcgatgaggcgagggagatgcatattcgtgtggaacggaggcgagataaagaatctggggagtactttgagtgggttgataatttgaagtttaaagatggtttcttgtacaaatcagtctcaactaaatcaatccacaaaagtaatattcaaccgactttcgatgagcttgagaagtttaagaagcctggtgatgacatgaatggcgacatggctagtttgtctactctatttgcaaacaggaaaaaagggcattttatgaagggtgatgctgtcattgttattaaaggcgacttgaaaaatctggagggatgggttgaaaaagtagaggatgaaaccgttcacatcagaccaaaaatatctgatcttccgaaaacattagccttcaatgaaaaggagctttgcaaatatttcaagcctggtgaccatgtcaaggtgatctcaggtgtccaagaaggtgctactggcatggtcgttaaagtggaagggcatgtcttgatcattttgtctgacacaactaaagaacatatccgtgtgtttgctgatcatgtcgtcgaaagctctgaaatcaccacaggaataaccagaattggtgattatgaactgcatgatcttgtccttttagacaacttgtcatttggagtaattataagggtggaagctgaagcatttcaggttctgaaaggagtgccagatagacctgaagttgtgctcgtgaaactaagagaaataaaaagcaaaattgaaaggcgctcatcagctaaagatcgttctaataatattatctctgcaaaggatgttgtaagggttgttgaaggagcatgcaaggggaaacaaggacctgtggaacacatacacaaggggatgctgtttatctatgacaggcatcaccttgaacatgcaggttttatttgtgcaaaagcgcaatcttgccttcttgttggtggatcaactggtggccgtcgaggaaatggtatggacacagctgatgcacggcttgatgctttgcgatcttcagcaagcattctgcaatctccaggaaggctgcccccaagaggacctaatatgaattatggtggaaggtttggaggcggccgtggtggtagaggatatgatgccttggtgggtaaatgtatcaaaattaaatctggcccttataagggataccgtggccgtgttaaagaggtgactggtgcactcgtacgtgtagagcttgattcattgatgaagattgtcacagttaaaagagatgatatcgctgacacacctacagtcgcgacgccattccgtgaacctcgttattcattgggtggtgaaacaccaatgcacccgtctcgaacaccgcatcatgcttatcagactccaatgcgggaccctggagcaacaccaatacatgatggaatgcggactcccatgcgaagtcgagcctgggctcctatgagtcctccaagggacaattgggaagatggaaatcctgctacttggggtagcagtccagcttaccagccaggaaccccacaagctcggccatatgaagcccccacacctggatcggggtgggcaaatactccaggagttagtttcaatgacgctcctactcccagggataactatgcaaatgccccaagtccatacgtgccttccacacctgttggtcaaccaatgacgccaaactcagcctcgtaccttccaggcacacctggtggtcaaccaatgaccccaggcaatgctgggatggatatgctgtccccaataataggtggtgatggtgaagttgcatggctgttgccggatgttttggtcaatgtgttgaggggaggtgatgacggccctggcgtggttagggaagtactcggggatggatcttgccgggttgcacttgggtcgtcgggcaacggtgacgtggtgacggtccttgcgaacgaggtcgaggtcatcaggccgaagaagagcgacaggatcaagatattgaacggcaatttccgtgggtacacaggaaagctcataggtatagatggttctgacggaatagtgaggcttgacgaaacatacgaagttaagatcttagatatggtgattttggccaaactggccacttaagatcttagatgtatatgttgtaacgtgtccgtcatagaacgtattctgtaacaatgccctcgtttgcaataaagctttgcttatttgcaccatcattttcgattttctgcagctctttgttctgcttgagggacttttcgttgaaacgcatgtcacaaatcgaactataagttgtaacatatgaaaaag

SEQ ID NO: 79213 - DNA, 3192 bp, Zea Mays
tgcagctcctgcttcctcacaccactctccctcgcctgccagagcaggaggaagaaagattggcaggaaccaacagttcatagaccaaggagcgcggtcggggaggaccgaagagagacagagagacggcgagggagcttgcaggtgtaactgttgccgtggaaacgggggagcgatagagagagagacgggccgggacggaggagggtcgcaaggaaggaaaccaggtggaagctagcggagggggagaaatggcgtgaagcatggctggatccaaggtttcgcctttcgcgatatcctgcctattctgcagcgttcgtctcgagttggaaagcggctaccacgcaccccggcgctgtcttgcccggcctgctcatcgtcgtcgtgtataaataggagcagagggggggccagggcctcagaagtcactgcagcgtcacagctaagagatctctcctcctccacctacagctgtagagcgagggagcgagcaagagggagaagagaaggttggtggcagtaggtgggtgtggctagccttcagccagccggcaatggatttcggcgacgaacctgagggctccgacagccagcgccagcggaagcggtaccaccgccacaccccgcgccagattcagcagctcgaggcgatgttcaaggagtgcccgcaccccgacgagaaccagcgcgccgcgctcagccgggagctcggcctggagccgcgccagatcaagttctggttccagaaccgccgcacccagatgaaggcgcagcacgagcgcgcggacaactgcttcctgcgcgcggagaacgacaagatccggtgcgagaacatcaccatgcgcgaggcgctcaagaacgtcatctgccccagctgcggcggcccgcccgtcgccgaggacttcttcgacgagcagaagctccgcatggagaacgcccgcctcaaggaagagctggaccgggtgtcgagcatcacgtccaagtacctcggccggccgttcacgcagatgccgccggtgccgaccatgtccgtgtcgtcgctggacctgtccgtgggcgggatgcccgggcagggcctcggcgggccgtcgctggacctcgacctcctcagcggttgctcgtccgggctgccgtaccatatgccggcgcccgtgacggaaatggagcgccccatgatggtggacatggcgacgcgcgccatggacgagctcatccggctcgcgcaggccggcgagcaaatctgggtccagggcatgcccggggacgcgagggaggtgctcgacgtcgccacctacgacagcctcttcgccaagcccggcggcgcgttccgcccaccggaaatcaacgtcgaggggtccagggactcgggcctcgtgttcatgagcgccgtcgcgctcgtcgacgtcttcatggacacgaataagtggatggaattcttccccggcatcgtgtccaaggcgcagaccgtcgatgttctcgtgaacggcttgtgtgggaggagcgagtccttgatcatgatgtacgaggagctgcacatcatgacgccggtcgtcccgactcgcgagctgagcttcctgcgctactgcaagcagatcgaacaggggctgtgggccgtcgccgacgtctccctggacgggcagcgcgacgcccactacggggtgccgtcccgctcccgtcgcatgccgtcggggtgcctcatcgccgacatgtcgaatggctactccaaggtgacctgggtcgaacacttggagatcgagcacatgctcccgatcaacgtcctctaccgcaacctcgtgctgagcggcgccgcgttcggggcgcaccgctggctcgccgcgctgcagcgtgcgtgcgagcggtttgcgtccctggccaccctcggcgtgccgcaccacgacgtcgccggagtgacgccggaggggaagcggagcatgatgaggctgtcgcagcggatggtgagcagcttctgcgcgagcctgagctcgtcgccgctgcagcggtggacgctgctctccggcaccacggacgtgagcgtctgtgtctccacgcaccgcagcacagactccggccagcccaacggcgtcgtcctcagcgccgccacctccatatggctgcccgtccccggcgaccacgtcttcgccttcgtccgcgacgagaacgcgcgctcccagtgggacgtcctgtcgcacggcaatcaggttcaggaggtgtcgcgcatccccaacggctccaaccccggaaactgcatctccctgctgagagggctgaacgcgaaccagaacagcatgctgatcctccaggagagctgcgcggacgcgtccggggcgctggtggtgtactcgccgatcgacatcccggcggcgaacgtggtgatgagcggcgaggacccgtcgggcatccctttgctgccgtcgggcttcgccatcctgccggacgggcggccggggtcgtccggcgcgggcgcgtccagcagcgccgtcccgctcgcggcggcgccgccgcctccgggctgcgtggtcaccgtcgcgttccagatcctcgtcagcaacctgccgtcgtccaggctcaacgccgagtccgtcgccaccgtcaacagcctcatcggcaccaccgtgcagcagatcaaggcggcgctcaactgcgccggcccttgatcgcctcgcctcacccccgccaccctccgccgccacagtgactgacgagagttggtcggcccgttgaatgctcgcattcatggagcccacctgccgctgctcccgcgaagctggcgcaactctctcgctctccatcaacctatccaccaccaccaccaccaccataacagccttttttcccattagatgcagtgtcgttttcctttgctgcttaaaattcgcaggattcgccgaggttttcttcttcttttcttccttccttaggcattcgttcgtgcgccaaagatccatcgaaggctttacgagactgagggagtcaagaacgcaccatgctaccttgtccctttcctctcgctgctgccatttttcgcccctcgttcttccttttccctggcatggtcatccttgtcatgtcgtcattgtcgttggtgccgcagcagaggatgaatggttcgggtattgacttctgtccattaatgtaaagccttcaatgaacattcatttcgattataaatggaaaggaaaaaaaagttctggt

SEQ ID NO: 79214 - DNA, 1137 bp, Zea Mays
cgctatctttccagatttttccacatgactatataaccctaaacctaactttcccttcaacagacgccacgaacatcctcctcgccaccgccgccctgtcacccgccttggcgccgctggaccaatcgttcgtctcgtcgccgcagccccagccatctgcctcgatgccgccacaacagccgtctgcctcggcgccccagccgtcctcctcatcagtttgctcctcgctgccttgccgtgatcaagatgccccctggaaggatggctggggcaaggacacgcacagatcttgttggtgctaattactcagtatgataaggagagggctttaaaggtgatgaggaacaacaaaatgttgagcagccttggtatagctggattaacatcacttttcgatcaagtaataaggactgactctcgcttgtgaagactttgatccattgtatgaatttgatcataatgtggacaatgatcatcatgtggctgataaggacacaatgaagaaagcacttgtggctgagcctggagtagaaggaaaagaatctaagacccctatagaagtagttgctcaagtgttggcttcatcaaaatttcttcaaaatattggtctttacctgccacaaataaaagcggcaatggtggtgatcctacacgtgtggcagagcttgaatcagagaagcaaaactcattagaagttagagctcagttagatgccctcaagaagaaggtagaagaatcagaaaaatcaagggttaaggagttataaaagattaatgatctgcaaaaaggagcagatgagaccaatgctctccatcatcttctctttagcctaaataagtagttggtcgattcaatctaatgtggccctgttatctcatattgctatggccctgattttgttgtcctttcggtactgtacattgcactctacttaatggtagtttgatgaaatatgatgccagttttgagtttgctatgtccttttggtactgtccttagcaatgccggtgtcatgaaacatgatgctagttttgaaaattgtgatggatatgattgctgataaattatatctatgataatatgttgttaagtgtatgtgataatgtttgataattgtttaattacaatggattttgc

SEQ ID NO: 79215 - DNA, 1075 bp, Zea Mays
caatttgggtttaattattttattatgcctatgaggccatgcatggtgtacctttcaactatcaaagaaggaacaccaacatgtctactagttctagaggaacaaatggatccaagggggtgctagcacctaatgcagaagaccaagttggtagagtaactaggcaaaagacaaaggaactatcctcagctaagaaagatctacatggttcaactacaaaaatagagagcacacattgatttccaccaattgtcctgcacaacatgatgacgagatttagatttgtgatgaaggtcaaacagttgtcgtgacagataaatggataaagggaaaaagtatgggtatgcaccaccaactatggttgatctttttaaagagtgccattgtagcagtaagactagttttcatgagcctataaaggaagccattgacacaatgaagaaagcacttgtggctgagcctggagtagaaggaaaagaatctaagacccctatagaagtagttgctcaagtgttggcttcatcaaaatttcttcaaaatattggtctttacctgccacaaataaaagcggcaatggtggtgatcctacacgtgtggcagagcttgaatcagagaagcaaaactcattagaagttagagctcagttagatgccctcaagaagaaggtagaagaatcagaaaaatcaagggttaaggagttataaaagattaatgatctgcaaaaaggagcagatgagaccaatgctctccatcatcttctctttagcctaaataagtagttggtcgattcaatctaatgtggccctgttatctcatattgctatggccctgattttgttgtcctttcggtactgtacattgcactctacttaatggtagtttgatgaaatatgatgccagttttgagtttgctatgtccttttggtactgtccttagcaatgccggtgtcatgaaacatgatgctagttttgaaaattgtgatggatatgattgctgataaattatatctatgataatatgttgttaagtgtatgtgataatgtttgataattgtttaattacaatggattttgc

SEQ ID NO: 79216 - DNA, 3384 bp, Zea Mays
ctcattatcgcttcaaagccaagcgaaagccgaaagcccaaccgaaacgacccgcccaaccgcacgcgcctcgcctagttgcctgcggtttacacccacccattgcggcggtgcggcccgcgccaatggcgagctccaccacgctgcgctaggtctccgcctgcggcgatcgccatggcgtcgcggcaccggaatgcttctccggtgacggcagggaaggactcgccgcagcctgcctcggcggcaacctcgctgcggcttgtggcagagttcccgctcgacgcgcccgaggccaaggagagcgtgaccgttaccgtccgcttccggccgctcagctcgcaggaggttcggctgggggaagagatcgcttggtacgcggatggggacaccattgtgcggagcgagcagaatcacagcatcgcttacgcgtacgatcgggtcttcggaccaactacaacaacccgacacgtatatgatgctgcagctctgcatgttattagtggtgccatggagggaataaatggtacaatatttgcatatggagttacaagcagtgggaagacacatacgatgcatggagatcaaagatccccggggatcatacctttggctgtgaaagatgcatttagtataatacaggagactccaaagcgagagtttcttcttcgtgtatcatacttggaaatctataatgaggttgtaaacgatcttcttaatccttcgggtcagaacttacggattagggaggatcttcagggaacatttgtcgagggcataaaagaagaagtggtcttgtctcctgcacatgctttgtcccttattgcagccggagaagaacatagacatgttggatccacaaatttcaatttgctaagcagcaggagccatacaattttcacactgacaatagagagcagcggcccctgcagtgaatctagtgaagaggaagcggttaccttctcacagctgaacctcatcgatctggcaggttcagagagttcaagggctgaaactacaggagtacgccggaaggaaggatcttatatcaataaaagcttgctaactcttggaacggtgatatcaaaactgactgatggaaaagctactcatgttccatttcgagattccaaattgacacggttactacagtcatccttaagtggccagggacgtgtttctctaatatgcactgttactccagcatcaagcaattcagaagagactcgtaacacgttaaaatttgcccaccgtgcaaagcacattgagattcaagtgtcacaaaacaagattatggatgagaagtctttgataaagaagtaccagaatgaaatttgccaattaaaggaagagctagaccaactgaaaaggggtatactttctggcactccttcgaaagatgccacagaagacaatgtcattctttggaaacagaagctagaagatggtaatgtcaagctccagtctagactggaacaagaagaggcagctaaagctgctttgcttgcaaggatacaacgtctaacaaagctaatcctggtttccacaaaagcaactcagactcctagactgtcccaatgtcctaggccaaggagaagacattcttttggtgaagaggagttggcatgtctcccacacagaaggcgagatattgtattggatggtgaaagcaatgatttatttgttgctatggaaggatttgatgaaacatttgaagtttcttccaaaggagagaacaagaatcgcaaagggcttcttaactggttcaaacttcggaaacatgacggtggttctaatgctccaagcttaggtggtgaccaatctagcctgaggaaagcattggctgccccttggacacccgtagaaattggacttaattctcaaacagagcaagagatgtctaattctcccgagaatctatcagctaacctactgagcattgaccatgaagaatttcattctgatggactttatggagaagaagcttctttggtcaccagaaaaacatcagatcatgttgatttattgagagagcaactgaagatcctatcagaggaggttgcattacataaaagtgttctaaagcgactcgtcgaaggagctggaagaagcacaatgaatgggcatgtcgagatcgaaatgaaaaaggtcagtgacgagattaaggacaagcagcagcagatagcacatttagaaaggcagattaagggggagcttgaccagttagaacatacaccgtctcatgctacgctcctggagcaggtcaacgagaaagcatttgaacttgaggtgaagacagcagataacagaatattgcaagaccagctacaacaaaagacgagagagtgtcaggcattagaagaaacagttgcccacttacacgaacagctttcccaagctcttgaagctaatgatttattgtcagaaagcatcatatttcagcagtacacagacaacaaccttcaaactggatcgcaaattcacattgaaaatccagaatctatagatatctctgatgaactgcatcagaaggcagagcagtcagagattgatgaattgaagcaaagattgtgtgagcttactgaggccaaaactcaactagagacccacaatcagaagctgcaagaggaaagcatgtacgcaaaaggcctggcctcggctgcaggtgtggaactgaaagcactgtctggggaggtcaccaaactcatgaaccacaacgagaggctcgcgaacgatttggctttggcaagaaattcaacacgagtgagaagtggtcatagggttgggaggagggatagctatactaaacggcttgagccagcgagtagaagagatgttcatgctagcagtgagagggaatcagctctggaggtcatgcttatggcgaaagaccaaagagaggcagagctccaaaagaaaatcgaggagtccaagcagaaggaagccttcctggaaggagagcttgcgaacatgtgggttcttgtggcgaaactgaagaaaggtcaggtaattgaccaagatgatgtctcgatgccgtacccaatggatcgtgattcatgaccctagacaatgacaaaaacaattattgaatcggctatgcttcggcattgcactttccttgtctgtggactgtggtggtttgcaccagtgtgaatccgtgtatctatattgccggtagttgtaattagctggattggaatcttgtaatgtatataacaatcagattttgccttgttctcaggattgtcatgcctgtctagtttgttcagggctttcaacaattatactgtacatagattgtcgagtggaaagaaatgaaagcctgatgatgcatctcccccaaataaagtgttttgaacttatgaaatcacacattgcattttgaag

SEQ ID NO: 79217 - DNA, 3310 bp, Zea Mays
cgcttcaaagccaagcgaaagccgaaagcccaaccgaaacgacccgcccaaccgcacgcgcctcgcctagttgcctgcggtttacacccacccattgcggcggtgcggcccgcgccaatggcgagctccaccacgctgcgctaggtctccgcctgcggcgatcgccatggcgtcgcggcaccggaatgcttctccggtgacggcagggaaggactcgccgcagcctgcctcggcggcaacctcgctgcggcttgtggcagagttcccgctcgacgcgcccgaggccaaggagagcgtgaccgttaccgtccgcttccggccgctcagctcgcaggaggttcggctgggggaagagatcgcttggtacgcggatggggacaccattgtgcggagcgagcagaatcacagcatcgcttacgcgtacgatcgggtcttcggaccaactacaacaacccgacacgtatatgatgctgcagctctgcatgttattagtggtgccatggagggaataaatggtacaatatttgcatatggagttacaagcagtgggaagacacatacgatgcatggagatcaaagatccccggggatcatacctttggctgtgaaagatgcatttagtataatacaggagactccaaagcgagagtttcttcttcgtgtatcatacttggaaatctataatgaggttgtaaacgatcttcttaatccttcgggtcagaacttacggattagggaggatcttcagggaacatttgtcgagggcataaaagaagaagtggtcttgtctcctgcacatgctttgtcccttattgcagccggagaagaacatagacatgttggatccacaaatttcaatttgctaagcagcaggagccatacaattttcacactgaacctcatcgatctggcaggttcagagagttcaagggctgaaactacaggagtacgccggaaggaaggatcttatatcaataaaagcttgctaactcttggaacggtgatatcaaaactgactgatggaaaagctactcatgttccatttcgagattccaaattgacacggttactacagtcatccttaagtggccagggacgtgtttctctaatatgcactgttactccagcatcaagcaattcagaagagactcgtaacacgttaaaatttgcccaccgtgcaaagcacattgagattcaagtgtcacaaaacaagattatggatgagaagtctttgataaagaagtaccagaatgaaatttgccaattaaaggaagagctagaccaactgaaaaggggtatactttctggcactccttcgaaagatgccacagaagacaatgtcattctttggaaacagaagctagaagatggtaatgtcaagctccagtctagactggaacaagaagaggcagctaaagctgctttgcttgcaaggatacaacgtctaacaaagctaatcctggtttccacaaaagcaactcagactcctagactgtcccaatgtcctaggccaaggagaagacattcttttggtgaagaggagttggcatgtctcccacacagaaggcgagatattgtattggatggtgaaagcaatgatttatttgttgctatggaaggatttgatgaaacatttgaagtttcttccaaaggagagaacaagaatcgcaaagggcttcttaactggttcaaacttcggaaacatgacggtggttctaatgctccaagcttaggtggtgaccaatctagcctgaggaaagcattggctgccccttggacacccgtagaaattggacttaattctcaaacagagcaagagatgtctaattctcccgagaatctatcagctaacctactgagcattgaccatgaagaatttcattctgatggactttatggagaagaagcttctttggtcaccagaaaaacatcagatcatgttgatttattgagagagcaactgaagatcctatcagaggaggttgcattacataaaagtgttctaaagcgactcgtcgaaggagctggaagaagcacaatgaatgggcatgtcgagatcgaaatgaaaaaggtcagtgacgagattaaggacaagcagcagcagatagcacatttagaaaggcagattaagggggagcttgaccagttagaacatacaccgtctcatgctacgctcctggagcaggtcaacgagaaagcatttgaacttgaggtgaagacagcagataacagaatattgcaagaccagctacaacaaaagacgagagagtgtcaggcattagaagaaacagttgcccacttacacgaacagctttcccaagctcttgaagctaatgatttattgtcagaaagcatcatatttcagcagtacacagacaacaaccttcaaactggatcgcaaattcacattgaaaatccagaatctatagatatctctgatgaactgcatcagaaggcagagcagtcagagattgatgaattgaagcaaagattgtgtgagcttactgaggccaaaactcaactagagacccacaatcagaagctgcaagaggaaagcatgtacgcaaaaggcctggcctcggctgcaggtgtggaactgaaagcactgtctggggaggtcaccaaactcatgaaccacaacgagaggctcgcgaacgatttggctttggcaagaaattcaacacgagtgagaagtggtcatagggttgggaggagggatagctatactaaacggcttgagccagcgagtagaagagatgttcatgctagcagtgagagggaatcagctctggaggtcatgcttatggcgaaagaccaaagagaggcagagctccaaaagaaaatcgaggagtccaagcagaaggaagccttcctggaaggagagcttgcgaacatgtgggttcttgtggcgaaactgaagaaaggtcaggtaattgaccaagatgatgtctcgatgccgtacccaatggatcgtgattcatgaccctagacaatgacaaaaacaattattgaatcggctatgcttcggcattgcactttccttgtctgtggactgtggtggtttgcaccagtgtgaatccgtgtatctatattgccggtagttgtaattagctggattggaatcttgtaatgtatataacaatcagattttgccttgttctcaggattgtcatgcctgtctagtttgttcagggctttcaacaattatactgtacatagattgtcgagtggaaagaaatgaaagcctgatgatgcatctcccccaaataaagtgttttgaacttatgaaatcacacattgcattttgaag

SEQ ID NO: 79218 - DNA, 3278 bp, Zea Mays
cggcgatcgccatggcgtcgcggcaccggaatgcttctccggtgacggcagggaaggactcgccgcagcctgcctcggcggcaacctcgctgcggcttgtggcagagttcccgctcgacgcgcccgaggccaaggagagcgtgaccgttaccgtccgcttccggccgctcagctcgcaggaggttcggctgggggaagagatcgcttggtacgcggatggggacaccattgtgcggagcgagcagaatcacagcatcgcttacgcgtacgatcgggtcttcggaccaactacaacaacccgacacgtatatgatgctgcagctctgcatgttattagtggtgccatggagggaataaatggtacaatatttgcatatggagttacaagcagtgggaagacacatacgatgcatggagatcaaagatccccggggatcatacctttggctgtgaaagatgcatttagtataatacaggagactccaaagcgagagtttcttcttcgtgtatcatacttggaaatctataatgaggttgtaaacgatcttcttaatccttcgggtcagaacttacggattagggaggatcttcagggaacatttgtcgagggcataaaagaagaagtggtcttgtctcctgcacatgctttgtcccttattgcagccggagaagaacatagacatgttggatccacaaatttcaatttgctaagcagcaggagccatacaattttcacactgacaatagagagcagcggcccctgcagtgaatctagtgaagaggaagcggttaccttctcacagctgaacctcatcgatctggcaggttcagagagttcaagggctgaaactacaggagtacgccggaaggaaggatcttatatcaataaaagcttgctaactcttggaacggtgatatcaaaactgactgatggaaaagctactcatgttccatttcgagattccaaattgacacggttactacagtcatccttaagtggccagggacgtgtttctctaatatgcactgttactccagcatcaagcaattcagaagagactcgtaacacgttaaaatttgcccaccgtgcaaagcacattgagattcaagtgtcacaaaacaagattatggatgagaagtctttgataaagaagtaccagaatgaaatttgccaattaaaggaagagctagaccaactgaaaaggggtatactttctggcactccttcgaaagatgccacagaagacaatgtcattctttggaaacagaagctagaagatggtaatgtcaagctccagtctagactggaacaagaagaggcagctaaagctgctttgcttgcaaggatacaacgtctaacaaagctaatcctggtttccacaaaagcaactcagactcctagactgtcccaatgtcctaggccaaggagaagacattcttttggtgaagaggagttggcatgtctcccacacagaaggcgagatattgtattggatggtgaaagcaatgatttatttgttgctatggaaggatttgatgaaacatttgaagtttcttccaaaggagagaacaagaatcgcaaagggcttcttaactggttcaaacttcgggtatacaaatcagacaccgtataatccactgcattggcaattcccagtatagtgacaaaacatgacggtggttctaatgctccaagcttaggtggtgaccaatctagcctgaggaaagcattggctgccccttggacacccgtagaaattggacttaattctcaaacagagcaagagatgtctaattctcccgagaatctatcagctaacctactgagcattgaccatgaagaatttcattctgatggactttatggagaagaagcttctttggtcaccagaaaaacatcagatcatgttgatttattgagagagcaactgaagatcctatcagaggaggttgcattacataaaagtgttctaaagcgactcgtcgaaggagctggaagaagcacaatgaatgggcatgtcgagatcgaaatgaaaaaggtcagtgacgagattaaggacaagcagcagcagatagcacatttagaaaggcagattaagggggagcttgaccagttagaacatacaccgtctcatgctacgctcctggagcaggtcaacgagaaagcatttgaacttgaggtgaagacagcagataacagaatattgcaagaccagctacaacaaaagacgagagagtgtcaggcattagaagaaacagttgcccacttacacgaacagctttcccaagctcttgaagctaatgatttattgtcagaaagcatcatatttcagcagtacacagacaacaaccttcaaactggatcgcaaattcacattgaaaatccagaatctatagatatctctgatgaactgcatcagaaggcagagcagtcagagattgatgaattgaagcaaagattgtgtgagcttactgaggccaaaactcaactagagacccacaatcagaagctgcaagaggaaagcatgtacgcaaaaggcctggcctcggctgcaggtgtggaactgaaagcactgtctggggaggtcaccaaactcatgaaccacaacgagaggctcgcgaacgatttggctttggcaagaaattcaacacgagtgagaagtggtcatagggttgggaggagggatagctatactaaacggcttgagccagcgagtagaagagatgttcatgctagcagtgagagggaatcagctctggaggtcatgcttatggcgaaagaccaaagagaggcagagctccaaaagaaaatcgaggagtccaagcagaaggaagccttcctggaaggagagcttgcgaacatgtgggttcttgtggcgaaactgaagaaaggtcaggtaattgaccaagatgatgtctcgatgccgtacccaatggatcgtgattcatgaccctagacaatgacaaaaacaattattgaatcggctatgcttcggcattgcactttccttgtctgtggactgtggtggtttgcaccagtgtgaatccgtgtatctatattgccggtagttgtaattagctggattggaatcttgtaatgtatataacaatcagattttgccttgttctcaggattgtcatgcctgtctagtttgttcagggctttcaacaattatactgtacatagattgtcgagtggaaagaaatgaaagcctgatgatgcatctcccccaaataaagtgttttgaacttatgaaatcacacattgcattttgaag

SEQ ID NO: 79219 - DNA, 696 bp, Zea Mays
gcgatcgccatggcgtcgcggcaccggaatgcttctccggtgacggcagggaaggactcgccgcagcctgcctcggcggcaacctcgctgcggcttgtggcagagttcccgctcgacgcgcccgaggccaaggagagcgtgaccgttaccgtccgcttccggccgctcagctcgcaggaggttcggctgggggaagagatcgcttggtacgcggatggggacaccattgtgcggagcgagcagaatcacagcatcgcttacgcgtacgatcgggtcttcggaccaactacaacaacccgacacgtatatgatgctgcagctctgcatgttattagtggtgccatggagggaataaatggtacaatatttgcatatggagttacaagcagtgggaagacacatacgatgcatggagatcaaagatccccggggatcatacctttggctgtgaaagatgcatttagtataatacaggagactccaaagcgagagtttcttcttcgtgtatcatacttggaaatctataatgagcttctggccccggatgggattttttccaccagctcaacctatagagcttagttcctaggctctcacaggcgccacaaggtcagccacatctggacagcaagatctgagaataaatgcaaactatttgcatggattcttatccaaaataagttgctcatgtctgac

SEQ ID NO: 79220 - DNA, 3270 bp, Zea Mays
atggcgtcgcggcaccggaatgcttctccggtgacggcagggaaggactcgccgcagcctgcctcggcggcaacctcgctgcggcttgtggcagagttcccgctcgacgcgcccgaggccaaggagagcgtgaccgttaccgtccgcttccggccgctcagctcgcaggaggttcggctgggggaagagatcgcttggtacgcggatggggacaccattgtgcggagcgagcagaatcacagcatcgcttacgcgtacgatcgggtcttcggaccaactacaacaacccgacacgtatatgatgctgcagctctgcatgttattagtggtgccatggagggaataaatggtacaatatttgcatatggagttacaagcagtgggaagacacatacgatgcatggagatcaaagatccccggggatcatacctttggctgtgaaagatgcatttagtataatacaggagactccaaagcgagagtttcttcttcgtgtatcatacttggaaatctataatgaggttgtaaacgatcttcttaatccttcgggtcagaacttacggattagggaggatcttcagggaacatttgtcgagggcataaaagaagaagtggtcttgtctcctgcacatgctttgtcccttattgcagccggagaagaacatagacatgttggatccacaaatttcaatttgctaagcagcaggagccatacaattttcacactgaacctcatcgatctggcaggttcagagagttcaagggctgaaactacaggagtacgccggaaggaaggatcttatatcaataaaagcttgctaactcttggaacggtgatatcaaaactgactgatggaaaagctactcatgttccatttcgagattccaaattgacacggttactacagtcatccttaagtggccagggacgtgtttctctaatatgcactgttactccagcatcaagcaattcagaagagactcgtaacacgttaaaatttgcccaccgtgcaaagcacattgagattcaagtgtcacaaaacaagattatggatgagaagtctttgataaagaagtaccagaatgaaatttgccaattaaaggaagagctagaccaactgaaaaggggtatactttctggcactccttcgaaagatgccacagaagacaatgtcattctttggaaacagaagctagaagatggtaatgtcaagctccagtctagactggaacaagaagaggcagctaaagctgctttgcttgcaaggatacaacgtctaacaaagctaatcctggtttccacaaaagcaactcagactcctagactgtcccaatgtcctaggccaaggagaagacattcttttggtgaagaggagttggcatgtctcccacacagaaggcgagatattgtattggatggtgaaagcaatgatttatttgttgctatggaaggatttgatgaaacatttgaagtttcttccaaaggagagaacaagaatcgcaaagggcttcttaactggttcaaacttcgggtatacaaatcagacaccgtataatccactgcattggcaattcccagtatagtgacaaaacatgacggtggttctaatgctccaagcttaggtggtgaccaatctagcctgaggaaagcattggctgccccttggacacccgtagaaattggacttaattctcaaacagagcaagagatgtctaattctcccgagaatctatcagctaacctactgagcattgaccatgaagaatttcattctgatggactttatggagaagaagcttctttggtacaatatatgagcacatctttctttgtttattctactactcatctaatcagaaccaatgcaggatacgtcaccagaaaaacatcagatcatgttgatttattgagagagcaactgaagatcctatcagaggaggttgcattacataaaagtgttctaaagcgactcgtcgaaggagctggaagaagcacaatgaatgggcatgtcgagatcgaaatgaaaaaggtcagtgacgagattaaggacaagcagcagcagatagcacatttagaaaggcagattaagggggagcttgaccagttagaacatacaccgtctcatgctacgctcctggagcaggtcaacgagaaagcatttgaacttgaggtgaagacagcagataacagaatattgcaagaccagctacaacaaaagacgagagagtgtcaggcattagaagaaacagttgcccacttacacgaacagctttcccaagctcttgaagctaatgatttattgtcagaaagcatcatatttcagcagtacacagacaacaaccttcaaactggatcgcaaattcacattgaaaatccagaatctatagatatctctgatgaactgcatcagaaggcagagcagtcagagattgatgaattgaagcaaagattgtgtgagcttactgaggccaaaactcaactagagacccacaatcagaagctgcaagaggaaagcatgtacgcaaaaggcctggcctcggctgcaggtgtggaactgaaagcactgtctggggaggtcaccaaactcatgaaccacaacgagaggctcgcgaacgatttggctttggcaagaaattcaacacgagtgagaagtggtcatagggttgggaggagggatagctatactaaacggcttgagccagcgagtagaagagatgttcatgctagcagtgagagggaatcagctctggaggtcatgcttatggcgaaagaccaaagagaggcagagctccaaaagaaaatcgaggagtccaagcagaaggaagccttcctggaaggagagcttgcgaacatgtgggttcttgtggcgaaactgaagaaaggtcaggtaattgaccaagatgatgtctcgatgccgtacccaatggatcgtgattcatgaccctagacaatgacaaaaacaattattgaatcggctatgcttcggcattgcactttccttgtctgtggactgtggtggtttgcaccagtgtgaatccgtgtatctatattgccggtagttgtaattagctggattggaatcttgtaatgtatataacaatcagattttgccttgttctcaggattgtcatgcctgtctagtttgttcagggctttcaacaattatactgtacatagattgtcgagtggaaagaaatgaaagcctgatgatgcatctcccccaaataaagtgttttgaacttatgaaatcacacattgcattttgaag

SEQ ID NO: 79221 - DNA, 3211 bp, Zea Mays
atggcgtcgcggcaccggaatgcttctccggtgacggcagggaaggactcgccgcagcctgcctcggcggcaacctcgctgcggcttgtggcagagttcccgctcgacgcgcccgaggccaaggagagcgtgaccgttaccgtccgcttccggccgctcagctcgcaggaggttcggctgggggaagagatcgcttggtacgcggatggggacaccattgtgcggagcgagcagaatcacagcatcgcttacgcgtacgatcgggtcttcggaccaactacaacaacccgacacgtatatgatgctgcagctctgcatgttattagtggtgccatggagggaataaatggtacaatatttgcatatggagttacaagcagtgggaagacacatacgatgcatggagatcaaagatccccggggatcatacctttggctgtgaaagatgcatttagtataatacaggagactccaaagcgagagtttcttcttcgtgtatcatacttggaaatctataatgaggttgtaaacgatcttcttaatccttcgggtcagaacttacggattagggaggatcttcagggaacatttgtcgagggcataaaagaagaagtggtcttgtctcctgcacatgctttgtcccttattgcagccggagaagaacatagacatgttggatccacaaatttcaatttgctaagcagcaggagccatacaattttcacactgaacctcatcgatctggcaggttcagagagttcaagggctgaaactacaggagtacgccggaaggaaggatcttatatcaataaaagcttgctaactcttggaacggtgatatcaaaactgactgatggaaaagctactcatgttccatttcgagattccaaattgacacggttactacagtcatccttaagtggccagggacgtgtttctctaatatgcactgttactccagcatcaagcaattcagaagagactcgtaacacgttaaaatttgcccaccgtgcaaagcacattgagattcaagtgtcacaaaacaagattatggatgagaagtctttgataaagaagtaccagaatgaaatttgccaattaaaggaagagctagaccaactgaaaaggggtatactttctggcactccttcgaaagatgccacagaagacaatgtcattctttggaaacagaagagaagatggtaatgtcaagctccagtctagactggaacaagaagaggcagctaaagctgctttgcttgcaaggatacaacgtctaacaaagctaatcctggtttccacaaaagcaactcagactcctagactgtcccaatgtcctaggccaaggagaagacattcttttggtgaagaggagttggcatgtctcccacacagaaggcgagatattgtattggatggtgaaagcaatgatttatttgttgctatggaaggatttgatgaaacatttgaagtttcttccaaaggagagaacaagaatcgcaaagggcttcttaactggttcaaacttcggaaacatgacggtggttctaatgctccaagcttaggtggtgaccaatctagcctgaggaaagcattggctgccccttggacacccgtagaaattggacttaattctcaaacagagcaagagatgtctaattctcccgagaatctatcagctaacctactgagcattgaccatgaagaatttcattctgatggactttatggagaagaagcttctttggtacaatatatgagcacatctttctttgtttattctactactcatctaatcagaaccaatgcaggatacgtcaccagaaaaacatcagatcatgttgatttattgagagagcaactgaagatcctatcagaggaggttgcattacataaaagtgttctaaagcgactcgtcgaaggagctggaagaagcacaatgaatgggcatgtcgagatcgaaatgaaaaaggtcagtgacgagattaaggacaagcagcagcagatagcacatttagaaaggcagattaagggggagcttgaccagttagaacatacaccgtctcatgctacgctcctggagcaggtcaacgagaaagcatttgaacttgaggtgaagacagcagataacagaatattgcaagaccagctacaacaaaagacgagagagtgtcaggcattagaagaaacagttgcccacttacacgaacagctttcccaagctcttgaagctaatgatttattgtcagaaagcatcatatttcagcagtacacagacaacaaccttcaaactggatcgcaaattcacattgaaaatccagaatctatagatatctctgatgaactgcatcagaaggcagagcagtcagagattgatgaattgaagcaaagattgtgtgagcttactgaggccaaaactcaactagagacccacaatcagaagctgcaagaggaaagcatgtacgcaaaaggcctggcctcggctgcaggtgtggaactgaaagcactgtctggggaggtcaccaaactcatgaaccacaacgagaggctcgcgaacgatttggctttggcaagaaattcaacacgagtgagaagtggtcatagggttgggaggagggatagctatactaaacggcttgagccagcgagtagaagagatgttcatgctagcagtgagagggaatcagctctggaggtcatgcttatggcgaaagaccaaagagaggcagagctccaaaagaaaatcgaggagtccaagcagaaggaagccttcctggaaggagagcttgcgaacatgtgggttcttgtggcgaaactgaagaaaggtcaggtaattgaccaagatgatgtctcgatgccgtacccaatggatcgtgattcatgaccctagacaatgacaaaaacaattattgaatcggctatgcttcggcattgcactttccttgtctgtggactgtggtggtttgcaccagtgtgaatccgtgtatctatattgccggtagttgtaattagctggattggaatcttgtaatgtatataacaatcagattttgccttgttctcaggattgtcatgcctgtctagtttgttcagggctttcaacaattatactgtacatagattgtcgagtggaaagaaatgaaagcctgatgatgcatctcccccaaataaagtgttttgaacttatgaaatcacacattgcattttgaag

SEQ ID NO: 79222 - DNA, 2426 bp, Zea Mays
gaagcggttaccttctcacagctggttcagagagttcaagggctgaaactacaggagtacgccggaaggaaggatcttatatcaataaaagcttgctaactcttggaacggtgatatcaaaactgactgatggaaaagctactcatgttccatttcgagattccaaattgacacggttactacagtcatccttaagtggccagggacgtgtttctctaatatgcactgttactccagcatcaagcaattcagaagagactcgtaacacgttaaaatttgcccaccgtgcaaagcacattgagattcaagtgtcacaaaacaagattatggatgagaagtctttgataaagaagtaccagaatgaaatttgccaattaaaggaagagctagaccaactgaaaaggggtatactttctggcactccttcgaaagatgccacagaagacaatgtcattctttggaaacagaagctagaagatggtaatgtcaagctccagtctagactggaacaagaagaggcagctaaagctgctttgcttgcaaggatacaacgtctaacaaagctaatcctggtttccacaaaagcaactcagactcctagactgtcccaatgtcctaggccaaggagaagacattcttttggtgaagaggagttggcatgtctcccacacagaaggcgagatattgtattggatggtgaaagcaatgatttatttgttgctatggaaggatttgatgaaacatttgaagtttcttccaaaggagagaacaagaatcgcaaagggcttcttaactggttcaaacttcggaaacatgacggtggttctaatgctccaagcttaggtggtgaccaatctagcctgaggaaagcattggctgccccttggacacccgtagaaattggacttaattctcaaacagagcaagagatgtctaattctcccgagaatctatcagctaacctactgagcattgaccatgaagaatttcattctgatggactttatggagaagaagcttctttggtacaagtcaccagaaaaacatcagatcatgttgatttattgagagagcaactgaagatcctatcagaggaggttgcattacataaaagtgttctaaagcgactcgtcgaaggagctggaagaagcacaatgaatgggcatgtcgagatcgaaatgaaaaaggtcagtgacgagattaaggacaagcagcagcagatagcacatttagaaaggcagattaagggggagcttgaccagttagaacatacaccgtctcatgctacgctcctggagcaggtcaacgagaaagcatttgaacttgaggtgaagacagcagataacagaatattgcaagaccagctacaacaaaagacgagagagtgtcaggcattagaagaaacagttgcccacttacacgaacagctttcccaagctcttgaagctaatgatttattgtcagaaagcatcatatttcagcagtacacagacaacaaccttcaaactggatcgcaaattcacattgaaaatccagaatctatagatatctctgatgaactgcatcagaaggcagagcagtcagagattgatgaattgaagcaaagattgtgtgagcttactgaggccaaaactcaactagagacccacaatcagaagctgcaagaggaaagcatgtacgcaaaaggcctggcctcggctgcaggtgtggaactgaaagcactgtctggggaggtcaccaaactcatgaaccacaacgagaggctcgcgaacgatttggctttggcaagaaattcaacacgagtgagaagtggtcatagggttgggaggagggatagctatactaaacggcttgagccagcgagtagaagagatgttcatgctagcagtgagagggaatcagctctggaggtcatgcttatggcgaaagaccaaagagaggcagagctccaaaagaaaatcgaggagtccaagcagaaggaagccttcctggaaggagagcttgcgaacatgtgggttcttgtggcgaaactgaagaaaggtcaggtaattgaccaagatgatgtctcgatgccgtacccaatggatcgtgattcatgaccctagacaatgacaaaaacaattattgaatcggctatgcttcggcattgcactttccttgtctgtggactgtggtggtttgcaccagtgtgaatccgtgtatctatattgccggtagttgtaattagctggattggaatcttgtaatgtatataacaatcagattttgccttgttctcaggattgtcatgcctgtctagtttgttcagggctttcaacaattatactgtacatagattgtcgagtggaaagaaatgaaagcctgatgatgcatctcccccaaataaagtgttttgaacttatgaaatcacacattgcattttgaag

SEQ ID NO: 79223 - DNA, 1599 bp, Zea Mays
ggcaattcccagtatagtgacagtggtgaccaatctagcctgaggaaagcattggctgccccttggacacccgtagaaattggacttaattctcaaacagagcaagagatgtctaattctcccgagaatctatcagctaacctactgagcattgaccatgaagaatttcattctgatggactttatggagaagaagcttctttggtcaccagaaaaacatcagatcatgttgatttattgagagagcaactgaagatcctatcagaggaggttgcattacataaaagtgttctaaagcgactcgtcgaaggagctggaagaagcacaatgaatgggcatgtcgagatcgaaatgaaaaaggtcagtgacgagattaaggacaagcagcagcagatagcacatttagaaaggcagattaagggggagcttgaccagttagaacatacaccgtctcatgctacgctcctggagcaggtcaacgagaaagcatttgaacttgaggtgaagacagcagataacagaatattgcaagaccagctacaacaaaagacgagagagtgtcaggcattagaagaaacagttgcccacttacacgaacagctttcccaagctcttgaagctaatgatttattgtcagaaagcatcatatttcagcagtacacagacaacaaccttcaaactggatcgcaaattcacattgaaaatccagaatctatagatatctctgatgaactgcatcagaaggcagagcagtcagagattgatgaattgaagcaaagattgtgtgagcttactgaggccaaaactcaactagagacccacaatcagaagctgcaagaggaaagcatgtacgcaaaaggcctggcctcggctgcaggtgtggaactgaaagcactgtctggggaggtcaccaaactcatgaaccacaacgagaggctcgcgaacgatttggctttggcaagaaattcaacacgagtgagaagtggtcatagggttgggaggagggatagctatactaaacggcttgagccagcgagtagaagagatgttcatgctagcagtgagagggaatcagctctggaggtcatgcttatggcgaaagaccaaagagaggcagagctccaaaagaaaatcgaggagtccaagcagaaggaagccttcctggaaggagagcttgcgaacatgtgggttcttgtggcgaaactgaagaaaggtcaggtaattgaccaagatgatgtctcgatgccgtacccaatggatcgtgattcatgaccctagacaatgacaaaaacaattattgaatcggctatgcttcggcattgcactttccttgtctgtggactgtggtggtttgcaccagtgtgaatccgtgtatctatattgccggtagttgtaattagctggattggaatcttgtaatgtatataacaatcagattttgccttgttctcaggattgtcatgcctgtctagtttgttcagggctttcaacaattatactgtacatagattgtcgagtggaaagaaatgaaagcctgatgatgcatctcccccaaataaagtgttttgaacttatgaaatcacacattgcattttgaag

SEQ ID NO: 79224 - DNA, 1858 bp, Zea Mays
ctactctataagacgaaattgtaggcgttcacaagtgcaccgtgttctgcccgtcctcccctcgcgcaatcgcaggaatccccgccatcatcgcctctcgcgcaccttccttcgacaaccttccataggaatcatccatcgcgtctgtgctccccctcgcgcaatcctaccgcactcgcctcccgaaatcggccgccacggcgcctcacgccatggctcctgcccagcagctgcagctccctccgcctccggtggtctggcacgccgcctcctcgcccagatccgtccgtggtccgcccctccggcctcgcccagctccaaagctccctcctgctcgcgggcacgcgatctcgccctgggggccatgccctaggccgtcgtctcggctcgcgtccacctcgtccagcgtcacaagtggcgccgccgccggtgtcggctacttcgatctcccgcccgccgtcgactcgtccagcagtacctacgctctgaatccgatcccctcgccggtggcgacggcgtcggctgacccatccccaaactcggcgcgggagcccaagcggaagcgaactggcccgtgcgtcccccgcatcaactcgaaccgaagggacgaccaagcggagtctagactcaagagcaaccgcgacctcccggatctctctcccacccacgcctcgtcaccgtcgtcttctgctgcactgcagcgatggcctcccccgacctgctcttcaatctgcggaacctcttctacctgggcgcctaccaggcagccattaacaacatcgacatcctgggcctcgacgccgccgccgccgctgagcgcgacgccatcgtcttccgctcctacatcgccctcggctcctaccaggtgcgaacacatctggcgtcaggcgcctcagccgctacctcgctgcaggccgtgaagctgctcgctctgtacctcactggagacaaggtatgtcatgaagaagatcaacatctccaagcagaacgacaagttccagcagaccgcttaccaagagggtgaaatagggaacgatgatacactatggcggatttctccaaggcgttaaggtggcaaagtatcccaggtgcagccatccagagcttgtgatgggtctcagggagcacactgacgctgggggggatcatacttctatttcaagatgaactgatcccaggtctagagtttctgaaagacggtaggtggatggcaatacctccaacacaaggcaacatgatctttgtaaaccttggagatcagattgaagtgataaccaatggaacctacaagagcatatgccaccgggtccttcccaacaagaacgggagccgcctatccattgcaacattctataaccctggtgccgacgccataatctgcctagcttcaaagctcacatatcctagccaatatcgtttccaagactaccttgatttctattctactaccaagtttactgataaggtatttaggttccagactacaaaggcaatattgaagtgaataatcacagcagaagcctggagaaaagaagtgtctgacttgttctacaatactgcatcagtgcatagatgcgcttgtatttactgctagctcctaaggaacaacgaggtgttaaaatatatatttttactttcagttgttttctgtttgaagactaaacaacctgcactacttgtacttaatgtaatatattacatgtgggttccttcagacagtgatatgacatgttaattatgaaggtgtcaatgatactacttgtacttaatgtaatatagatctgaactgttgtagtaatccagacatccaattatgagtgggttccttcagatagtagtaaacttgtctagccttttt

SEQ ID NO: 79225 - DNA, 1913 bp, Zea Mays
ctactctataagacgaaattgtaggcgttcacaagtgcaccgtgttctgcccgtcctcccctcgcgcaatcgcaggaatccccgccatcatcgcctctcgcgcaccttccttcgacaaccttccataggaatcatccatcgcgtctgtgctccccctcgcgcaatcctaccgcactcgcctcccgaaatcggccgccacggcgcctcacgccatggctcctgcccagcagctgcagctccctccgcctccggtggtctggcacgccgcctcctcgcccagatccgtccgtggtccgcccctccggcctcgcccagctccaaagctccctcctgctcgcgggcacgcgatctcgccctgggggccatgccctaggccgtcgtctcggctcgcgtccacctcgtccagcgtcacaagtggcgccgccgccggtgtcggctacttcgatctcccgcccgccgtcgactcgtccagcagtacctacgctctgaatccgatcccctcgccggtggcgacggcgtcggctgacccatccccaaactcggcgcgggagcccaagcggaagcgaactggcccgtgcgtcccccgcatcaactcgaaccgaagggacgaccaagcggagtctagactcaagagcaaccgcgacctcccggatctctctcccacccacgcctcgtcaccgtcgtcttctgctgcactgcagcgatggcctcccccgacctgctcttcaatctgcggaacctcttctacctgggcgcctaccaggcagccattaacaacatcgacatcctgggcctcgacgccgccgccgccgctgagcgcgacgccatcgtcttccgctcctacatcgccctcggctcctaccaggtgcgaacacatctggcgtcaggcgcctcagccgctacctcgctgcaggccgtgaagctgctcgctctgtacctcactggagacaagcgtaggtatgtcatgaagaagatcaacatctccaagcagaacgacaagttccagcagaccgcttaccaagaggtaacgcatgtgctcctaacacaggaagacaagaagactcttctagagcgggtgaaatagggaacgatgatacactatggcggatttctccaaggcgttaaggtggcaaagtatcccaggtgcagccatccagagcttgtgatgggtctcagggagcacactgacgctgggggggatcatacttctatttcaagatgaactgatcccaggtctagagtttctgaaagacggtaggtggatggcaatacctccaacacaaggcaacatgatctttgtaaaccttggagatcagattgaagtgataaccaatggaacctacaagagcatatgccaccgggtccttcccaacaagaacgggagccgcctatccattgcaacattctataaccctggtgccgacgccataatctgcctagcttcaaagctcacatatcctagccaatatcgtttccaagactaccttgatttctattctactaccaagtttactgataaggtatttaggttccagactacaaaggcaatattgaagtgaataatcacagcagaagcctggagaaaagaagtgtctgacttgttctacaatactgcatcagtgcatagatgcgcttgtatttactgctagctcctaaggaacaacgaggtgttaaaatatatatttttactttcagttgttttctgtttgaagactaaacaacctgcactacttgtacttaatgtaatatattacatgtgggttccttcagacagtgatatgacatgttaattatgaaggtgtcaatgatactacttgtacttaatgtaatatagatctgaactgttgtagtaatccagacatccaattatgagtgggttccttcagatagtagtaaacttgtctagccttttt

SEQ ID NO: 79226 - DNA, 1989 bp, Zea Mays
ctactctataagacgaaattgtaggcgttcacaagtgcaccgtgttctgcccgtcctcccctcgcgcaatcgcaggaatccccgccatcatcgcctctcgcgcaccttccttcgacaaccttccataggaatcatccatcgcgtctgtgctccccctcgcgcaatcctaccgcactcgcctcccgaaatcggccgccacggcgcctcacgccatggctcctgcccagcagctgcagctccctccgcctccggtggtctggcacgccgcctcctcgcccagatccgtccgtggtccgcccctccggcctcgcccagctccaaagctccctcctgctcgcgggcacgcgatctcgccctgggggccatgccctaggccgtcgtctcggctcgcgtccacctcgtccagcgtcacaagtggcgccgccgccggtgtcggctacttcgatctcccgcccgccgtcgactcgtccagcagtacctacgctctgaatccgatcccctcgccggtggcgacggcgtcggctgacccatccccaaactcggcgcgggagcccaagcggaagcgaactggcccgtgcgtcccccgcatcaactcgaaccgaagggacgaccaagcggagtctagactcaagagcaaccgcgacctcccggatctctctcccacccacgcctcgtcaccgtcgtcttctgctgcactgcagcgatggcctcccccgacctgctcttcaatctgcggaacctcttctacctgggcgcctaccaggcagccattaacaacatcgacatcctgggcctcgacgccgccgccgccgctgagcgcgacgccatcgtcttccgctcctacatcgccctcggctcctaccaggtgcgaacacatctggcgtcaggcgcctcagccgctacctcgctgcaggccgtgaagctgctcgctctgtacctcactggagacaagcgtaggtatgtcatgaagaagatcaacatctccaagcagaacgacaagttccagcagaccgcttaccaagaggtaacgcatgtgctcctaacacaggaagacaagaagactcttctagagcggtacaccgtgatccagtacccttccttccaccgcggctgaggagcaactctccctcgctgtccacttcctcttgttggtgaaatagggaacgatgatacactatggcggatttctccaaggcgttaaggtggcaaagtatcccaggtgcagccatccagagcttgtgatgggtctcagggagcacactgacgctgggggggatcatacttctatttcaagatgaactgatcccaggtctagagtttctgaaagacggtaggtggatggcaatacctccaacacaaggcaacatgatctttgtaaaccttggagatcagattgaagtgataaccaatggaacctacaagagcatatgccaccgggtccttcccaacaagaacgggagccgcctatccattgcaacattctataaccctggtgccgacgccataatctgcctagcttcaaagctcacatatcctagccaatatcgtttccaagactaccttgatttctattctactaccaagtttactgataaggtatttaggttccagactacaaaggcaatattgaagtgaataatcacagcagaagcctggagaaaagaagtgtctgacttgttctacaatactgcatcagtgcatagatgcgcttgtatttactgctagctcctaaggaacaacgaggtgttaaaatatatatttttactttcagttgttttctgtttgaagactaaacaacctgcactacttgtacttaatgtaatatattacatgtgggttccttcagacagtgatatgacatgttaattatgaaggtgtcaatgatactacttgtacttaatgtaatatagatctgaactgttgtagtaatccagacatccaattatgagtgggttccttcagatagtagtaaacttgtctagccttttt

SEQ ID NO: 79227 - DNA, 1895 bp, Zea Mays
cgaaattgtaggcgttcacaagtgcaccgtgttctgcccgtcctcccctcgcgcaatcgcaggaatccccgccatcatcgcctctcgcgcaccttccttcgacaaccttccataggaatcatccatcgcgtctgtgctccccctcgcgcaatcctaccgcactcgcctcccgaaatcggccgccacggcgcctcacgccatggctcctgcccagcagctgcagctccctccgcctccggtggtctggcacgccgcctcctcgcccagatccgtccgtggtccgcccctccggcctcgcccagctccaaagctccctcctgctcgcgggcacgcgatctcgccctgggggccatgccctaggccgtcgtctcggctcgcgtccacctcgtccagcgtcacaagtggcgccgccgccggtgtcggctacttcgatctcccgcccgccgtcgactcgtccagcagtacctacgctctgaatccgatcccctcgccggtggcgacggcgtcggctgacccatccccaaactcggcgcgggagcccaagcggaagcgaactggcccgtgcgtcccccgcatcaactcgaaccgaagggacgaccaagcggagtctagactcaagagcaaccgcgacctcccggatctctctcccacccacgcctcgtcaccgtcgtcttctgctgcactgcagcgatggcctcccccgacctgctcttcaatctgcggaacctcttctacctgggcgcctaccaggcagccattaacaacatcgacatcctgggcctcgacgccgccgccgccgctgagcgcgacgccatcgtcttccgctcctacatcgccctcggctcctaccaggtgcgaacacatctggcgtcaggcgcctcagccgctacctcgctgcaggccgtgaagctgctcgctctgtacctcactggagacaaggtatgtcatgaagaagatcaacatctccaagcagaacgacaagttccagcagaccgcttaccaagaggtaacgcatgtgctcctaacacaggaagacaagaagactcttctagagcgggtgaaatagggaacgatgatacactatggcggatttctccaaggcgttaaggtggcaaagtatcccaggtgcagccatccagagcttgtgatgggtctcagggagcacactgacgctgggggggatcatacttctatttcaagatgaactgatcccaggtctagagtttctgaaagacggtaggtggatggcaatacctccaacacaaggcaacatgatctttgtaaaccttggagatcagattgaagtgataaccaatggaacctacaagagcatatgccaccgggtccttcccaacaagaacgggagccgcctatccattgcaacattctataaccctggtgccgacgccataatctgcctagcttcaaagctcacatatcctagccaatatcgtttccaagactaccttgatttctattctactaccaagtttactgataaggtatttaggttccagactacaaaggcaatattgaagtgaataatcacagcagaagcctggagaaaagaagtgtctgacttgttctacaatactgcatcagtgcatagatgcgcttgtatttactgctagctcctaaggaacaacgaggtgttaaaatatatatttttactttcagttgttttctgtttgaagactaaacaacctgcactacttgtacttaatgtaatatattacatgtgggttccttcagacagtgatatgacatgttaattatgaaggtgtcaatgatactacttgtacttaatgtaatatagatctgaactgttgtagtaatccagacatccaattatgagtgggttccttcagatagtagtaaacttgtctagccttttt

SEQ ID NO: 79228 - DNA, 1968 bp, Zea Mays
cgaaattgtaggcgttcacaagtgcaccgtgttctgcccgtcctcccctcgcgcaatcgcaggaatccccgccatcatcgcctctcgcgcaccttccttcgacaaccttccataggaatcatccatcgcgtctgtgctccccctcgcgcaatcctaccgcactcgcctcccgaaatcggccgccacggcgcctcacgccatggctcctgcccagcagctgcagctccctccgcctccggtggtctggcacgccgcctcctcgcccagatccgtccgtggtccgcccctccggcctcgcccagctccaaagctccctcctgctcgcgggcacgcgatctcgccctgggggccatgccctaggccgtcgtctcggctcgcgtccacctcgtccagcgtcacaagtggcgccgccgccggtgtcggctacttcgatctcccgcccgccgtcgactcgtccagcagtacctacgctctgaatccgatcccctcgccggtggcgacggcgtcggctgacccatccccaaactcggcgcgggagcccaagcggaagcgaactggcccgtgcgtcccccgcatcaactcgaaccgaagggacgaccaagcggagtctagactcaagagcaaccgcgacctcccggatctctctcccacccacgcctcgtcaccgtcgtcttctgctgcactgcagcgatggcctcccccgacctgctcttcaatctgcggaacctcttctacctgggcgcctaccaggcagccattaacaacatcgacatcctgggcctcgacgccgccgccgccgctgagcgcgacgccatcgtcttccgctcctacatcgccctcggctcctaccaggtgcgaacacatctggcgtcaggcgcctcagccgctacctcgctgcaggccgtgaagctgctcgctctgtacctcactggagacaaggtatgtcatgaagaagatcaacatctccaagcagaacgacaagttccagcagaccgcttaccaagaggtaacgcatgtgctcctaacacaggaagacaagaagactcttctagagcggtacaccgtgatccagtacccttccttccaccgcggctgaggagcaactctccctcgctgtccacttcctcttggtgaaatagggaacgatgatacactatggcggatttctccaaggcgttaaggtggcaaagtatcccaggtgcagccatccagagcttgtgatgggtctcagggagcacactgacgctgggggggatcatacttctatttcaagatgaactgatcccaggtctagagtttctgaaagacggtaggtggatggcaatacctccaacacaaggcaacatgatctttgtaaaccttggagatcagattgaagtgataaccaatggaacctacaagagcatatgccaccgggtccttcccaacaagaacgggagccgcctatccattgcaacattctataaccctggtgccgacgccataatctgcctagcttcaaagctcacatatcctagccaatatcgtttccaagactaccttgatttctattctactaccaagtttactgataaggtatttaggttccagactacaaaggcaatattgaagtgaataatcacagcagaagcctggagaaaagaagtgtctgacttgttctacaatactgcatcagtgcatagatgcgcttgtatttactgctagctcctaaggaacaacgaggtgttaaaatatatatttttactttcagttgttttctgtttgaagactaaacaacctgcactacttgtacttaatgtaatatattacatgtgggttccttcagacagtgatatgacatgttaattatgaaggtgtcaatgatactacttgtacttaatgtaatatagatctgaactgttgtagtaatccagacatccaattatgagtgggttccttcagatagtagtaaacttgtctagccttttt

SEQ ID NO: 79229 - DNA, 2543 bp, Zea Mays
ctcccctcgcgcaatcgcaggaatccccgccatcatcgcctctcgcgcaccttccttcgacaaccttccataggaatcatccatcgcgtctgtgctccccctcgcgcaatcctaccgcactcgcctcccgaaatcggccgccacggcgcctcacgccatggctcctgcccagcagctgcagctccctccgcctccggtggtctggcacgccgcctcctcgcccagatccgtccgtggtccgcccctccggcctcgcccagctccaaagctccctcctgctcgcgggcacgcgatctcgccctgggggccatgccctaggccgtcgtctcggctcgcgtccacctcgtccagcgtcacaagtggcgccgccgccggtgtcggctacttcgatctcccgcccgccgtcgactcgtccagcagtacctacgctctgaatccgatcccctcgccggtggcgacggcgtcggctgacccatccccaaactcggcgcgggagcccaagcggaagcgaactggcccgtgcgtcccccgcatcaactcgaaccgaagggacgaccaagcggagtctagactcaagagcaaccgcgacctcccggatctctctcccacccacgcctcgtcaccgtcgtcttctgctgcactgcagcgatggcctcccccgacctgctcttcaatctgcggaacctcttctacctgggcgcctaccaggcagccattaacaacatcgacatcctgggcctcgacgccgccgccgccgctgagcgcgacgccatcgtcttccgctcctacatcgccctcggctcctaccaggtgcgaacacatctggcgtcaggcgcctcagccgctacctcgctgcaggccgtgaagctgctcgctctgtacctcactggagacaaggtatgtcatgaagaagatcaacatctccaagcagaacgacaagttccagcagaccgcttaccaagagggtgaaatagggaacgatgatacactatggcggatttctccaaggtgcgaagaagattcttctactactttctattgttatttgtaactattgttaccacttttgtttgcgattactgctttgcccgagaattgcattcgcaggcaatgtacatgcatgttgtttccgcttttacagaaaacaatatttttatgtacggacggggtgggtgatatggaatttaagcttatacctattttagatctgatcgactagctataactgaatttattaggggaatccccaaactggatcattattttctcaaatagaaatgtcaattcagtttgtgataatggaaaataagtgaagaacatgataatagatgtatatatactagtaaacttgtctagcacaggatctacaccattatcgagggaccttgaaactttttttgaatgttgtagtaatccaggcatccaattaagtcatttgattgtgtgtgtgtaatcatgatttacccaaatagtgtgaatcggatgtcagcgactcaatgcctttaaaaatattgtcatttaaggattttctttaatagtaccatcaatcgacagtgcaaagcttttaacaatgttatgtcgtatgaataatttattaccatatttctctcaccgaaagagtagtaccattcagtaaggaaatcaatggttatatatgttagtatagtatatgatgttactatattgagttctctgctctgcactgtcatggcacttgttatgataggcgttttctaaaccttccgtaggcgttaaggtggcaaagtatcccaggtgcagccatccagagcttgtgatgggtctcagggagcacactgacgctgggggggatcatacttctatttcaagatgaactgatcccaggtctagagtttctgaaagacggtaggtggatggcaatacctccaacacaaggcaacatgatctttgtaaaccttggagatcagattgaagtgataaccaatggaacctacaagagcatatgccaccgggtccttcccaacaagaacgggagccgcctatccattgcaacattctataaccctggtgccgacgccataatctgcctagcttcaaagctcacatatcctagccaatatcgtttccaagactaccttgatttctattctactaccaagtttactgataaggtatttaggttccagactacaaaggcaatattgaagtgaataatcacagcagaagcctggagaaaagaagtgtctgacttgttctacaatactgcatcagtgcatagatgcgcttgtatttactgctagctcctaaggaacaacgaggtgttaaaatatatatttttactttcagttgttttctgtttgaagactaaacaacctgcactacttgtacttaatgtaatatattacatgtgggttccttcagacagtgatatgacatgttaattatgaaggtgtcaatgatactacttgtacttaatgtaatatagatctgaactgttgtagtaatccagacatccaattatgagtgggttccttcagatagtagtaaacttgtctagccttttt

SEQ ID NO: 79230 - DNA, 2038 bp, Zea Mays
caggaatccccgccatcatcgcctctcgcgcaccttccttcgacaaccttccataggaatcatccatcgcgtctgtgctccccctcgcgcaatcctaccgcactcgcctcccgaaatcggccgccacggcgcctcacgccatggctcctgcccagcagctgcagctccctccgcctccggtggtctggcacgccgcctcctcgcccagatccgtccgtggtccgcccctccggcctcgcccagctccaaagctccctcctgctcgcgggcacgcgatctcgccctgggggccatgccctaggccgtcgtctcggctcgcgtccacctcgtccagcgtcacaagtggcgccgccgccggtgtcggctacttcgatctcccgcccgccgtcgactcgtccagcagtacctacgctctgaatccgatcccctcgccggtggcgacggcgtcggctgacccatccccaaactcggcgcgggagcccaagcggaagcgaactggcccgtgcgtcccccgcatcaactcgaaccgaagggacgaccaagcggagtctagactcaagagcaaccgcgacctcccggatctctctcccacccacgcctcgtcaccgtcgtcttctgctgcactgcagcgatggcctcccccgacctgctcttcaatctgcggaacctcttctacctgggcgcctaccaggcagccattaacaacatcgacatcctgggcctcgacgccgccgccgccgctgagcgcgacgccatcgtcttccgctcctacatcgccctcggctcctaccaggtgcgaacacatctggcgtcaggcgcctcagccgctacctcgctgcaggccgtgaagctgctcgctctgtacctcactggagacaagcgtaggtatgtcatgaagaagatcaacatctccaagcagaacgacaagttccagcagaccgcttaccaagaggtaacgcatgtgctcctaacacaggaagacaagaagactcttctagagcggtacaccgtgatccagtacccttccttccaccgcggctgaggagcaactctccctcgctgtccacttcctcttgttgtatccacacgacctttttgttctatgagtttgttttgttgttgatctgccattttgcctgctccgctgctcctcgtgagccttaactgatgatcttactatcttcctcttttgtgaagggtgaaatagggaacgatgatacactatggcggatttctccaaggtgcgttaaggtggcaaagtatcccaggtgcagccatccagagcttgtgatgggtctcagggagcacactgacgctgggggggatcatacttctatttcaagatgaactgatcccaggtctagagtttctgaaagacggtaggtggatggcaatacctccaacacaaggcaacatgatctttgtaaaccttggagatcagattgaagtgataaccaatggaacctacaagagcatatgccaccgggtccttcccaacaagaacgggagccgcctatccattgcaacattctataaccctggtgccgacgccataatctgcctagcttcaaagctcacatatcctagccaatatcgtttccaagactaccttgatttctattctactaccaagtttactgataaggtatttaggttccagactacaaaggcaatattgaagtgaataatcacagcagaagcctggagaaaagaagtgtctgacttgttctacaatactgcatcagtgcatagatgcgcttgtatttactgctagctcctaaggaacaacgaggtgttaaaatatatatttttactttcagttgttttctgtttgaagactaaacaacctgcactacttgtacttaatgtaatatattacatgtgggttccttcagacagtgatatgacatgttaattatgaaggtgtcaatgatactacttgtacttaatgtaatatagatctgaactgttgtagtaatccagacatccaattatgagtgggttccttcagatagtagtaaacttgtctagccttttt

SEQ ID NO: 79231 - DNA, 1434 bp, Zea Mays
caccattgtgaggtccttgatgtatcggcgccacaacaaggacctcgacgtattgccaccgtcgctttggagaaaacagaggcagatggcaacatcgtggcgctgaagaactacctcaagacgtagtactacgatgaggtgatggagcagtgtgtagcccgtttggatgttgccatgtttaatgccatccttcgtgaatcagcaagtgagataccaacagaccctatatctgacccaattgttgacccaaaagtcctaccaattccagctggtgatctaagctttgggtcaggcgcgcagctgaagaactctctccaaccaactatgacaggagcgttagctaggacagcaatcaggctaacaattgtggacaaagttcagtctgaagtcaatgcatctgaagtgcatgaaagggtcatgcagaggtgctaaaacaccttcaaacccttttgatgaagaaaacaacaccggtgccatttactgaaaaaattacaaatttgttgtgagacttttttttgattcttatctttacaaccactaaaaactactccctccattccaaatcctaagctgtctcttgaggttgtatagtggtgtgatcgagatcgttgtctttatgtttctggtgcaaataatgatttatgttgcaggtttgttgtatttattatgttcttaatgcaatgatgctcagctctcctctgcatttatttaagggaaaactttcagttctgatgtagtttatatgccatattcactgggccattggcataagtcacttgcactctttatttgatgctaactttcttcatttacaaactaggttccactcctgtttggatctgttgcaatggaaaaggttgcttgccacatcgttcattggatatttaggagaaccgttagacatatctttctaactgatgatgatgaagggcagcctccactgctgcagcggatggttgaagatcatgacgatctctactttatttcttggaagataaagccacaccaagtcatcatctccaggaacgatgttagcgaaagtcaatttaatctagtgctgaacattgagttgcaacaaatcatagattcagactgagtcaccgcagctagaaaccactgtctcaaggtgctgaacattgagttgcaacaaatcatcgatggagaccgagtcaccgcagctagaaaccactgtctcaatttgaggagattttctatctatgtttgttagaaggcataatgcctatttatctcttatattcgaacatttggtaattaagaaatagaagattacttcctcaatatcccttcttcctaatctcacctttcacgacgtctaaggaacaatcacttgctattactgactgacatgtccactcatatgtgagacattggggttaatatatatgttatgtaattgttgtgcactaacattta

SEQ ID NO: 79232 - DNA, 208 bp, Zea Mays
gttttctctcttctaccaagcaacggccaacttgatcagtcccttcacttgtgagtagtcaaattcatgtgaaagggtctctagggtaatggttaagacttccgagtagcacctacaggtcccaggttcgatccccctcgggacgaatttctggcttggttaaaaaaaatctgctcactgtgtccacctgctcctaggttacgtccag

SEQ ID NO: 79233 - DNA, 3529 bp, Zea Mays
gtgcaattcaacagcaaataaacaactgcaagatacatgggcttgaagcccgatcccccgtcgcaccatgcgctccacgatctcctctaatttcggactagaccgtgggcatgtgcagcacacgactcatgacggggacccaacgcacacaggcggtcacgccgtatcgagcacagcctcgagcacgcgcaaatctaagccaccaaaacaaaaactaagacagactgtttcaactagattacacattatagaggactcaaaactaacaaatcacccccataatcttgttggactctagtgacgcccagccttgatcttagttcaataaacctgactttgcccagcggtttcgtcaggatatctgccagctgatcttcagtccccacatggtccacatccaccattccttttccaatgcaatcacgaatatagtggtagcgagtatcaatgtgtttgcttctatcatgatacactggatttttactcaattcaatcgctgacttattgtccaccagtaaattgaatttctgaacactttcccctgtaatatatgcaagcaatctgctcaaccaaactccctgacaggttccaagtgcagcagctacatactctgcctcacatgaggatagggcaaccactttctgcttctgagacgaccaagtcaccacattcctccctaagaaaaacagaatgcctgaagtactttttctgtgaactaaatcacctgagcaatcactatcagtgaaacccagtagagacaacttggttcctcctttcttgagcttcactccatactcgagtgtaccagcaatatacctgatgattttcttcacagcacaccagtgttctttgtttggtgcctccatgaacctgctgaccaacccaactgagaatgacaagtcaggtcttgtatttaccaagtatctgagactgcctatgatgcttctatccctttctttgcagctgtaagtttaattctctgctccataggtgtatcagtagggttacaatctgtcattttacagtgttctactatctttgcagcatacgccttttgacaaattgttatttctttttccttttgtctgacttccatgcccaaatagtagcttagaagacccaaatcactcatattaaaagaatgcatcatctgttgcttaaattcagtaatcctattcactgatggcccacacattattagatcatccacatagactcccaccaccaggagagaatttccagccccttttctgtagacagcatgttccactacacacttgttgaaacccaaagagaatagctctgaatctagtcttgcattccatgctctaggtgcctgcttcaagccatataaagctttattcaatttcagcaccttacatggccttactggatcctgaaagcctggggattgaagaacatatacttcttggagatgaccattcaggaaggctgactttacatccatgtggtgaacttcccaattaccatgtgcagatagagctagcagaacccttattgtttccagtctagcaacaggtgcaaaaacttcatcaaaatctaccccctctctttgagcatatccttttgcaaccagtcttgctttgtgctttagtacatttccacttgcatctttcttcagcttgtacacccatttcagtcctattgccttgtgtccttttggaagatcagaccatgtccaggtgttgttatcatcgatagactgaagttctgcagccatagcctttttccagcaatcttcagctaaagcctcttccacactaactggttcctccactgcaagcatacacatgccactgtattcaaaatcaaggacctcttcagttgagtctagcagatcagctattgttctatactttaatggtactgtttctggggtgtcagtattcgctgaagatgagctaccatggacctctgagacttgaccagaactattgatctgaaactgagtaggtataggtgttgcggagaactgtggtgtcgcactaggttgtggtgttaatgcagctgacgaggatggtgctgaaatggcatcacttcctccgtttccaccctgttcctcataatttgattcttcagtgtgtgtcggattcgttacatgattctgaaaatcaactgtaaacatctcagtaacatcacttgctagctgatcatcatatactttgttccaatcccattgttcagcttcctcaaacactacatctcgactgatatgcagctgttcagtctgaggattcaccaacctatatccttttgttccagcttcatatcccagaaacaccatcttgcaagatctgtcagacaactttccttgccctggtcccactttcttcacatgagcaatacacccaaaagtcctcaggtgatcaactctgggtcttttcccatgtcattcttcatatggagtttttccatccaaacttttagttggtgacctatttagtaggtaaactgctgtactgattgcttctccccaatattttgaaggtacacctttgctcttgagcatgcacctagccatctctaccacagactggtttcgacgctctaccactccattttgctgaggagaatagggagtggtagtgtagtgtttaatcccttgctcattgcagtatatagtgaaagcatttgagttgaactcaccacctcgacctgttctcaaggccttaagtcttccactataatcaacttttgctctcagcttgatcttctgaaacgaaaccaaagcctcattttttgtcttgaatagttccacccacatgtatctgctgtggtcatccaccactagtagaaaatataattttcctccaactgttggtggtctgacttgcccacacagatcagcatgaaacaactccaagccctttttagctctaaatgttgacttccttgggaaaggagttctatgctgtttcccgagagtacaaccatcacatacttgctctactcgatccacaattggcatcccttctaccatctttcttctaccaagatcacgtagagctctgaagttcaaatgtccaaatctggcatgccacgtccaggctaagttattcatcttagacacaagacagactgagcaaccacacctagctttactgtgtatagtctgttgccagtgcgaagtgcactgaccaacaggttacactcagggtcaaggactgtcagacgtcctgcaaacaatctgatgtcacagcctccctcctcaagctgtccaaggcttattatgttactcttcagtcttgggatatagtatacacttgtgagcactttatgctgaccctgcttagcctgaaggactaccgaccccaaaccacagatcttcacagtggacccatctccaaaactgactgacccagtaactgtgtcatcaagttgagatagtgcagaccttatgcctgtcatatggttactagcaccagtgtctagtacccacacaccttctggacattccactggaactacctttctttcagatagatgaacaatctgtgatggtctgtgt

SEQ ID NO: 79234 - DNA, 1152 bp, Zea Mays
atcatttttctctaaatatacaaactaagctaaaaggagtcactccattatagaatccactgttgaagttggggctatatgcctataacaaactggtccaaaattcttcaaacttatatttagcctttacatcgagagaaaatcgtctcattagcctactatagtgctataaaaatatgatagaaatcaggctccattattgctcattgtcacgtcacacgtcatccacctctccaactcctcccatctagatcgcccttcctctactcaaggctacttttgaaactcaaattctctttgaaattgaagaaaattaagggagaaatgaactaatttacccttcgatctcttccaatttcgaaggtgatttgaatttccaaactagcctcaatgaaccatgattccttctctcccattccatcatctgtatctcaattgccatcctcaattcacatacccacgcagttacggccttaatgtgtgctcctagtctctgtgtcttagatccacgttattgttggctaatatctaataaagagtgtttggttccacctaactaaagtttagtctatgtcacatcgaaatgtttgaataataattacagaaattaaatatagtctaattataaaactaattacacatatgaagactaaaatacgaaacaaatttattaaacctatatttaatattcataattgatattcaaatatttgatgtgatgtgacatgaactaaactttagtcagagaaccagatagtccttgtccaaggggagacaaagctaatagccgggctgagtctatctgtctatgtcacgggtgttgtagtgaatcaacacccaatcataggggtactaaccaaataatatagttcgccaaattttgaatgatataatttgatcattagatgatgataaaatacttatgataatttatagacaaaacatgttacatgcttccatcacaagtatgtagctatcttataaactattagaatacaaactaaagcttcatgtcactgccatggcttggaagcgtttaaggatacattcatcacttacacgtcagagaaaagtcacacttaatgaatgtgaccactgaccaaacaatttgttggatttgtgggttagcccaatagagaaattcaattaaat

SEQ ID NO: 79235 - DNA, 285 bp, Zea Mays
cacatgcgcacgtgtgctcactcgcatggccaaggcggaggatgtgcgacgtgcacgtgaatggtctgccaaaaatccggtcctccgccttgcaggggcacggcttcctttttcctatttttatttttggttgcttggctgttaagtttagagtccttatctgttcacaaccaaatcgtgatgtgtgtccttatcggatcacgaatagatgatgacacgagcccctatcggtttgtgagacatggaggcgactctatatattgcgcctaacagccgccgccaaag

SEQ ID NO: 79236 - DNA, 486 bp, Zea Mays
tcatttcctttcctaggggtactccaaggtttaaagttggatcgacgctagctctaggttttcttctaggggatatggtatgcgttgattgggtgcattgtcgtatcgtgatgccttggtattgtaagtgattttttttcgaacacgcaggagagctgcgtatcattgaattaagaagaagggtctaaaattagaccaaatacaaacacaacagaaaaaaaagaagaaataaagaagaaaaagaagaaagaaaataaacaaggcctactggactctctactagagccctacatgacacctggaatgggagctgtaataagggcaagatgcttggcccccgcaaacttccaaataataatttcttcttcagctcttctaatagccccctccaggctaggtgtaactctatcaaaaacacatccatttctatggttccagagagtccaaagcccaagggtaatcaaggaattgagcccttttttagca

SEQ ID NO: 79237 - DNA, 2582 bp, Zea Mays
  misc_feature (1038)..(1137): n is a, c, g, or t
cgacgacctcggccaacatggagaaggcgcgcacaaggcctccagagcggtggacggtagaactaagcaaacgtgaaaggcgacctaaagccgccatctcagccgagcgagcggcgaggaccggcgctaggaagttttcggatctcgggcgtactgtaagtaacataggatcaatggcgtaaagaactaacaatagtttaacattaggatcagatactaatttaaacggtccagccaatagatctatatgcttttttaaacggcgttgggatgcataactctaatcttaggtaaattttgctaggaagtgcatttgtagctgttgaagttattttaactaattattatgcagtaaaatgatatgttcgctgatgttattcattaaaaattcagatgcttgtattcaattgaaaattgaatactactgcatggaaacagtataactgaaaattggccatctatatatgagctagggttaatataataatttaatacaaaaattaccaaattaccatttgaattgcaaaaattgaaatttctttttcttgctataactaaagtttgagaactctatgttatttctcttgttcaaatttactggggagttgaagtgtctaaccctaattgtttcttcgcaggttccaaatacaattgaatttactgattgaattggtcgaacaaagcagaagaaaattcgtgtgacttcgtaagtgtagttagtataaatttttagctacttgattacatcataggcccttgttatcagttggtttagccaccaggccggttagaattactcaattagcttctttctctattctagtcaattgatacatgaaatctttcttgctagaaattggatcatggaaatgagaaaatttctaacatgagttgctcagctataatgtggacgcaaaatcaaccctgcgcacgaacaagaaactatgagctgcaaattctttaataaatcaaatagcattacaaacaatatgtattgaactaataaatcaaatagcagtacaaacaatatgcgaaagnnnnnnnnnnnnnnnnnnnnnnnnnnnnnnnnnnnnnnnnnnnnnnnnnnnnnnnnnnnnnnnnnnnnnnnnnnnnnnnnnnnnnnnnnnnnnnnnnnnncaacctgagaatcagcaaaacagccccatggaggaggaagaaaaagaaaaaaagaaaaagaaaaaaaggagaaggaaggggtaggaggcccaggccaccagccagcccatataatccttcctctggcaaccctaggttgcctctctcccccacgattcagctgccgctgcccccaattgagccgccgccgcctcagattcgccgtcgccgcctcagattcgccgtcgccgcctcagattcgccgccgccgccgccgccgatttggacgctgccgccaacgatttggcctccgccgccctggatttggcctctgccgctcccgattcgacgctgccaacccgaaacagcgccgcccctttcccttcccctctgccctatgccctcttgctgcttcttacctaggcgacggggacgccttggatctttcgggcgcctggacgcctaggcgtcgcctaggcgacgcctttaaaacaagggtggagctaacacttttttcctagctgaacaaaagtatgtcttttttcttttctcgttgaccaattttctttcctaaaatggtgcactttatggaatgaatcggagaagaatcccaataacctcttcgtgattggattgtttctacatggtttagctgtcacgatccacatcagatgcgtgtgtctcatgcgtgaggtcttccgagatcacgcgtccacacgtcgcggcgcaccgaccggtgccgatggctggcgcgcaccgcgcacgcatctggcctccaacaccacctgatctaggccccgaccccaggctcatgaacgcccctgcactgtcagaccctgacctgccgccgtcggtgtcggatggagcagaggatgtggaagcacgagcccttcccatcaccctcctgtaaccgcgacggagggcccggcggcctgtgatgaccccaactggatccgactccgtagcagtgagcacgaggacgggagcggagtcgcagcgtcgcggtgcgagagcggagaggagcgagatcgagggcgtgagtttggggcagcgagagcagaggataggagagggaaggaagagagaaaatcctcaccggggagaaggcagcggggagggtcgtcgtcggggctgtgcgccgccgccgtgccggtcgcgtcgagccgccgtcgcgccggtcgcgtcgtgtctaggcttcgatccggtgggtacgacacaagggttggttccgggccgtggggtgaagggaaattttaatccgggccagtttcgattccaattcgggccgaaacgaacaatttcaatgagttataccaaattccaaaccaggttcattcgttccacccggaacaaggtatggaataggctgatccgctgaaaacgaacgaggcctaacgaaatatcattgaatatacataaacagcaaacaaagcagacaatatgcaacaaaaaacgaattgttgatg

SEQ ID NO: 79238 - DNA, 2394 bp, Zea Mays
agggagagggagggtgctaaaaaaatgagggaaaagggaccataaaagatatgggtttattctagtagatgggctaggtgtcgggccatggcctagtaggagtcattttaatattaaagaaaaatatcccgatgataaatatatggatatataatacaaataagatatttttaataataaatatgtgaaaagcttagtggagaaagaggctttggaccccaggacttctaggccatggcccgacacctaacggatcataaatatatggatcatgatctaacaaataagatatttttaataataaatatatggatcatgttctaatggatcaagaactttgcatctcacgcttgcatataatgtctgattgtaaattagttgttggctctgttagaaatatggtctcgtattggatttggattgaaaacacgtagacgataaagagtgagatgcaaacagacgagagtaaaatgcggtagaagggctggcaaaggaaaaagggaagtagatgttttttctccttttaatattaagacatatagataaatatgtatagatattgtttatagatatgtttaggaaaaaaaccaatttgtgcccagcaacgcgtgtccgctgctcacatcatcggcaccatagtttagttattccattctaggttcaatttgtgtgctccggcaagtagcaactagcaagggaacgatatctcctccccacctgtttgtctgtttgtaaaatgttttcgtgttttctattcgaatttataaaataagtttgacatgaatacttttaatatttatcttaacttaaaattgaatatagagaggaactgagaggattaggttaaaaggagttgcaatctagtatgagtagttaagaatacaatattctttaattggtagaaaataagaaaaggaaatagaaattggtgaaataagggtaaaatactattttagagaagttgctcacttataagtacaagtatcatcaccctcattaccgtgcgcttatacattcttttgcttgattccaagaatcactacaccaaaatagtgaacttcctagagcctaaaccctagaaagttggccctaaactctaggaagttagctaaaccctcggaagtaaagccatctcgtcggaagtttggcgctcgaatcttttttgtcaaaagttagcttaacttcctagagccctctagtaaattagctaacttcctacagttagaggagcctctcggaagttagtagcttcacgccgtcaatgctgccgtcagctgactaacttcctatggataacttcgtacggctcactgtagcccctagaaagttagctggctaacttcctatggcccagctggcctctagaaagttaatttgaccagcattagactctctggttcctacttctcactgatttaaaactaaacagacttgagtgctcccagacccattagactccctggttcccactgaatcagcaccgaatcaaaaatcggcaattggaccaacatcacgctgaggccactaaaactgattcctgcgaaattcctgtaccattcctgtgaaacgttcttcaggtaccggtggcaactagtggattatatgtaaattctagagaggttagtgaactcaatgaagaaggcatggcaagcagcaaagaaaagttgtgtgggctaattaattgctcctctttttttttctttctttctagacgcagagaaatctaatccaacgatggctgactgacgcaccacatcgatctgcaatgaaagccagctcttctggaggatggatcatgggatcaaacacaagtcaacattcagaccagacagaatgtgggtgcgttttcaatttatttgggttggcaacaaattgtatgcggacttgtggccgtctacatataatacacgtagtagattactggtgtagttcatgacaattctacggatgtgatggtactcgcttggtcccatctcgcgtgcattaataaacgcaatacaaaaaaatggcattgtgtgtagccagagccgcactgcttgaaactaggcttgcttctatcgtctaccaattcaatgcagtggcactgtgtgtgtgctaaattaaattttcgattttgtgcctcgagaaatcgaccaaggaaatcccaatccaattaaattcattcagtggcacgagcggaagacaactgataaacccctgaattgtgttaccgtaggggagccgtcgtgcagcgctcgacggtggccgtcgtccgtgacggcggcggagggcttgttgcgcggctgggccttgcttccctcctgctgcttctggagtaggtcgtcctcgtcgccgccgccgaggcgggcgggcgtggggcgccgacggggcgggcacggcggcgcctagcggctg

SEQ ID NO: 79239 - DNA, 1499 bp, Zea Mays
atgcggtccatttcctgcggtggcggcggcttgtgtgtccaaagtccatctacggcacggcgtctcacagcctcaccccaactcgtcgccttcctcgtcattcccttcgtcgcggagaggaggtcacgcggctgattcccgccgcttgcgatcgggttcgtagggagcaggatcagctgacgcgatgttccccaggatttcccggctcggggcgcggctcctgcgcgagtctagagccgagacaagagctggaaacttgctaaacagtcaacgcattttctttcaagatcatgttaaccggcattcgatcccagtggtgactcctgctgtattatcgatggtaagaaataaagattggtagtagaatttatttagttgaacatgaccccaattgcacttctttcccgctaatattaaatatgttactagctattgatttgcttcataaaacgactttgatttggactatatctattattttcatcatttggtttctattcaataaatctacctatacattcacaacctgaaatagctgttgcaaaagaagatcggcattcttttacctcaacatgttagtttttaaaattttggagaactgtaagcaaagcctttgtaccgcaggagtgatgatttatctctcaagtttatttgtgttaatttttggttatactttttagcggaatgcccttttgtcaactgcaacaagtggtgatcaggatgaaagtagtcaggcaaaagataagagctgctccttccacatctagaggaatagatggcactaaatgcatcagttttactgaattaatctcggtaacatttgtcaacaaggatggctcagaaaagacaatatgtgttccagttggaatgtccatgttagaagctgctcatgaaaacgacatagagcttgaaggagcatgtgagggctcacttgcgtgttctacttgtcatgtaatagtaatggatgtaaaatattataacaagttagaagatccagcagatgaagaaaacgatatgcttgaccttgcatttgggctcacagaaacatcacgccttggctgccaagtgatcgcgaagcctgagcttgatggcatgcggctggcgctacctgtagccacaagaaacttcgcagtagatggctatgtaccgaaaccacactgaagagacggtcatctaccacactgaagagacggtcatctaccacactgaagagacggtcatatcggggaacacggattcttacagcagtcaattttgtagtttataacctgtaacttaactacagctttgttacttgtagtccggtccgggtggcttcggactaccttgttgagggtttgttcatttgatgaatcccttggttacttgcagagaagagagaacagtgcttcatctgggcgaataaacatccgttctgtgtgcaatgtgtactcacaaacatttgtcgtagcgttcccaatatctggtcctttgcaacctatgctgctgttcatttcgag

SEQ ID NO: 79240 - DNA, 1147 bp, Zea Mays
tcctgcggtggcggcggcttgtgtgtccaaagtccatctacggcacggcgtctcacagcctcaccccaactcgtcgccttcctcgtcattcccttcgtcgcggagaggaggtcacgcggctgattcccgccgcttgcgatcgggttcgtagggagcaggatcagctgacgcgatgttccccaggatttcccggctcggggcgcggctcctgcgcgagtctagagccgagacaagagctggaaacttgctaaacagtcaacgcattttctttcaagatcatgttaaccggcattcgatcccagtggtgactcctgctgtattatcgatgcggaatgcccttttgtcaactgcaacaagtggtgatcaggatgaaagtagtcaggcaaaagataagagctgctccttccacatctagaggaatagatggcactaaatgcatcagttttactgaattaatctcggtaacatttgtcaacaaggatggctcagaaaagacaatatgtgttccagttggaatgtccatgttagaagctgctcatgaaaacgacatagagcttgaaggagcatgtgagggctcacttgcgtgttctacttgtcatgtaatagtaatggatgtaaaatattataacaagttagaagatccagcagatgaagaaaacgatatgcttgaccttgcatttgggctcacagaaacatcacgccttggctgccaagtgatcgcgaagcctgagcttgatggcatgcggctggcgctacctgtagccacaagaaacttcgcagtagatggctatgtaccgaaaccacactgaagagacggtcatctaccacactgaagagacggtcatctaccacactgaagagacggtcatatcggggaacacggattcttacagcagtcaattttgtagtttataacctgtaacttaactacagctttgttacttgtagtccggtccgggtggcttcggactaccttgttgagggtttgttcatttgatgaatcccttggttacttgcagagaagagagaacagtgcttcatctgggcgaataaacatccgttctgtgtgcaatgtgtactcacaaacatttgtcgtagcgttcccaatatctggtcctttgcaacctatgctgctgttcatttcgag

SEQ ID NO: 79241 - DNA, 1683 bp, Zea Mays
ggtggcggcggcttgtgtgtccaaagtccatctacggcacggcgtctcacagcctcaccccaactcgtcgccttcctcgtcattcccttcgtcgcggagaggaggtcacgcggctgattcccgccgcttgcgatcgggttcgtagggagcaggatcagctgacgcgatgttccccaggatttcccggctcggggcgcggctcctgcgcgagtctagagccgagacaagagctggaaacttgctaaacagtcaacgcattttctttcaagatcatgttaaccggcattcgatcccagtggtgactcctgctgtattatcgatggtaagaaataaagattggtagtagaatttatttagttgaacatgaccccaattgcacttctttcccgctaatattaaatatgttactagctattgatttgcttcataaaacgactttgatttggactatatctattattttcatcatttggtttctattcaataaatctacctatacattcacaacctgaaatagctgttgcaaaagaagatcggcattcttttacctcaacatgttagtttttaaaattttggagaactgtaagcaaagcctttgtaccgcaggagtgatgatttatctctcaagtttatttgtgttaatttttggttatactttttagcggaatgcccttttgtcaactgcaacaagtggtgatcaggatgaaagtagtcaggcaaaagataaaatctcggtaacatttgtcaacaaggatggctcagaaaagacaatatgtgttccagttggaatgtccatgttagaagctgctcatgaaaacgacatagagcttgaaggtacagatattaaggaaatgtgcacttcccttccactgtggtttttgcctttatggttctatagtcagttcatgcttggtgataagaatatatgcaccttttttgtaaataaaaacaaactagtcttgttcatttacctggttccgtggttttaccatttttcatcagtacattaggtattgtaatcattcctttttatgttccatcaactgattttcagctgtagttcatgataaccttccctgctattgtggctactgcaggagcatgtgagggctcacttgcgtgttctacttgtcatgtaatagtaatggatgtaaaatattataacaagttagaagatccagcagatgaagaaaacgatatgcttgaccttgcatttgggctcacagaaacatcacgccttggctgccaagtgatcgcgaagcctgagcttgatggcatgcggctggcgctacctgtagccacaagaaacttcgcagtagatggctatgtaccgaaaccacactgaagagacggtcatctaccacactgaagagacggtcatctaccacactgaagagacggtcatatcggggaacacggattcttacagcagtcaattttgtagtttataacctgtaacttaactacagctttgttacttgtagtccggtccgggtggcttcggactaccttgttgagggtttgttcatttgatgaatcccttggttacttgcagagaagagagaacagtgcttcatctgggcgaataaacatccgttctgtgtgcaatgtgtactcacaaacatttgtcgtagcgttcccaatatctggtcctttgcaacctatgctgctgttcatttcgag

SEQ ID NO: 79242 - DNA, 1071 bp, Zea Mays
ccagcttctggagccttcgcgtttagcgtggaaccgcaagccagccaagcaacttgcgccactcgcctcgcctcgcctcgcctcgcccctgtttgtttgcttctggccggaccccttccccttctccggtgcacgccactctgcaacccccctcctctcgagcagagcagtcgagcagagcggcagcctcggcgcgcgccggcgccagccgacatgactgccggtcagtgcggcaacatccaggaccaggaggcagctcctggcgccgacctctacgccgtgctcgggctcaacagggagtgcaccgacgccgagctcagggtcgcgtaccggaggctcgccatgatatggcatccggacaggtgctcggcgtccggcagctcggcgcgcgtggaggaggccaaggagcggttccaggagatccagggcgcctactccgtgctctccgactccaacaagcggctcctctacgacgtcggcgtctacgacagcgaggacgacgacgctgacgtgagcaagtcgaaggagaggccggcggcatgggcgtgcgacggcggtgacgagaggagcggcagcaagcagaggctgtcaacgagccgcgacgtctccggctccggtggtgggatgtcgcgctcgcgcggcagagccaaagcagtagaaacttgtgggcagtgaacggcctctagtcttgaatcttgattagagcaccgtttattcacttactggctcgcgtcagtcgtagtagctcgaggcacgttgaaaaggagagagaaaagatctgtttcattcttcaatctattccaagctagccataaatagccaatctcttgctgcattgtttcgatgaatttttatttgggagaaattgagagtggttggtagtaaactagtaacaactttacgaagagatgcggccatcgtgccgaattaattgggcggaggtacggtacggataaatagcgggtcgtgtcgtattcgtggatcaaagtctaagcttaaacacggactaattagtttttaaacggtcatgtcgggctattatatcgtatcgtgctaaatctaaggcctgac

SEQ ID NO: 79243 - DNA, 1453 bp, Zea Mays
ccagcttctggagccttcgcgtttagcgtggaaccgcaagccagccaagcaacttgcgccactcgcctcgcctcgcctcgcctcgcccctgtttgtttgcttctggccggaccccttccccttctccggtgcacgccactctgcaacccccctcctctcgagcagagcagtcgagcagagcggcagcctcggcgcgcgccggcgccagccgacatgactgccggtcagtgcggcaacatccaggaccaggaggcagctcctggcgccgacctctacgccgtgctcgggctcaacagggagtgcaccgacgccgagctcagggtcgcgtaccggaggctcgccatgatatggcatccggacaggtgctcggcgtccggcagctcggcgcgcgtggaggaggccaaggagcggttccaggagatccagggcgcctactccgtgctctccgactccaacaagcggctcctctacgacgtcggcgtctacgacagcgaggacgacgacgctgacgtaactactcgaccgaactcaatcgcatctgtcggggatgggcgacttcctcggagagatggccgacatgatgagccaggccacgccaacggagagcttcgaggagctgcagcagctgttcgtggacatgttccaggacgacctggacggcgccgggttcttcggcgggcttccgacgagccgcagtgcccagggtcctagcagcacctcgttgccaccgtcgacgtcgccattgcggccgacgcctcctgcaagaagtaagggtgcgcaaacaccgtcgtcgtttaacggcgctgggaggcggggttcgacggcgaagcggccgaggaccggttgggctggcctggaaccggatctgggcctctctggattctgtttcatggtgagcaagtcgaaggagaggccggcggcatgggcgtgcgacggcggtgacgagaggagcggcagcaagcagaggctgtcaacgagccgcgacgtctccggctccggtggtgggatgtcgcgctcgcgcggcagagccaaagcagtagaaacttgtgggcagtgaacggcctctagtcttgaatcttgattagagcaccgtttattcacttactggctcgcgtcagtcgtagtagctcgaggcacgttgaaaaggagagagaaaagatctgtttcattcttcaatctattccaagctagccataaatagccaatctcttgctgcattgtttcgatgaatttttatttgggagaaattgagagtggttggtagtaaactagtaacaactttacgaagagatgcggccatcgtgccgaattaattgggcggaggtacggtacggataaatagcgggtcgtgtcgtattcgtggatcaaagtctaagcttaaacacggactaattagtttttaaacggtcatgtcgggctattatatcgtatcgtgctaaatctaaggcctgac

SEQ ID NO: 79244 - DNA, 1471 bp, Zea Mays
ccagcttctggagccttcgcgtttagcgtggaaccgcaagccagccaagcaacttgcgccactcgcctcgcctcgcctcgcctcgcccctgtttgtttgcttctggccggaccccttccccttctccggtgcacgccactctgcaacccccctcctctcgagcagagcagtcgagcagagcggcagcctcggcgcgcgccggcgccagccgacatgactgccggtcagtgcggcaacatccaggaccaggaggcagctcctggcgccgacctctacgccgtgctcgggctcaacagggagtgcaccgacgccgagctcagggtcgcgtaccggaggctcgccatgatatggcatccggacaggtgctcggcgtccggcagctcggcgcgcgtggaggaggccaaggagcggttccaggagatccagggcgcctactccgtgctctccgactccaacaagcggctcctctacgacgtcggcgtctacgacagcgaggacgacgacgctgacgtaactactcgaccgaactcaatcgcatgcatgtgccctcagtatcctgtcggggatgggcgacttcctcggagagatggccgacatgatgagccaggccacgccaacggagagcttcgaggagctgcagcagctgttcgtggacatgttccaggacgacctggacggcgccgggttcttcggcgggcttccgacgagccgcagtgcccagggtcctagcagcacctcgttgccaccgtcgacgtcgccattgcggccgacgcctcctgcaagaagtaagggtgcgcaaacaccgtcgtcgtttaacggcgctgggaggcggggttcgacggcgaagcggccgaggaccggttgggctggcctggaaccggatctgggcctctctggattctgtttcatggtgagcaagtcgaaggagaggccggcggcatgggcgtgcgacggcggtgacgagaggagcggcagcaagcagaggctgtcaacgagccgcgacgtctccggctccggtggtgggatgtcgcgctcgcgcggcagagccaaagcagtagaaacttgtgggcagtgaacggcctctagtcttgaatcttgattagagcaccgtttattcacttactggctcgcgtcagtcgtagtagctcgaggcacgttgaaaaggagagagaaaagatctgtttcattcttcaatctattccaagctagccataaatagccaatctcttgctgcattgtttcgatgaatttttatttgggagaaattgagagtggttggtagtaaactagtaacaactttacgaagagatgcggccatcgtgccgaattaattgggcggaggtacggtacggataaatagcgggtcgtgtcgtattcgtggatcaaagtctaagcttaaacacggactaattagtttttaaacggtcatgtcgggctattatatcgtatcgtgctaaatctaaggcctgac

SEQ ID NO: 79245 - DNA, 2346 bp, Zea Mays
ttatttgccatctaactcctccattgctcttgaattttcactacttctgtttactcatataatcatttagagtcatattcttacttcatttaaggacaaatttgcgatatgtgggaaggatattatgctgacgctcattgctagacgctccaggcattatgctggcaccaggtatctaaagaggggtgtgaatgaggagggcagagtagcaaatgatgttgagactgagcaaattgtttatgaaaacatgcttggaccatggcaaataagctctgttgtgcagaacaggggttcaattccactattctggtcccaggagacatcaaagctgaatcttaagcctgatatcatatgtaagcatttaagttcttgttcaatgcgtaaaatattattcaaacatttgtttttccttgcagtgcatgaaaaggacaaaaattatgaggctaccaggcttcattttgaaaatcttaggaagagatatggaaatcctatcatcatcttaaacttgattaagacacttgagaagagaccacgtgaaatcatactccgttgggaatttgacagagcaataaagattattaatagtggtctaccaggtgaagatcatttaagatttttacattgggatcttcataagaactctcaaagcaaaagtacaaatgcccttcaagtgcttttgaaagtggcatttgaagctttgaacatgacagaattcttttattgtcaagtttccccagatcaaagggcaaagggctcccctaatttaagccctacattgaaaattggttttggtcatcatgcgtgtgatgacaaaaattgtggcaatgcagattatgttgatgatcttgatgacatttcccaagaagatacctgtggtagttctgatcctggcaatggaattgcggaagataaatttgaggtcaatggatctgctcaaataaagcgtccaaaatttcaaaagggtgtcttacgtacaaactgtatagattgtttggatcgcacaaatgttgctcaatatgcctatggcctagctgctttaggacaccagttacatgcacttggttctgtagaatctccagaagttcatctagactctcctttgtctcgacatttgatgcatttttatgaacgcatgggtgacacacttgctttacagtatggtggttcggctgctcacaataagatattctctgcgaaaagagggcacttgaagtttgccattcaatctcaagagttctttaggacactgcaacggtactacagtaatgcatatatggatgcttacaaacaagctgcgataaacttatttttaggatacttccagccacaggtgggaaaacctgcactttgggagccagaatctggtgatgagcatgtacttgatgacgagacatgtaaattgatgaagagggcaagatcagatggcagcattcttaataaaagcaaactatcaatatccagtaatggcccaaatggaattttaaagttagcatttactggttcaaaaaatgaagggcagcgtccaaaccggagttctgatacagcctgtgacaatggcatgtcaaagtcaaggtcaaaagccataagcactcctgatgtgaatatttcaactgatagtggtgttcgtgatgtaatatctgggacaacggacgatcaagcttctgggatccacgcccaggggttttcaaaggatttcgtgcagtggctcaatcaaggagaggcgttttggtactgacatcgcaaggtgggcttaccatgtaaaaccaagccacacgatggttgcacttgcaacccaaacctggttccaaaagcatcataactctcaaagaccattgcaagcaaggagggcaccatcgacgtgcacgagatttgcttgtcaaccatcagcattctcctcgcggccaaatatgatgacggggcttagagtcgcacacactgttagcagacttgtctagggaagtgtaccattctgttcattgattggagcttgctcaccaggcgggtagatagcgcatcgctgttgttcttctttaaaaaaaaaggaaagaaagaaggtggtaggtagtagtatattcttttgaagatgtaccattgtccagacatcatcgtctccatctccattgtgtaaatatatatgtatgtcccaggtgctcccacctttcgcttcgccgttgtgagagttgaggtgggcaaaaaagcatcattttcccccctcggttgggggtctttcccttctggaatcgtgtacatgtgtcttctgtggcaggcaacaggaggcgagattgttgtgtacttcccatcgtactaaacccctctgttaccgatactgcccccttggaccgttcg

SEQ ID NO: 79246 - DNA, 2389 bp, Zea Mays
ctaactcctccattgctcttgaattttcactacttctgtttactcatataatcatttagagtcatattcttacttcatttaaggacaaatttgcgatatgtgggaaggatattatgctgacgctcattgctagacgctccaggcattatgctggcaccaggtatctaaagaggggtgtgaatgaggagggcagagtagcaaatgatgttgagactgagcaaattgtttatgaaaacatgcttggaccatggcaaataagctctgttgtgcagaacaggggttcaattccactattctggtcccaggagacatcaaagctgaatcttaagcctgatatcatattgcatgaaaaggacaaaaattatgaggctaccaggcttcattttgaaaatcttaggaagagatatggaaatcctatcatcatcttaaacttgattaagacacttgagaagagaccacgtgaaatcatactccgttgggaatttgacagagcaataaagattattaatagtggtctaccaggtgaagatcatttaagatttttacattgggatcttcataagaactctcaaagcaaaagtacaaatgcccttcaagtgcttttgaaagtggcatttgaagctttgaacatgacagaattcttttattgtcaagtttccccagatcaaagggcaaagggctcccctaatttaagccctacattgaaaattggttttggtcatcatgcgtgtgatgacaaaaattgtggcaatgcagattatgttgatgatcttgatgacatttcccaagaagatacctgtggtagttctgatcctggcaatggaattgcggaagataaatttgaggtcaatggatctgctcaaataaagcgtccaaaatttcaaaagggtgtcttacgtacaaactgtatagattgtttggatcgcacaaatgttgctcaatatgcctatggcctagctgctttaggacaccagttacatgcacttggttctgtagaatctccagaagttcatctagactctcctttgtctcgacatttgatgcatttttatgaacgcatgggtgacacacttgctttacagtatggtggttcggctgctcacaataagatattctctgcgaaaagagggcacttgaagtttgccattcaatctcaagagttctttaggacactgcaacggtactacagtaatgcatatatggatgcttacaaacaagctgcgataaacttatttttaggatacttccagccacaggtgggaaaacctgcactttgggagccagaatctggtgatgagcatgtacttgatgacgagacatgtaaattgatgaagagggcaagatcagatggcagcattcttaataaaagcaaactatcaatatccagtaatggcccaaatggaattttaaagttagcatttactggttcaaaaaatgaagggcagcgtccaaaccggagttctgatacagcctgtgacaatggcatgtcaaagtcaaggtatactccgacactgtctcacattaagcatataagctgtgaactagactattacaatggttctggtgattcaaatttcttggatcttgactggcttacagcttcagacaatgaaaggtcaaaagccataagcactcctgatgtgaatatttcaactgatagtggtgttcgtgatgtaatatctgggacaacggacgatcaagcttctgggatccacgcccaggggttttcaaaggatttcgtgcagtggctcaatcaaggagaggcgttttggtactgacatcgcaaggtgggcttaccatgtaaaaccaagccacacgatggttgcacttgcaacccaaacctggttccaaaagcatcataactctcaaagaccattgcaagcaaggagggcaccatcgacgtgcacgagatttgcttgtcaaccatcagcattctcctcgcggccaaatatgatgacggggcttagagtcgcacacactgttagcagacttgtctagggaagtgtaccattctgttcattgattggagcttgctcaccaggcgggtagatagcgcatcgctgttgttcttctttaaaaaaaaaggaaagaaagaaggtggtaggtagtagtatattcttttgaagatgtaccattgtccagacatcatcgtctccatctccattgtgtaaatatatatgtatgtcccaggtgctcccacctttcgcttcgccgttgtgagagttgaggtgggcaaaaaagcatcattttcccccctcggttgggggtctttcccttctggaatcgtgtacatgtgtcttctgtggcaggcaacaggaggcgagattgttgtgtacttcccatcgtactaaacccctctgttaccgatactgcccccttggaccgttcg

SEQ ID NO: 79247 - DNA, 3241 bp, Zea Mays
atcatttagagtcatattcttacttcatttaaggacaaatttgcgatatgtgggaaggatattatgctgacgctcattgctagacgctccaggcattatgctggcaccaggtatctaaagaggggtgtgaatgaggagggcagagtagcaaatgatgttgagactgagcaaattgtttatgaaaacatgcttggaccatggcaaataagctctgttgtgcagaacaggggttcaattccactattctggtcccaggagacatcaaagctgaatcttaagcctgatatcatatgtaagcatttaagttcttgttcaatgcgtaaaatattattcaaacatttgtttttccttgcagtgcatgaaaaggacaaaaattatgaggctaccaggcttcattttgaaaatcttaggaagagatatggaaatcctatcatcatcttaaacttgattaagacacttgagaagagaccacgtgaaatcatactccgttgggaatttgacagagcaataaagattattaatagtggtctaccaggtgaagatcatttaagatttttacattgggatcttcataagaactctcaaagcaaaagtacaaatgcccttcaagtgcttttgaaagtggcatttgaagctttgaacatgacagaattcttttattgtcaagtttccccagatcaaagggcaaagggctcccctaatttaagccctacattgaaaattggttttggtcatcatgcgtgtgatgacaaaaattgtggcaatgcagattatgttgatgatcttgatgacatttcccaagaagatacctgtggtagttctgatcctggcaatggaattgcggaagataaatttgaggtcaatggatctgctcaaataaagcgtccaaaatttcaaaagggtgtcttacgtacaaactgtatagattgtttggatcgcacaaatgttgctcaatatgcctatggcctagctgctttaggacaccagttacatgcacttggttctgtagaatctccagaagttcatctagactctcctttgtctcgacatttgatgcatttttatgaacgcatgggtgacacacttgctttacagtatggtggttcggctgctcacaataagatattctctgcgaaaagagggcacttgaagtttgccattcaatctcaagagttctttaggacactgcaacggtactacagtaatgcatatatggatgcttacaaacaagctgcgataaacttatttttaggatacttccagccacaggtgggaaaacctgcactttgggagccagaatctggtgatgagcatgtacttgatgacgagacatgtaaattgatgaagagggcaagatcagatggcagcattcttaataaaagcaaactatcaatatccagtaatggcccaaatggaattttaaagttagcatttactggttcaaaaaatgaagggcagcgtccaaaccggagttctgatacagcctgtgacaatggcatgtcaaagtcaaggtatactccgacactgtctcacattaagcatataagctgtgaactagactattacaatggttctggtgattcaaatttcttggatcttgactggcttacagcttcagacaatgaaaggttgttcatattgtgctttcccttttttggtctatcaggtgtcgtgtctttttgtgcatggtatggtatacacagaaataacagtcagaatcatttttttattaactccttgacatcttttctcagatgtctaagcagattatcaggagacctgagcatcattgcattaactaggaaatagtccaagtagaacatacactccaaaacacatagaaacacaaacacccatgaaagcacacacatggattacaaatcgtgcaacagaaacacaaacacgcacgaagcacacacatggattacaaatcgtgccacagaaatgccgctgtgtatgggtgttagtggtttaggggttttctcgacctgtttgagaaggtttcttcttaatataatgcctgaggcttgtcttaccccctggtcgagttttttttaaaaaaaaacattgtgccacagaactacagaagagggttgagatcagcagagaactccacacactaggacatgttcacagcaagctttgtaagaccattaatctccatatcacactgcagttgagcctcttccctatcgattgcttggtattgcaccattgaccacacaagcgtagccatatttccatatcagtgaagcaagctccaaggatctcgctagagatcggaacctctcaactgtttgcttgaaaatgaaacctgacatttctgttgccaatgccatgtattttctaacactccatcctagtgtacatggaactgctggcggacatcacacatttataatcgatatgtagacgaatgtttataacctcattattatttttcgtgctgtgcattatgcttaaacaggtcaaaagccataagcactcctgatgtgaatatttcaactgatagtggtgttcgtgatgtaatatctgggacaacggacgatcaagcttctgggatccacgcccaggggttttcaaaggatttcgtgcagtggctcaatcaaggagaggcgttttggtactgacatcgcaaggtgggcttaccatgtaaaaccaagccacacgatggttgcacttgcaacccaaacctggttccaaaagcatcataactctcaaagaccattgcaagcaaggagggcaccatcgacgtgcacgagatttgcttgtcaaccatcagcattctcctcgcggccaaatatgatgacggggcttagagtcgcacacactgttagcagacttgtctagggaagtgtaccattctgttcattgattggagcttgctcaccaggcgggtagatagcgcatcgctgttgttcttctttaaaaaaaaaggaaagaaagaaggtggtaggtagtagtatattcttttgaagatgtaccattgtccagacatcatcgtctccatctccattgtgtaaatatatatgtatgtcccaggtgctcccacctttcgcttcgccgttgtgagagttgaggtgggcaaaaaagcatcattttcccccctcggttgggggtctttcccttctggaatcgtgtacatgtgtcttctgtggcaggcaacaggaggcgagattgttgtgtacttcccatcgtactaaacccctctgttaccgatactgcccccttggaccgttcg

SEQ ID NO: 79248 - DNA, 2688 bp, Zea Mays
cccgtctatttattggtccctctcccgtcccagagaaaccctccctccctcctccattggactgcttgctccctgttgaccattggggtatgttcaccagggcaagggaatgcttcagcgccatcagctgcttgcggagtttgatgccctgtttgatagtgacaaggagaagtatgcaccctttgaagacattcttcgtgctgctcaggaagcaattgtgctccccccatgggttgcacttgctatcaggccaaggcctggtgtctgggattacattcgggtgaatgtaagtgagctggctgtggaggagctgagtgtttctgagtacttggcattcaaggaacagctggtggatggacaatccaacagcaactttgtgcttgagcttgattttgagcccttcaatgcctcctttcctcgtccttccatgtcgaagtccatcggaaatggagtgcaattccttaaccgacacctgtcgtccaagttgttccaggacaaggagagtttgtaccccttgctgaacttcctcaaggctcataactacaagggcacgacgatgatgttgaatgacagaatccaaagccttcgtggtctccaatcatccctgagaaaggcagaggagtatctactgagtgttcctcaagacactccctactcggagttcaaccataggttccaagagcttggcttggagaagggttggggtgacactgcgaagcgtgtactcgacacactccacttgcttctcgaccttctggaggcccctgatcctgccaacttggagaagttccttggaactataccaatgatgttcaacgttgttatcctgtctcctcatggctacttcgcccagtccaatgtgcttggataccctgacactggcggtcaggttgtgtacattctggatcaggtccgtgctttggagaatgagatgcttctgaggattaagcagcaaggccttgatatcactccgaagatcctcattgttaccaggctgttgcctgatgctgctgggactacgtgcggtcagcggctggagaaggtcattggtactgagcacacagacatcattcgcgttcccttcagaaatgagaatggcatcctccgcaagtggatctctcgttttgatgtctggccatacctggagacatacactgaggatgtttccagtgaaataatgaaagaaatgcaggccaagcctgaccttatcattggcaactacagcgatggcaacctagtcgccactctgctcgcgcacaagttgggagtcactcagtgtaccatcgctcatgccttggagaaaaccaaataccccaactcggacatatacttggacaaattcgacagccagtaccacttctcttgccagttcacagctgaccttattgccatgaaccacaccgatttcatcatcaccagcacattccaagaaatcgcgggaagcaaggacaccgtggggcagtacgagtcccacatcgcgttcactcttcctgggctctaccgtgtcgtccatggcatcgatgttttcgatcccaagttcaacattgtctcccctggagcagacatgagtgtttactacccgtatacggaaaccgacaagagactcactgccttccatcctgaaatcgaggagctcatctacagcgacgtcgagaactccgagcacaagttcgtgctgaaggacaagaagaagccgatcatcttctcgatggcgcgtctcgaccgcgtgaagaacatgacaggcctggtcgagatgtacggcaagaacgcgcgcctgagggagctggcgaacctcgtgatcgttgccggtgaccacggcaaggagtccaaggacagggaggagcaggcggagttcaagaagatgtacagcctcatcgacgagtacaagttgaagggccatatccggtggatctcggcgcagatgaaccgcgtccgcaacggggagctgtaccgctacatttgcgatacgaagggcgcattcgtgcagcctgcgttctacgaagcgttcggcctgactgtgatcgagtccatgacgtgcggtctgccaacgatcgcgacctgccatggtggccctgctgagatcatcgtggacggggtatctggcctgcacattgacccttaccacagcgacaaggccgcggatatcctggtcaacttctttgacaaatgcaaggcagatccgagctactgggacaagatctcacagggcggcctgcagagaatctatgagaagtacacctggaagctctactccgagaggctgatgaccctgaccggcgtgtacgggttctggaagtacgtgagcaacctggagaggcgcgagacccgccgctacatcgagatgttctacgccctgaagtaccgtagcctggcaagccaggttccgctgtccttcgattagtacggggaaagaagaagaagaagaagcccaggccggagaaccatcgcctgcatttcgatctgtttcaccgcaattcgcattgttagtcgtgtattggagttatgtgtacttggtttccaagaactttggttccttctcgttttttttccttgtttgagcgtttttgggcagcgctggcctggttcctagtatggtgggaattggctgcaccttttgcttcgaataaaaatgcctgctcgttcaccaaaaaaaaatcataaaataaaacaaaaccagaactcagatgg

SEQ ID NO: 79249 - DNA, 3067 bp, Zea Mays
attcttgcagtgcgctgtgctttattgggaagccaaatcctattattttctgcctctagggtctgaatggaatcagtactcttgagacagaaaatcaatccaatcaagttgatttctttctttaaaaatattatcacagaactaagtgcttgtgcggaatcagtactggcttttgtttggtggaggatcaatacttgcttttgtttgggggtggcaactgttttgctataagattccatgtgttcctgttgagatgaatcatatatagtatagctgcatactacaaatctgtttttcaaatttaggttgctttggcatgatctatttttttgtcagacagactttctaagtgtattctgaaccatcgagccatggctgccaagctgactcgcctccacagtcttcgcgaacgccttggtgccaccttctcctcccatcccaatgaactgatagcactcttttccaggtatgttcaccagggcaagggaatgcttcagcgccatcagctgcttgcggagtttgatgccctgtttgatagtgacaaggagaagtatgcaccctttgaagacattcttcgtgctgctcaggaagcaattgtgctccccccatgggttgcacttgctatcaggccaaggcctggtgtctgggattacattcgggtgaatgtaagtgagctggctgtggaggagctgagtgtttctgagtacttggcattcaaggaacagctggtggatggacaatccaacagcaactttgtgcttgagcttgattttgagcccttcaatgcctcctttcctcgtccttccatgtcgaagtccatcggaaatggagtgcaattccttaaccgacacctgtcgtccaagttgttccaggacaaggagagtttgtaccccttgctgaacttcctcaaggctcataactacaagggcacgacgatgatgttgaatgacagaatccaaagccttcgtggtctccaatcatccctgagaaaggcagaggagtatctactgagtgttcctcaagacactccctactcggagttcaaccataggttccaagagcttggcttggagaagggttggggtgacactgcgaagcgtgtactcgacacactccacttgcttctcgaccttctggaggcccctgatcctgccaacttggagaagttccttggaactataccaatgatgttcaacgttgttatcctgtctcctcatggctacttcgcccagtccaatgtgcttggataccctgacactggcggtcaggttgtgtacattctggatcaggtccgtgctttggagaatgagatgcttctgaggattaagcagcaaggccttgatatcactccgaagatcctcattgttaccaggctgttgcctgatgctgctgggactacgtgcggtcagcggctggagaaggtcattggtactgagcacacagacatcattcgcgttcccttcagaaatgagaatggcatcctccgcaagtggatctctcgttttgatgtctggccatacctggagacatacactgaggatgtttccagtgaaataatgaaagaaatgcaggccaagcctgaccttatcattggcaactacagcgatggcaacctagtcgccactctgctcgcgcacaagttgggagtcactcagtgtaccatcgctcatgccttggagaaaaccaaataccccaactcggacatatacttggacaaattcgacagccagtaccacttctcttgccagttcacagctgaccttattgccatgaaccacaccgatttcatcatcaccagcacattccaagaaatcgcgggaagcaaggacaccgtggggcagtacgagtcccacatcgcgttcactcttcctgggctctaccgtgtcgtccatggcatcgatgttttcgatcccaagttcaacattgtctcccctggagcagacatgagtgtttactacccgtatacggaaaccgacaagagactcactgccttccatcctgaaatcgaggagctcatctacagcgacgtcgagaactccgagcacaagttcgtgctgaaggacaagaagaagccgatcatcttctcgatggcgcgtctcgaccgcgtgaagaacatgacaggcctggtcgagatgtacggcaagaacgcgcgcctgagggagctggcgaacctcgtgatcgttgccggtgaccacggcaaggagtccaaggacagggaggagcaggcggagttcaagaagatgtacagcctcatcgacgagtacaagttgaagggccatatccggtggatctcggcgcagatgaaccgcgtccgcaacggggagctgtaccgctacatttgcgatacgaagggcgcattcgtgcagcctgcgttctacgaagcgttcggcctgactgtgatcgagtccatgacgtgcggtctgccaacgatcgcgacctgccatggtggccctgctgagatcatcgtggacggggtatctggcctgcacattgacccttaccacagcgacaaggccgcggatatcctggtcaacttctttgacaaatgcaaggcagatccgagctactgggacaagatctcacagggcggcctgcagagaatctatgagaagtacacctggaagctctactccgagaggctgatgaccctgaccggcgtgtacgggttctggaagtacgtgagcaacctggagaggcgcgagacccgccgctacatcgagatgttctacgccctgaagtaccgtagcctggcaagccaggttccgctgtccttcgattagtacggggaaagaagaagaagaagaagcccaggccggagaaccatcgcctgcatttcgatctgtttcaccgcaattcgcattgttagtcgtgtattggagttatgtgtacttggtttccaagaactttggttccttctcgttttttttccttgtttgagcgtttttgggcagcgctggcctggttcctagtatggtgggaattggctgcaccttttgcttcgaataaaaatgcctgctcgttcaccaaaaaaaaatcataaaataaaacaaaaccagaactcagatgg

SEQ ID NO: 79250 - DNA, 2177 bp, Zea Mays
aaaaaacaaacaaaaaggcacaccagttcaccaactgctgtctctctgtctcctgctagcgctgagcgagcgagcgtcggagaattcagcagtccagtccaacgcgtcttccagtctttcgcccaagagcaaagaccgcaaaggccactcctttttctcctcccccctccccaaaccgccgcctcctctccccccctcgacctctcctctgctcatagtctcacccgagtcacctccacacacacacacacacacacacacaccgatacacggacacatacacgcgctctccctcctcctcctcctcctccagtcccggcaacggaaggtccactgcggcgccggcctcactggcatcaccatattgccaaccgcgcatattttcagtttgtagaagccatcttttaaagaacattttgggcagagattgccagtactattacttgtggttaacatggacttctcagctggttcctacttcacatcatggcctgtcaattctgcttctgagagctacagtttggctgatggttcagttgaatcctatggaggagaaggaatcatgccaccttcaagctacttcatgacagccagatcagatcacaatttaaaattcagtgtgcatgaacaggattccactatgcttccaaacgaccaattgacctatgctggcgctaggcagactgatctattacctggcgagactccatctagggataagctttgtgagaatcttctggagcttcaacgactgcagaataacagcagcctaccgagtaatttagtgcccccaggggtacttcagcacaattcaacacctggggcctttcatccgcagttgaatactcctggactttcagaactgcctcatgccttatctagttcaattgatagtaatggaagtgaagtttctgcttttctcgctgatctaaatgctgtttcttcagcctcagctttgtgttccacattccaaaatgcttcttcattcatggaaccagtaaatctagaagctttcagttttcaaggggcacaaagtgattctgttttgaacaaaacaacacatccaaatgggaatatctcagtatttgacagtgctgccttggcatcactacatgagcaaaatgcagtgtgcaacgttcctatccctacgttcactgcacgtaatcaaattgcagttgctgcaatgcccggatcactgatccctcaaaagattccttcatggatcaatgaaaacaaaagtgagggtcctgttagccatccttctgatgtacaaatccaaccaaattctgttggaaatggtgttggtgtgaagccacgagtaagggctcgtcgtggacaggcaactgatcctcatagcattgctgaacgacttcgcagagaaaaaatttcagataggatgaaaaatctacaagatcttgtcccgaattctaataaggcagacaaggcatccatgctggatgaaatcattgatcatgtgaaatttcttcagcttcaggtcaaggtgttaagcatgagtaggctaggagctccaggagcagttcttccccttctcgcagaatctcagactgagggttaccgcggtcaacttctgtcagctccaaccaacgcacaaggattactggacacggaagaatcggaagacaccttcgccttcgaggaagaggttgtgaagctaatggaaaccagcatcacaagcgcaatgcagtaccttcagaacaagggactctgcctgatgccagttgcccttgcttccgccatatccacccagaagggcgtctccgccgcgtcaatccctcccgaacagtgaaataaagacatgctgctgctcccatgagtacgaggaaacaactgcagaagacagaaaactcaagatggctgaagaatgcagcaaagcccgtatagagtacagggtaggaagttagtctgaccagtgttcatgacctcatctactaatttgcttttcagaatcagctttttggtatctattgcgcataagttggtttttccttttcccttgctctctctctctctctctccctggggccgtatccgggtgctccgtggatagttgcgtttcagaaacttgaactgtatctggatgatctatctggtttctcttttgtgcatagaaaaaactgtaaaatcttctggttctgttctgctagatgagatctatg

SEQ ID NO: 79251 - DNA, 2151 bp, Zea Mays
gtctttcgcccaagagcaaagaccgcaaaggccactcctttttctcctcccccctccccaaaccgccgcctcctctccccccctcgacctctcctctgctcatagtctcacccgagtcacctccacacacacacacacacacacacacaccgatacacggacacatacacgcgctctccctcctcctcctcctcctccagtcccggcaacggaaggtccactgcggcgccggcctcactggcatcaccatattgccaaccgcgcatattttcagtttgtagaagccatcttttaaagaacattttgggcagagattgccagtactattacttgtggttaacatggacttctcagctggttcctacttcacatcatggcctgtcaattctgcttctgagagctacagtttggctgatggttcagttgaatcctatggaggagaaggaatcatgccaccttcaagctacttcatgacagccagatcagatcacaatttaaaattcagtgtgcatgaacaggattccactatgcttccaaacgaccaattgacctatgctggcgctaggcagactgatctattacctggcgagactccatctagggataagctttgtgagaatcttctggagcttcaacgactgcagaataacagcagcctaccgagtaatttagtgcccccaggggtacttcagcacaattcaacacctggggcctttcatccgcagttgaatactcctggactttcagaactgcctcatgccttatctagttcaattgatagtaatggaagtgaagtttctgcttttctcgctgatctaaatgctgtttcttcagcctcagctttgtgttccacattccaaaatgcttcttcattcatggaaccagtaaatctagaagctttcagttttcaaggggcacaaagtgattctgttttgaacaaaacaacacatccaaatgggaatatctcagtatttgacagtgctgccttggcatcactacatgatagcaaagagtttatcagtggtaggctcccctcatttgctagtgtccaggaaacaaacgtagctgctagtggtttcaagactcagaagcaggagcaaaatgcagtgtgcaacgttcctatccctacgttcactgcacgtaatcaaattgcagttgctgcaatgcccggatcactgatccctcaaaagattccttcatggatcaatgaaaacaaaagtgagggtcctgttagccatccttctgatgtacaaatccaaccaaattctgttggaaatggtgttggtgtgaagccacgagtaagggctcgtcgtggacaggcaactgatcctcatagcattgctgaacgacttcgcagagaaaaaatttcagataggatgaaaaatctacaagatcttgtcccgaattctaataaggcagacaaggcatccatgctggatgaaatcattgatcatgtgaaatttcttcagcttcaggtgttaagcatgagtaggctaggagctccaggagcagttcttccccttctcgcagaatctcagactgagggttaccgcggtcaacttctgtcagctccaaccaacgcacaaggattactggacacggaagaatcggaagacaccttcgccttcgaggaagaggttgtgaagctaatggaaaccagcatcacaagcgcaatgcagtaccttcagaacaagggactctgcctgatgccagttgcccttgcttccgccatatccacccagaagggcgtctccgccgcgtcaatccctcccgaacagtgaaataaagacatgctgctgctcccatgagtacgaggaaacaactgcagaagacagaaaactcaagatggctgaagaatgcagcaaagcccgtatagagtacagggtaggaagttagtctgaccagtgttcatgacctcatctactaatttgcttttcagaatcagctttttggtatctattgcgcataagttggtttttccttttcccttgctctctctctctctctctccctggggccgtatccgggtgctccgtggatagttgcgtttcagaaacttgaactgtatctggatgatctatctggtttctcttttgtgcatagaaaaaactgtaaaatcttctggttctgttctgctagatgagatctatg

SEQ ID NO: 79252 - DNA, 2118 bp, Zea Mays
ctttttctcctcccccctccccaaaccgccgcctcctctccccccctcgacctctcctctgctcatagtctcacccgagtcacctccacacacacacacacacacacacacaccgatacacggacacatacacgcgctctccctcctcctcctcctcctccagtcccggcaacggaaggtccactgcggcgccggcctcactggcatcaccatattgccaaccgcgcatattttcagtttgtagaagccatcttttaaagaacattttgggcagagattgccagtactattacttgtggttaacatggacttctcagctggttcctacttcacatcatggcctgtcaattctgcttctgagagctacagtttggctgatggttcagttgaatcctatggaggagaaggaatcatgccaccttcaagctacttcatgacagccagatcagatcacaatttaaaattcagtgtgcatgaacaggattccactatgcttccaaacgaccaattgacctatgctggcgctaggcagactgatctattacctggcgagactccatctagggataagctttgtgagaatcttctggagcttcaacgactgcagaataacagcagcctaccgagtaatttagtgcccccaggggtacttcagcacaattcaacacctggggcctttcatccgcagttgaatactcctggactttcagaactgcctcatgccttatctagttcaattgatagtaatggaagtgaagtttctgcttttctcgctgatctaaatgctgtttcttcagcctcagctttgtgttccacattccaaaatgcttcttcattcatggaaccagtaaatctagaagctttcagttttcaaggggcacaaagtgattctgttttgaacaaaacaacacatccaaatgggaatatctcagtatttgacagtgctgccttggcatcactacatgatagcaaagagtttatcagtggtaggctcccctcatttgctagtgtccaggaaacaaacgtagctgctagtggtttcaagactcagaagcaggagcaaaatgcagtgtgcaacgttcctatccctacgttcactgcacgtaatcaaattgcagttgctgcaatgcccggatcactgatccctcaaaagattccttcatggatcaatgaaaacaaaagtgagggtcctgttagccatccttctgatgtacaaatccaaccaaattctgttggaaatggtgttggtgtgaagccacgagtaagggctcgtcgtggacaggcaactgatcctcatagcattgctgaacgacttcgcagagaaaaaatttcagataggatgaaaaatctacaagatcttgtcccgaattctaataaggcagacaaggcatccatgctggatgaaatcattgatcatgtgaaatttcttcagcttcaggtcaaggttaagcatgagtaggctaggagctccaggagcagttcttccccttctcgcagaatctcagactgagggttaccgcggtcaacttctgtcagctccaaccaacgcacaaggattactggacacggaagaatcggaagacaccttcgccttcgaggaagaggttgtgaagctaatggaaaccagcatcacaagcgcaatgcagtaccttcagaacaagggactctgcctgatgccagttgcccttgcttccgccatatccacccagaagggcgtctccgccgcgtcaatccctcccgaacagtgaaataaagacatgctgctgctcccatgagtacgaggaaacaactgcagaagacagaaaactcaagatggctgaagaatgcagcaaagcccgtatagagtacagggtaggaagttagtctgaccagtgttcatgacctcatctactaatttgcttttcagaatcagctttttggtatctattgcgcataagttggtttttccttttcccttgctctctctctctctctctccctggggccgtatccgggtgctccgtggatagttgcgtttcagaaacttgaactgtatctggatgatctatctggtttctcttttgtgcatagaaaaaactgtaaaatcttctggttctgttctgctagatgagatctatg

SEQ ID NO: 79253 - DNA, 1987 bp, Zea Mays
atgcttaacagtcatgaacatgacattgatgtttgctgagggcctgaggggaacctgtcaactgtatgcagcatcaccatattgccaaccgcgcatattttcagtttgtagaagccatcttttaaagaacattttgggcagagattgccagtactattacttgtggttaacatggacttctcagctggttcctacttcacatcatggcctgtcaattctgcttctgagagctacagtttggctgatggttcagttgaatcctatggaggagaaggaatcatgccaccttcaagctacttcatgacagccagatcagatcacaatttaaaattcagtgtgcatgaacaggattccactatgcttccaaacgaccaattgacctatgctggcgctaggcagactgatctattacctggcgagactccatctagggataagctttgtgagaatcttctggagcttcaacgactgcagaataacagcagcctaccgagtaatttagtgcccccaggggtacttcagcacaattcaacacctggggcctttcatccgcagttgaatactcctggactttcagaactgcctcatgccttatctagttcaattgatagtaatggaagtgaagtttctgcttttctcgctgatctaaatgctgtttcttcagcctcagctttgtgttccacattccaaaatgcttcttcattcatggaaccagtaaatctagaagctttcagttttcaaggggcacaaagtgattctgttttgaacaaaacaacacatccaaatgggaatatctcagtatttgacagtgctgccttggcatcactacatgatagcaaagagtttatcagtggtaggctcccctcatttgctagtgtccaggaaacaaacgtagctgctagtggtttcaagactcagaagcaggagcaaaatgcagtgtgcaacgttcctatccctacgttcactgcacgtaatcaaattgcagttgctgcaatgcccggatcactgatccctcaaaagattccttcatggatcaatgaaaacaaaagtgagggtcctgttagccatccttctgatgtacaaatccaaccaaattctgttggaaatggtgttggtgtgaagccacgagtaagggctcgtcgtggacaggcaactgatcctcatagcattgctgaacgacttcgcagagaaaaaatttcagataggatgaaaaatctacaagatcttgtcccgaattctaataaggcagacaaggcatccatgctggatgaaatcattgatcatgtgaaatttcttcagcttcaggtcaaggtgttaagcatgagtaggctaggagctccaggagcagttcttccccttctcgcagaatctcagactgagggttaccgcggtcaacttctgtcagctccaaccaacgcacaaggattactggacacggaagaatcggaagacaccttcgccttcgaggaagaggttgtgaagctaatggaaaccagcatcacaagcgcaatgcagtaccttcagaacaagggactctgcctgatgccagttgcccttgcttccgccatatccacccagaagggcgtctccgccgcgtcaatccctcccgaacagtgaaataaagacatgctgctgctcccatgagtacgaggaaacaactgcagaagacagaaaactcaagatggctgaagaatgcagcaaagcccgtatagagtacagggtaggaagttagtctgaccagtgttcatgacctcatctactaatttgcttttcagaatcagctttttggtatctattgcgcataagttggtttttccttttcccttgctctctctctctctctctccctggggccgtatccgggtgctccgtggatagttgcgtttcagaaacttgaactgtatctggatgatctatctggtttctcttttgtgcatagaaaaaactgtaaaatcttctggttctgttctgctagatgagatctatg

SEQ ID NO: 79254 - DNA, 1711 bp, Zea Mays
catgcaaaagaatcaaaccagcttatgtgccaagtgctattattttaccatcagggctccaacaaattgatgtgatgcacttccctgaacaattataaatactttagttctcaatttctcactattttttataagttcaaagcagacatgatcttataaatcactataactaaaaggtataactgaagggcacactggaattgacagattgtacatattgattgtaatgacaaggaatattcaaagtgggcaaaaacaacaggcaactgagggtaatggagtaggggtgtatcaacctagagagattgtccaaagcctttgccaattgaagcgatggaggagaaccttggagtcatcagtaaccatagcaagcagatccttctctggattccattctgccatttttatctacaagtatgaaacacaggcacgtcagtacccgatgccccatttagcatacataggaaattgaatctcactgtgctcaatcgattctgaattacagaaaagatataaagcgacaaaaggtgaaattcagtatcagcaaccgtatgatatatgtgcttgctattaactctctattacttaaagattgtttggtagcgaattgtaaacatgatacaaggtgaatgagactgattaagcatgaacaagaggcaaacggtgtaattactaatgtgcatttgcaaaacaaaaaatagcattcaaagctgaaatcagtgctctatatcagtgtctgccggcgaaggcaaatcattagactagattactagacaaaagtagtttttggctacaccaattcacaaatcattaagtgataacactatgaatgtttcaaaatgacatgcatactgaaaaccttttggctgcaccgattcaccaataaaatcaaatctacaataagaaaatttatatattagataacaacaatataagaaaagtgtattgataaaagtagcatagtgaatatacagctaagttgtaatatgtgggaacaaatttttcccctaaacaataaagtactttacacatcatatatgtgatcgaaagataaaatgattttttgtaagctttttcacaagtggctagatgtaacgaattgattgctgatctaaaaaatgagaggcatcctgttagcttgtgccttatccatccaattccaatctcgagtttctggtggttggtaggttaacgaacaatgtgcgggtgcggccatgacccatggccagattcgaaggaccgcgacagccacgctataccccttctctccccgtccctcaccactgtcgtattcccttggttcttgtgtcgatgaactgagtttgagaagagaaggtcgaggcagggagcttaccagtgaccggcggggcagcagcagcacgaacgcaagatcaatctctgggtgaccgtccgcattctgcagatcgtaaaatttgagatggggcaatggcctagcttgcccatccgtgaaccagccgttgccctggacagcgtgaacccaagcggccgcacattattttgcagcctcaacacatgttggttaagaatcagcacagcacgaacttgcacaacagggtttgcctacgcagaagggagaggcaggggaggagagcgcagactagacctggaacgggatgggcttgtcgaactggagctggaacggcgtggccgccgccgtggccatggacgcctcttcgatctgctcctccac

SEQ ID NO: 79255 - DNA, 745 bp, Zea Mays
ttggaagattaggttctgcttcaggctaacattttaatatggacgatgcactgacaactggaagcatcaagacgtcagatgcagaaaagagacgtttagcaaaagcttcccttgcttacaattgtgagagcaaaaactgtccgcacttcaggaaacttttcccagagtatgttgagaagtacaatcaacagcaacaattggagaatactgccgcagagccggtgccacaggagaatcctgcacctgttccatcccttgctgtccagcaagctccagtcgtcgccaatagggcgcaaccactggctgaggtacgccgtgacaagaaccagaagaaggcggtgcccttctggatggtgctggtcatgttttcagtttttggtgccgtgatggcgttgcccctaatgcaactttgacaacaataaagaccatgaggacgtgtgataccggggcagtaattttgtatagttttccattggttcgtgagtgtaacaaagttgccccctagacttacctaccaccttggagtcatattgatgaacttgtgatggtaacatgtgtagaaccgttatctatcttgactagtagcgtcagaagctcgttcgtattttgctttcgtttccaaaatcgtatagttattacttttcttgcccttgttcatctttgctgtgtgtgctggctttaaggttcagttcacaatttcatattccctttccaagcggcaagcgcatgtgttcttttgaatttt

SEQ ID NO: 79256 - DNA, 773 bp, Zea Mays
caaatgatttctaggacgcatataaaatttggaagattaggttctgcttcaggctaacattttaatatggacgatgcactgacaactggaagcatcaagacgtcagatgcagaaaagagacgtttagcaaaagcttcccttgcttacaattgtgagagcaaaaactgtccgcacttcaggaaacttttcccagagtatgttgagaagtacaatcaacagcaacaattggagaatactgccgcagagccggtgccacaggagaatcctgcacctgttccatcccttgctgtccagcaagctccagtcgtcgccaatagggcgcaaccactggctgaggtacgccgtgacaagaaccagaagaaggcggtgcccttctggatggtgctggtcatgttttcagtttttggtgccgtgatggcgttgcccctaatgcaactttgacaacaataaagaccatgaggacgtgtgataccggggcagtaattttgtatagttttccattggttcgtgagtgtaacaaagttgccccctagacttacctaccaccttggagtcatattgatgaacttgtgatggtaacatgtgtagaaccgttatctatcttgactagtagcgtcagaagctcgttcgtattttgctttcgtttccaaaatcgtatagttattacttttcttgcccttgttcatctttgctgtgtgtgctggctttaaggttcagttcacaatttcatattccctttccaagcggcaagcgcatgtgttcttttgaatttt

SEQ ID NO: 79257 - DNA, 1411 bp, Zea Mays
caagaactgcaagcaagatatacagtacaaggtagtgagaaaaggtcaaccataataaagataaaaatggtgttgctgccttgaccagatgcaaaattttcaagtctgttaaatgttggttattccatcaattgtttctagactaaggaccacgaaatcaaccactaataatacaaaaacagtgcattcgactacagacactacaaatgcacagctgagtagctgacaatttcaaacaaacaactctatgatgtaatcaattcacataccttcatctacatcaacagcaaccaccatcttagccgctgcctgctccggaaaccctagccgcttccctcgccgacaggcaccattcacgttcatgctcttgcctgtggcggcctcctcgagcggcagcacctccggatcgcgcatcagctgccgctgcgtggtgagcacctgcgccttcatccccgccgcctctccgtccaccctcctcctgaactcgccgtcgccgccaccatcccgccaacccaagcaacccctcaagctaagcgcgccgctcggcgtgaacctcctcccggctcccagatcaagaaataccgccttgcccggcagggtcctgcccctctcgacgcgcgcggtcgagtaggcgaacctgcagaggcaggagcggttggcggcggcggatggcatagcaccgctcggattccaactcaaacgcagaggcggaggccggagacgatacaacagcaaccgcacggctccgcggcttagcatgtcgacagaagcattcctatcccggggcagcccgacaaacctggacgcctcgcattcggcaaatcagattcgtcacaccccgcaatcgagaagaaacaaaagcgcagatcacaataaccgacggaatcgcttgcctgaacacgcgagtgagggcgaggattgcgacgaatcgaatgcctcggtgaggtcggaggtcggcgtctcagtcctcacaccggtcccgtgatctgggccatctctttcaagcgagatcgaaggtcgcgcggcgagggaaaagctcggaaatttcgtttggaaattctcagggcatatacgaaacggagatggcaaggcggatttcttggtcgattccagtgaacctttttcgtttcttcttccgctcttgctgtttggtttgtaggatttgtgcgactaaaaaaaacgtggtctaggaattttgtgtgcgattttttttgtgaacgtcagtgaccgtggtggtgggctcgcttctttttcgggaaaggagccgtgctcatcatatcataggttttttttttctcgaacggcgctatctatctatctatctatagacatgtaagacttttaagttgtctaaacaaatatttgtaaaataattgtgaagcaatttatatatgaaaagatgtgtctgaca

SEQ ID NO: 79258 - DNA, 2999 bp, Zea Mays
gggtgtcgaattcacgcccctagaccagggtcgcagcgacgccgcttccgcagaggcggcggactgaggagcggcgccgcggcaaggctgcgccggcgtcgagctgggccccgccggagaactgtgtgcgcgcgacctatcatgaaacgaggcgtcctattcgcagttgggctgattatgttgccagataggcccggcccagcatggccctgatagaaaagatagaaaaagcgacgacaatcattaaccaaatggcccatttaagctggcgaccgtccgctggaggctggactctgcgagacgatcgaggccgttcgttcttctctccgcctgcggccgtctcgttgtcttcccccaatgtgcacgagctctctctctctccgtatccggcggcggaagcggaagcggaagcggaaggaagtaggcggccaccatggtgaagggacgcacggggcagcgcgtcaggctctacgtccggggcaccatcctcggatacaagaggtccaagtcgaaccagtacgagaccacgtcgcttgtgcagatcgagggggtgaacaccaaggaggacgtcgcgtggtacgctggcaagcgcatggcgtacatctacaaggccaagaccaagagcagtgagacccgctacaggtgcatctggggtaaggtcacccgcccgcacggcaactccggcgttgtccgcgccaagttcaagtcgaacctcccgcctgagtctatgatttcagtttttttccccaacgaatctgttcagaagagtgaggcacacccttcgtctcatcagtgttttggacttcgcatagatcatcttttcaactcaactcaaatttacgatcctgatgccatgcatagtttcggcttgctggtgccattgcggttgcggcgccagatggtagcagcagccagcaccacccaagcacactggcaaatgacaggcagcagctacgcctgcacgtgcacggccttccgctccatcagcacgaagctagcagcacggtccagcgctggccgccgcagccgtggccgccgttctgccgttgacccctctgctggagggccgccgctgccgccgccaccagttgtcatcgccggcgccgtggcgtcgcccggcaagcgaatgccgccgtcaccaattggttgcaccagcagggccgccaccgctagtagtagtaggcaggcgaaagaggacgatggcgcgagcagaaacgtctcaggctttgagccatccatctggggcgatttcttcctcacctactccagccctctggccacgtcgtcccttcacaaggcatggatggtacatcgagcagagcagctgaaggaagaagtggcagcaaaactggtagcagcttccagcgcctgtagcctgcaccgtaggattcatctcatccacgtcttggagcgtctctgtctggatcatctcttcgaggacgagatcagcgacatgctagctcgaatgaacgacgtcgatgtcagtggctgcgaccttcaaacggtggccatgtggttctatcttctccgaaagcacggatacagtgtctcgtcagatgtctttgccgagttcagagacgaacaggggggtggttttacagcaaacagtgcaagggatctgctgagccttcactgcgctgcttgtctcgcgacgcgtggagagacgatacttgacgaggccatttccttcacagccaagagtttaaaatcaacagcgccgtatacgggagcagcgtcgttagcatgtgaaataaagcgtgcgctcgagatccccctcccaagacgtgtgagaatttacgaggctaaatctcgtatagctgaatatggaagagaggctgaggctgatgaactggtaatggagctagcaaagctcaactataatctcgtgcaactccagtatcaacaagagctgaagatcataacaaggtggtggaatggtctagagcttcagtcaaggctatcgttcgctcgagacagagttgtggagtgctacttctggatcgtgggagtatattttgagccaagctactctcgagctcgaataatactaacaaaagtcatcgccatcgtgtccctattggacgacacttatgatgtctatggaactccacaggagtgcgagttatttaccgagtgtatagaaagctgggaccctgcagttgctggaggtcttccagagaacatgaagttcatttttggaaaaattttggatacttaccaaagcattgaggaagagttagcgccggaagagaaataccgcatgccctacataaaaaattttattatagatctagtaagagcatacaacaaggaggtaagatggcgcgaacaagggtatgtgcctgcaaccgttgaggagcacctgcaggtttcagcaagaagtggcgcttgtcacctcttgtcgtgcgcatcatttgttggaatgggagatgttgcaggtgaagaagctttcgaatgggtgtgcagtgtgcctaaactagtgcaggcgctctgcatcattctcagactttccgatgatctcaagtcatatgagcgagagaaaatggccccgcatgttgcctcgacaatagaaagctgcatgagagagcacgaggtcccgctcgaagtggctcgcgtgaagatacaggaaatgatagatgaaacatggaaagatttcaacgaggagtggctgaacatgaacaagcaccagccggcggagctgctcgagaggatcttcaacctgacaagaacaatggtgtatatgtacaagaatgatgacgcgtacacaaattgccatgtcatcaaagacaccataaactcgttgtttgtggagcctgtttccatagcctaagacgttcgttaaatagttgtgatgccccatgcatggttgtgtgtaacaccataaaagccatcaattaaaataataaatttagatattatattgattagggtaataaaatttttagtgtttaattgttcatttgcatcgttttctttgtatgcacttgattgattatcgg

SEQ ID NO: 79259 - DNA, 1261 bp, Zea Mays
cacggttctgccatctacggacgcgcccacctcacctccatccgcctgtagccatggcctgcctcgatcctagcttggaaggttcccgagatccccgcctccctacaccgatccgcccacggacgcgcccacctcacctccatcctcccgtagccatggcccgccttgatcccagcttggaaggttcctgagatccctgcctccctacgccgatccgcccctcgcgccgcgtctctctcgttgcgtccttccatggatccgactctttggaaggtccacaccacgagcgcgccttccatggatggagacaccacgagccgcgtcgccgcatcctatctggtgccaagaatcacggacgctgcttcctccatccgcccggatccaactcaccttccctgctctctggttccgcgaagaatattgaaccgcgccgcctttggaaggtccacaacacgagcgcgccttccatggacagagacaccacgatccgcgccgccgcatcctctctggtgccaagaatcgcggatgccgcttcccacctgacccaatcgtccgcaatctccatctcctggcccgcgtcgttgcgtccgcgctctcctcctgccccgcggcattgcgtccgcaatctcctcctcctgccgcgtcgttgctctcgcgctgaacatggtctgcgccgctgctctcgcgctgaacatgtaaggcaagtcagctcccaaatcggacccgcgctgaacatggactgcgcccaaatcggatccgcaattataaatgttcagcgcggcatgccataacaacccaagattattcacgacgctctccatacatctactgctgccaggtccaaaacatctgcactagaacacctaaaaagaagtccgccaaagatttgatattgggtcgtggataaaagttgattgaactccaagccaataaatcaaatctacacattcagttcattctttagtagcctgttgtttcggctagcgagcgggtgcggaagaaggaagggagaggcgcttggttaaccggacgacaggacaccaccgggggttcgctgcaacgcagcgacggcttctgtagcttctcaggccaagttcctaataacaaaacttcaccgaccaataattttatcgaacgagaaaggcaaaggcatagagaaagacgtgcaaaaatgtcagtagaccaaaggaacaagttgaataagaagcgtcgtgaggcgcgacaacaaaacaagggacaacatatgatgtccactgtgtaa

SEQ ID NO: 79260 - DNA, 1161 bp, Zea Mays
gtagccatggcctgcctcgatcctagcttggaaggttcccgagatccccgcctccctacaccgatccgcccacggacgcgcccacctcacctccatcctcccgtagccatggcccgccttgatcccagcttggaaggttcctgagatccctgcctccctacgccgatccgcccctcgcgccgcgtctctctcgttgcgtccttccatggatccgactctttggaaggtccacaccacgagcgcgccttccatggatggagacaccacgagccgcgtcgccgcatcctatctggtgccaagaatcacggacgctgcttcctccatccgcccggatccaactcaccttccctgctctctggttccgcgaagaatattgaaccgcgccgcctttggaaggtccacaacacgagcgcgccttccatggacagagacaccacgatccgcgccgccgcatcctctctggtgccaagaatcgcggatgccgcttcccacctgacccaatcgtccgcaatctccatctcctggcccgcgtcgttgcgtccgcgctctcctcctgccccgcggcattgcgtccgcaatctcctcctcctgccgcgtcgttgctctcgcgctgaacatggtctgcgccgctgctctcgcgctgaacatgtaaggcaagtcagctcccaaatcggacccgcgctgaacatggactgcgcccaaatcggatccgcaattataaatgttcagcgcggcatgccataacaacccaagattattcacgacgctctccatacatctactgctgccaggtacgcccattatctacacagatgtgttgtgaggaaatggtctgctttttttctattgacatggttatggttggtattcctagctatttcattctgctttaagtagtcatttcattctgctgtaagtagtcggacaacacgaaagcaagaagttctaaggatttgctagctgtttaagcgatccaggtgctatattcagactagcgcattcccgaaattacattctatagactctttgatcttgtggtgtttgtgcaggtccaaaacatctgcactagaacacctaaaaagaagtccgccaaagatttgatattgggtcgtggataaaagttgattgaactccaagccaataaatcaaatctacacattc

SEQ ID NO: 79261 - DNA, 1374 bp, Zea Mays
agtcccgctgtcctccaaacgtcgcctatcttcccgcgcccgctcgtgtatccgtctctaagccaactccagcaacaccgtcaccgtgtgtgtttagactgatacattgtttgtagagagaattttgaaatagaaagtttgataaagagtgaaatagagagtcgctggagataatagtcgcccgcaacccatttgaaaatcacgccgtgttggcgtgtaatcggcgattcggcggccgccgggcggtggcgatggaggtgggtgacctgcacaaggtgtgggaggtccgtgcgctcaagatcaagcccgacgcgaccgccgcgcgggcaaccctcgaccgcgttgccaggcaggtccagcccatcatgcgccgccacaaatggcgcgtcaaggtcctctccgagttttcgtaagcgtccccacgaaccctaaccctaacctcccttctccccctccacgcctcccgatcgatcgattgatggaccccgtgcgtgcggggggtgtgattgatcaggccgcggaacccgaggctgctggggctcaatgtcggcgcgggcgtcgaagtcaagctgcggctacggcgcgccggccgcgaccatgacttcatcccgtacgaggaggtgctcgataccatgctacacgagctctgccacaacgagcgcgggccccacgatgcgcagttttacaagctctgggacgagctccgcaaggaatgcgaagaacttgtttcaaagggtatcactggaacaggacaagggtttgatggcacgggaaggcgagttggtggatttactgtacatccaccaccaccatctctgcggcaagctacgttagctgctgcacagaagcgggcaaggaatggagctctattgccttctggaccaagaaagttgggtggaaacagtgaaattatgagtgcacttagtccagtacaagctgctgcaatggcggctgaaagaagaatgtatgatgatttgtggtgtggatcacatgatcaatctgctattgatgattcggatgatgttattattcttcaagagtcgccaaatttgacaagggatgaaaaagacaagggtagctgctccaacacttctgcacagcccagcacttcttctagaattcacatagcagcacgagatgataggacaacaagtgatgcacttgatagttcaaagtgggaatgtggtgcttgcacacttctgaaccaggttagctccagatcttgaatgaagccagaaagggggaattaacattactgcccctgccaaacaagcacctaacatgtagtttttagtacctttcttgtaattactgcaaattcctcctatattttctcatttttttttcttgagcttatagtaatttgcaagtcac

SEQ ID NO: 79262 - DNA, 1726 bp, Zea Mays
agtcccgctgtcctccaaacgtcgcctatcttcccgcgcccgctcgtgtatccgtctctaagccaactccagcaacaccgtcaccgtgtgtgtttagactgatacattgtttgtagagagaattttgaaatagaaagtttgataaagagtgaaatagagagtcgctggagataatagtcgcccgcaacccatttgaaaatcacgccgtgttggcgtgtaatcggcgattcggcggccgccgggcggtggcgatggaggtgggtgacctgcacaaggtgtgggaggtccgtgcgctcaagatcaagcccgacgcgaccgccgcgcgggcaaccctcgaccgcgttgccaggccgcggaacccgaggctgctggggctcaatgtcggcgcgggcgtcgaagtcaagctgcggctacggcgcgccggccgcgaccatgacttcatcccgtacgaggaggtgctcgataccatgctacacgagctctgccacaacgagcgcgggccccacgatgcgcagttttacaagctctgggacgagctccgcaaggaatgcgaagaacttgtttcaaagggtatcactggaacaggacaagggtttgatggcacgggaaggcgagttggtggatttactgtacatccaccaccaccatctctgcggcaagctacgttagctgctgcacagaagcgggcaaggaatggagctctattgccttctggaccaagaaagttgggtggaaacagtgaaattatgagtgcacttagtccagtacaagctgctgcaatggcggctgaaagaagaatgtatgatgatttgtggtgtggatcacatgatcaatctgctattgatgattcggatgatgttattattcttcaagagtcgccaaatttgacaagggatgaaaaagacaagggtagctgctccaacacttctgcacagcccagcacttcttctagaattcacatagcagcacgagatgataggacaacaagtgatgcacttgatagttcaaagtgggaatgtggtgcttgcacacttctgaaccagcctctggcaccaatctgtgaagtttgtggtacaacaaaacctaaaattgcaaaggcgaagtacacaacttggtcttgtaaattttgtactctagagaacagcactaaacttgacaaatgctcagcatgtgatcaatggagatactcatatgggccacctgtagccacatatggcccaagctatgattgagataacagtgaaggccacaatagcacagacgacacttctgagcaggcatctgctgcattgtcgatataagttgtgttatctgcaacagttcttgctctattactactcatgtcatatcaggtttcataggtctggaaaaatctgatacctgttaaactggtagtactatttaagcgaccctcttttgtggacgttgcttggagcaatccacggattggtaaaatgaaacaatcgtagtccatgtctgttaacgttagccccaagcccagggcatgcagcattgcagcctctgaactcgtgtttcgtgtctcgccgtctcggtgacaggtaacaactcgcacctagggcacaccggcgaattggtctttatctgttccgacgtcgtcgactcatgttgccgtggggtgaggaaatttattacgtcaattaatgtaaggtttattacaagtatctgcaatgctctttttaaaagaatttgcctgcttgttagacca

SEQ ID NO: 79263 - DNA, 1658 bp, Zea Mays
agtcccgctgtcctccaaacgtcgcctatcttcccgcgcccgctcgtgtatccgtctctaagccaactccagcaacaccgtcaccgtgtgtgtttagactgatacattgtttgtagagagaattttgaaatagaaagtttgataaagagtgaaatagagagtcgctggagataatagtcgcccgcaacccatttgaaaatcacgccgtgttggcgtgtaatcggcgattcggcggccgccgggcggtggcgatggaggtgggtgacctgcacaaggtgtgggaggtccgtgcgctcaagatcaagcccgacgcgaccgccgcgcgggcaaccctcgaccgcgttgccaggcaggtccagcccatcatgcgccgccacaaatggcgcgtcaaggtcctctccgagttttcgccgcggaacccgaggctgctggggctcaatgtcggcgcgggcgtcgaagtcaagctgcggctacggcgcgccggccgcgaccatgacttcatcccgtacgaggaggtgctcgataccatgctacacgagctctgccacaacgagcgcgggccccacgatgcgcagttttacaagctctgggacgagctccgcaaggaatgcgaagaacttgtttcaaagggtatcactggaacaggacaagggtttgatggcacgggaaggcgagttggtggatttactgtacatccaccaccaccatctctgcggcaagctacgttagctgctgcacagaagcgggcaaggaatggagctctattgccttctggaccaagaaagttgggtggaaacagtgaaattatgagtgcacttagtccagtacaagctgctgcaatggcggctgaaagaagaatgtatgatgatttgtggtgtggatcacatgatcaatctgctattgatgattcggatgatgttattattcttcaagagtcgccaaatttgacaagggatgaaaaagacaagggtagctgctccaacacttctgcacagcccagcacttcttctagaattcacatagcagcacgagatgataggacaacaagtgatgcacttgatagttcaaagtgggaatgtggtgcttgcacacttctgaaccagcctctggcaccaatctgtgaagtttgtggtacaacaaaacctaaaattgcaaaggcgaagtacacaacttggtcttgtaaattttgtactctagagaacagcactaaacttgacaaatgctcagcatgtgatcaatggagatactcatatgggccacctgtagccacatatggcccaagctatgattgagataacagtgaaggccacaatagcacagacgacacttctgagcaggcatctgctgcattgtcgatataagttgtgttatctgcaacagttcttgctctattactactcatgtcatatcaggtttcataggtctggaaaaatctgatacctgttaaactggtagtactatttaagcgaccctcttttgtggacgttgcttggagcaatccacggattggtaacaactcgcacctagggcacaccggcgaattggtctttatctgttccgacgtcgtcgactcatgttgccgtggggtgaggaaatttattacgtcaattaatccgaagagcgacgaatgtcgcagggtcgccactggctggtaccgc

SEQ ID NO: 79264 - DNA, 1695 bp, Zea Mays
cctccagctgctggggttgccgtcaccgtcaggcgaggtcgtcgcctcgtgaggaacaggaactcgatattgcttgtgcttcccggtggcctccgcgttcggtgtcccgtcccgttctccaacctgatgagcgatcaggcactgttctccaataaacgggcaccgcacgacaaaccccgagcggcagtggggaggagaagaatccagacggagtcacgcagacgccatcactactaccacacccggcctaacgaactcctccccaccccaagccccgcccagagcgacccacgcaccacgccatgcgcccgggcggcctcccgacccagcagcccggcacgccgggccgcgcgcgccgccgcccggatctcaccctccccatgccccagcgcgaggtcgccacctccctcgccgtcccgctccctctcccgccagccgccgcctccgccggggggcccaccccgccgggcgtcaccgcgcccgcccccgcggcgcagcagcagcagcagccgcccccgctcgcggagctggagcgcgtgcgccgcgtcggcagcggcgcgggcgggacggtgtggatggtgcggcaccgcggcacggggcgcccctacgcgctcaaggtgctgtacgggaaccacgacgacgcggtgcggcggcagatcgcgcgcgagatcgccatcctccgcaccgccgagcacccggccgtggtgcggtgccacggcatgtacgagcgcggcggggagctccagatcctgctggagtacatggacggcgggtcgctcgacggccgccgcatcgccgccgagccgttcctcgccgacgtcgcgcgccaggtcctgtccgggatcgcgtacctccaccgccgccacatcgtgcaccgcgacatcaagccctccaacctcctcatcgactcggcgcgccgcgtcaagatcgccgacttcggcgtcggccgcatcctcaaccagaccatggacccctgcaactcctccgtcggcaccatcgcctacatgagccccgagcggatcaacaccgacctcaacgacggcagctacgacggctacgccggcgacatctggagcttcggcctcagcatcctcgagttctacttgggcaggttccccttcggggagaacctcggcaggcagggcgactgggccgcgctcatgtgcgccatctgctacaacgacccgcccgagccaccgcccaccgcctcgcgcgagttcagggggttcatcgcctgctgcctgcagaagaacccggccaagcgcctcacggccgcgcagctgctgcagcaccccttcgtcgccggcccgcacccgcagcccctcgctgctcctcccccgtcatgaccacaccaccatttcggcgggttgggagttgggaccaaagtacggatctcgtctcagtttggcctccctcccttggctgcaggcagtgtgggactccaatcaatccggcgttcccttggatacaatacacggatctgatccctgatgtatcaagggaatttgctggccaatttcgggttctatcctccatcatcgacgtccgcatccatccatggttgcttctgctgcagttaaggtctcctaccaattttgagtgctgtgtccatctccaattctccatcatcaattcatcaccacggtcgtcctcaacccgctcctcgctgctgcgatttaagacgacgacgacgac

SEQ ID NO: 79265 - DNA, 1006 bp, Zea Mays
tgagagggttccatggaaaccctaatcctcgcggtatataaccttccgcgcggccgccactcttccctgacttgtgcgccatcacacacaagacacaaccccactcacccggcagggaggccctcttcgtcggcggaggccatggtttccctcaagccgcagaagaggctcgccgcgggagtcctaaaatgtggcaaggggaaggtcccgggcaaggagggcccatgaggccaagcagaaggggaggcactctggttacggtaagcgcaggggtaccagggaggctaggctccccaccaagatcctttggatgcgcaggatgcgtgtcctcaggcgtctgctgcgcaagtatcgtgaagcaaagaaaatcgacaaacacatgtaccacgatatgtatatgaaagtaaaaggaaacatgtttaaaaataagagggtactcatggagagcatccacaagtcaaaggccgagaaggccagagagaagactctctcggatcagtttgaggccaagcgagccaagagcaaggcttcccgtgagagaaagattgcaaggagggaggagagattggctcagggcccaagggaacctgcggcagcaccagtatcagctactgctccgtttgcagctgcaccaaagaaggcgaagaagtgaaaaaggtggtcttctagttctaggacctaattttggagcgccccaactcttttgctgttacatatccaagctgtcagatatctgtaataacatcttatctcgtttttcatgttggacaatgtagtagagttgtttgtcccaagtgtatttggaacgaattttcacagaatctgcttaatgcttcggtggaacccagttctggttttgctattttaccttgtagatctggccgctgtggctagcctccgtgcttttttgcttcgatgttccataaccttgtctggtgttgacccgcgatgacgcaggttttgtagtgttctttggtgaattatgagctctgatgtgatattgata

SEQ ID NO: 79266 - DNA, 2395 bp, Zea Mays
tgagagggttccatggaaaccctaatcctcgcggtatataaccttccgcgcggccgccactcttccctgacttgtgcgccatcacacacaagacacaaccccactcacccggcagggaggccctcttcgtcggcggaggccatggtttccctcaagccgcagaagaggctcgccgcgggagtcctaaaatgtggcaaggggaaggtgtggcttgaccccaacgaggtctacgagatctcgatggctaactcgcgtaagaccaccaccgcttgctctccgcctcctccccccgcccatttcgtgtttgctgggcgtcgaatccgttcgtcgatgagcaacggcgtccgagtggtccgaccacggacgcccttttcaccccttgatcgttcagttcggttgacgtcgtaggagtatgtctgtgtttctgcgcgtatctattggttttgttaccttcttgtttatttttgcattctgttgctgcaggtgtccataatagctcactcactgcttgccacctcatatagctgtgttgcttatcttagcgcacatgattttaaactgttaattgtatctatgttatttttgctattatactttatttccttctaatgtgcagtctaggttatctgtatatctagttttgtgacaatgtttgctatgtgatgcaattgtgcatagagtttattgtgtcttttgattatttcgtgcactgctgatgattcgcaaagaattgtttatttagcaatacatattctgttcatggcgtacttgcaaactgtaccttctgtcctacttggtttattactttgtttttgctatgactgctattactttcatggtctgctgatgatttagaagtatgattttatcttagtctgaggtgttgtgctcaggcttttatttttcatgcatttgtttttctgtttggtttagcactgatatcgccatgcatgtctctgcagttttatgtgattagatggaggtgagatagttattatattactcagtgttgtcgcgggtacttgttttctctattctttgtgctcgttcaattttgatcagtgttatgtttgaacttttgttggagcattgaaatcttgtttcactgctttgaaacgcaaggaacataagtatgacatttctatacaacttactttacaggtcagaacattcgtaagctggtgaaggatggattcataattaagaagccacagaaaatccactcaaggtcccgggcaaggagggcccatgaggccaagcagaaggggaggcactctggttacggtaagcgcaggggtaccagggaggctaggctccccaccaagatcctttggatgcgcaggatgcgtgtcctcaggcgtctgctgcgcaagtatcgtgaagcaaagaaaatcgacaaacacatgtaccacgatatgtatatgaaagtaaaaggaaacatgtttaaaaataagagggtactcatggagagcatccacaagtcaaaggccgagaaggccagagagaagactctctcggatcagtttgaggccaagcgagccaagagcaaggcttcccgtgagagaaagattgcaaggagggaggagagattggctcaggtaagacaatgtctcaatgccatgaaactgtatatttttattgtcattgaacctgctgtgttatgatatggattgatggtaattaaatttactaacttccattagtttgttgatctgttcaatattgaaactacgcttgattttttttcatctcgctacattgttgcatatgattgtcctttggccatgtgttttaatttagtgtactatcattgtttttcaaagtgtcatgttatggcttgtagtttgttttaaactgttagattttgtgtatattttttgctgacagattgtggcattttgatgtacctgtttcttccatcttttgtgttctatgttgaaatgcttgtttcatctttgtgtagggcccaagggaacctgcggcagcaccagtatcagctactgctccgtttgcagctgcaccaaagaaggcgaagaagtgaaaaaggtggtcttctagttctaggacctaattttggagcgccccaactcttttgctgttacatatccaagctgtcagatatctgtaataacatcttatctcgtttttcatgttggacaatgtagtagagttgtttgtcccaagtgtatttggaacgaattttcacagaatctgcttaatgcttcggtggaacccagttctggttttgctattttaccttgtagatctggccgctgtggctagcctccgtgcttttttgcttcgatgttccataaccttgtctggtgttgacccgcgatgacgcaggttttgtagtgttctttggtgaattatgagctctgatgtgatattgata

SEQ ID NO: 79267 - DNA, 1487 bp, Zea Mays
tgagagggttccatggaaaccctaatcctcgcggtatataaccttccgcgcggccgccactcttccctgacttgtgcgccatcacacacaagacacaaccccactcacccggcagggaggccctcttcgtcggcggaggccatggtttccctcaagccgcagaagaggctcgccgcgggagtcctaaaatgtggcaaggggaaggtgtggcttgaccccaacgaggtctacgagatctcgatggctaactcgcgtcagaacattcgtaagctggtgaaggatggattcataattaagaagccacagaaaatccactcaaggtcccgggcaaggagggcccatgaggccaagcagaaggggaggcactctggttacggtaagcgcaggggtaccagggaggctaggctccccaccaagatcctttggatgcgcaggatgcgtgtcctcaggcgtctgctgcgcaagtatcgtgaagcaaagaaaatcgacaaacacatgtaccacgatatgtatatgaaagtaaaaggaaacatgtttaaaaataagagggtactcatggagagcatccacaagtcaaaggccgagaaggccagagagaagactctctcggatcagtttgaggccaagcgagccaagagcaaggcttcccgtgagagaaagattgcaaggagggaggagagattggctcaggtaagacaatgtctcaatgccatgaaactgtatatttttattgtcattgaacctgctgtgttatgatatggattgatggtaattaaatttactaacttccattagtttgttgatctgttcaatattgaaactacgcttgattttttttcatctcgctacattgttgcatatgattgtcctttggccatgtgttttaatttagtgtactatcattgtttttcaaagtgtcatgttatggcttgtagtttgttttaaactgttagattttgtgtatattttttgctgacagattgtggcattttgatgtacctgtttcttccatcttttgtgttctatgttgaaatgcttgtttcatctttgtgtagggcccaagggaacctgcggcagcaccagtatcagctactgctccgtttgcagctgcaccaaagaaggcgaagaagtgaaaaaggtggtcttctagttctaggacctaattttggagcgccccaactcttttgctgttacatatccaagctgtcagatatctgtaataacatcttatctcgtttttcatgttggacaatgtagtagagttgtttgtcccaagtgtatttggaacgaattttcacagaatctgcttaatgcttcggtggaacccagttctggttttgctattttaccttgtagatctggccgctgtggctagcctccgtgcttttttgcttcgatgttccataaccttgtctggtgttgacccgcgatgacgcaggttttgtagtgttctttggtgaattatgagctctgatgtgatattgata

SEQ ID NO: 79268 - DNA, 1306 bp, Zea Mays
caaccagcggctccggaatccggatctccccacacggccacacggacacggccacacgcttcggcaggcacggccggtccatgtagcgcgcgcccggacacggagcaggggtcacgcgcaacggcagcccggcttgtcgggagcgcgaggggcgacatgggggcggaggccggcgagcccagctccatcctcagcttagcttccgccttttcctatggagtcgcatctatggcaatggttttcgtgaacaaagcggttcttatgcagtatgttcactccatgaccctcctcactttacaggtcattctttcagttatctgcaccgccactggtgtcctcattgcagcacttggagatttttcctttgacctatatggatactgcatggctctaacatcagtcttcttccagactatgtatttgattctggtggagaaatcaggcgctgaggatggtctttcctcagtggacttgatgttttacaacagcatattgtcacttccatttctgtttttcctcattatagcaacaggagaattcccccattctcttacagtattatctgcaaaggcagcctctctgacgttcggtgtcattctcgttatctcactggtgatgggaatcgttctcaatttcactatgttttggtgcacaattgtgaactctgctctgactacaacaatagtaggagttctcaagggtgtcggatcaacgaccctcggtttcgttctgttgggaggtgtcgaagtacatgctctgaatgttactggactggtgatcaacacatttggcggcgtatggtactcttatgcgaagtataagcagaaaaggaaaacaccacggaagatccaacatgatgtagagtcgcatgcccacaagtagcgtcagattaactgtagttatacttcgttctttgatcagataataactggatgcatgtttaaatccattttttctgaactctattccatcaccagcagttaggttggtgcaattaagggaagcaacaagcttttcctatttcacatcttatagtttttacgatcagtgatatagggtgtaaagtcagttatttttcgcagctccagtgtgcgatgcatcacttttgctccaaagagagaaatccatgggtctggatgaggtgattgccggttctttaaggaatttttaaacatatgctcctagttcagctgttcagttttacccagtagtaatggatggatgagacgttttactagtgttatgagaaaggatctctggattctttctttcttaataaaataacatgtgcgaaaggacttctaac

SEQ ID NO: 79269 - DNA, 1565 bp, Zea Mays
caaccagcggctccggaatccggatctccccacacggccacacggacacggccacacgcttcggcaggcacggccggtccatgtagcgcgcgcccggacacggagcaggggtcacgcgcaacggcagcccggcttgtcgggagcgcgaggggcgacatgggggcggaggccggcgagcccagctccatcctcaggtcattctttcagttatctgcaccgccactggtgtcctcattgcagcacttggagatttttcctttgacctatatggatactgcatggctctaacatcagtcttcttccaggttgtgttatttccttgtgctttgttcttacaaatttattctataacttttgagaggtttttaggcaaggttctttatctttgtaattgacaactgaatgtgtatgcactatgcagactatgtatttgattctggtggagaaatcaggcgctgaggatggtctttcctcagtggacttgatgttttacaacagcatattgtcacttccatttctgtttttcctcattatagcaacaggagaattcccccattctcttacagtattatctgcaaaggtcagtgatacaaatgcagtataatcaaaaatttaccagcacatttaagctagcaatctctgcgtgttcccttgtatcacccctttaactcaagaatgacaattaaaggtagttctccagagtttctgaagcaaatggtttcacacttcgctgctattcattaacacaatagtactcttaaagttcgtgtcattgtctgttgtatgtctctatcctaacttgcattgtctggtgacacttgaactgcaggcagcctctctgacgttcggtgtcattctcgttatctcactggtgatgggaatcgttctcaatttcactatgttttggtgcacaattgtgaactctgctctgactacaacaatagtaggagttctcaagggtgtcggatcaacgaccctcggtttcgttctgttgggaggtgtcgaagtacatgctctgaatgttactggactggtgatcaacacatttggcggcgtatggtactcttatgcgaagtataagcagaaaaggaaaacaccacggaagatccaacatgatgtagagtcgcatgcccacaagtagcgtcagattaactgtagttatacttcgttctttgatcagataataactggatgcatgtttaaatccattttttctgaactctattccatcaccagcagttaggttggtgcaattaagggaagcaacaagcttttcctatttcacatcttatagtttttacgatcagtgatatagggtgtaaagtcagttatttttcgcagctccagtgtgcgatgcatcacttttgctccaaagagagaaatccatgggtctggatgaggtgattgccggttctttaaggaatttttaaacatatgctcctagttcagctgttcagttttacccagtagtaatggatggatgagacgttttactagtgttatgagaaaggatctctggattctttctttcttaataaaataacatgtgcgaaaggacttctaac

SEQ ID NO: 79270 - DNA, 1801 bp, Zea Mays
caaccagcggctccggaatccggatctccccacacggccacacggacacggccacacgcttcggcaggcacggccggtccatgtagcgcgcgcccggacacggagcaggggtcacgcgcaacggcagcccggcttgtcgggagcgcgaggggcgacatgggggcggaggccggcgagcccagctccatcctcagcttagcttccgccttttcctatggagtcgcatctatggcaatggttttcgtgaacaaagcggttcttatgcagtatgttcactccatgaccctcctcactttacagcaaatagcaacagcacttctgatacattttggtcaagttctaggaatgtctaaacgaaaagactttagctggataaccgcgaagaaacttcttccagtgtcaattttctacaatgcaaatgtgggatttgctctagcaagcttgaaaggggttaacatcccaatgtatattgcaatcaaaaggatcactccccttgctgtgttggtggctgggtgcatgcggggaaaggggaagccaccgacacaggtcattctttcagttatctgcaccgccactggtgtcctcattgcagcacttggagatttttcctttgacctatatggatactgcatggctctaacatcagtcttcttccagactatgtatttgattctggtggagaaatcaggcgctgaggatggtctttcctcagtggacttgatgttttacaacagcatattgtcacttccatttctgtttttcctcattatagcaacaggagaattcccccattctcttacagtattatctgcaaaggtcagtgatacaaatgcagtataatcaaaaatttaccagcacatttaagctagcaatctctgcgtgttcccttgtatcacccctttaactcaagaatgacaattaaaggtagttctccagagtttctgaagcaaatggtttcacacttcgctgctattcattaacacaatagtactcttaaagttcgtgtcattgtctgttgtatgtctctatcctaacttgcattgtctggtgacacttgaactgcaggcagcctctctgacgttcggtgtcattctcgttatctcactggtgatgggaatcgttctcaatttcactatgttttggtgcacaattgtgaactctgctctgactacaacaatagtaggagttctcaagggtgtcggatcaacgaccctcggtttcgttctgttgggaggtgtcgaagtacatgctctgaatgttactggactggtgatcaacacatttggcggcgtatggtactcttatgcgaagtataagcagaaaaggaaaacaccacggaagatccaacatgatgtagagtcgcatgcccacaagtagcgtcagattaactgtagttatacttcgttctttgatcagataataactggatgcatgtttaaatccattttttctgaactctattccatcaccagcagttaggttggtgcaattaagggaagcaacaagcttttcctatttcacatcttatagtttttacgatcagtgatatagggtgtaaagtcagttatttttcgcagctccagtgtgcgatgcatcacttttgctccaaagagagaaatccatgggtctggatgaggtgattgccggttctttaaggaatttttaaacatatgctcctagttcagctgttcagttttacccagtagtaatggatggatgagacgttttactagtgttatgagaaaggatctctggattctttctttcttaataaaataacatgtgcgaaaggacttctaac

SEQ ID NO: 79271 - DNA, 233 bp, Zea Mays
aaaactacatgtgatggcactcgatcatggagtgggctgcacgaagggctgggccgccaactgcattatggtaagcttctcttgtttttttattttgttttttctttctttttctaatatttatttatttatatttttttcaactcaaactcaatttcaagtataagttttacgactgtaagattatatgcacaagcaataaaacttcagcatgatgcatagcttattggtgt

SEQ ID NO: 79272 - DNA, 3331 bp, Zea Mays
ccgaaaggccaagccggctccccgtcccatcgctcgcttccccctcccgcgaatcattcgattcggcccgcctcgtctcgcccgcccgattcgatttggccgtcagggtgatcggagccggcgctagggttagggttccggcgatccccatacctatggtgcagctgccgagctcggggaagcggcacgcggagccggccatggctccggcgcggcgcgcggcgacggtcaagctagaggtggaggagctcggggccgacgagcgctgcccgctcagcaagcgcgccaaggcagctctgccgatgcccccgacgcctccgcagccgcagcaggatatgtaccacaatgtactcgatgaacctagcccattgggtctgcggctgaaaaaaagtccatcactcttggatttgattcagatgagactttctcaagcatccaatgctggcgagtcatccatggacaacagcggttctgagccttccaagaagaaagacaataaatctggtgcttctgcagcaggcgaacgactaaaagcttcgaattttcctgcaagtatattgaagattggttcatgggagtatgtgtcacggtacgaaggtgatttggtggcaaagtgttactttgcaaagcataaacttgtgtgggaagttctggaaggtggccttaagagtaagatagagattcaatggtcagatattactgctttgaaggcaacttgccccgaaaatggccaaggaaccttggacgtggcgttggccagaccacctcttttctttaaagagacagatccgcagccaagaaaacacacactgtggcaggctacctcagatttcactggtggtcaagcgagtgtgcacaggcggcattttctgcagtgcccttcaaccttgttgagcaagaattttgagaagcttattcagtgtgatcagcggctatatcaattgagtcaacaaccggaaatcacattagactctgcgttgtttgaacctaggagctcaatatttgaggatccggttgaatcaaaatgtgctgggtttactaatttgaaagatgaacatgaggctctacctggctattcaggcccggtgtcaccatgtgctggttcctccatatctgctaagaatgaaaacaatgattccattggaatgacagctgaatatctttctcagacagtaggaacaggagttggtgctgtaggtgtacaagctgttggcagaaatgtgaatggtgcagcaccagaattcactattccccactggtggagtcaattgaaggtgcctgggcttagaccatcgatgtctgtggatgattttgtgaaccacctaggcaactgcatctcagagcagatcacttcaggcaatccggcgttggccaacaacgaggtgccgaccaaagaaacacttgaggggattgctcagtaccttcttggtgacacacaaggcccaccggtttctgcttcagacgagagatcactgatggccagggtggactccctctgctgtttgattcagaaagacacagtgccggttaccaaaccaaaacctgagccaaatgacagcgacagcatcggtgttgaagcctcggatggttccgacgaagaattcagctctgcaccaactgggaaacctacagatgccaccaatctaccagccatgtcaagaaaggattcgtttggggagctgctgactaacctcccccgcattgcctcgctaccacagttcctcttcaagataccagagggtacagagaactgaagctggaagtcaagacctcgcgcccttatgctgtaaagattgtacccaagcaataagaaatccgggcctggatgctcgtccattgcttttggacttggagaagaagtaggacctttccatgttaacgcagatgggaagggggtccatgtcaatccttattcttggaacaaagttgcaaatttactgttccttgattcacctgttggtgttggttactcatattcaaacacctctgatgatgctttaaaaaatggggatgcaagaactgccacggattcattggcattcttactgaagtggcttgaacgctttcctcaatacaaggaacgcgaattttatttgacaggggagagttatgctggtcactatgttcctcaactggctcaagccataaaaaggcaccatgaggctactggtgacaaatcaattaatctaaagggctatatggtagggaatgctctcactgatgatttccatgaccactatggaatatttcaattcatgtggactactggcctgatctctgatcaaacatacaagctgctgaatgttttctgtgactacgagtccttcgtgcattcgtctccacagtgtgataagattatggatattgctagcactgaagctggaaacattgattcatatagcatcttcacacctacatgtcatgcatcttttgcctcttcaaagaacaaagtgatgaaaaggctacattctgctggaaaaatgggagaacagtatgatccatgcactgagaagcattcaactgtatacttcaatctagctgaggttcagaaggcacttcatgttaatacagtcattggaaaatcaaaatgggagacttgcagtgaagctgttaatactcattggggggattgcgaaagatctgtgctgcatatctatcatgaacttatacagtatggcctccgtatatgggtgttcagtggagatacagatgcagtgattccagtgacttcaactagatacagcatcgatgctctcaagcttccaacaataactccatggcatgcttggtacgacgatgacggtgaggtcggtggatggacccaagggtacaggggactcaattttgtgaccgtgaggggagcaggtcacgaagtccctcttcatcgacccaaacaggccctcacgctaatcaaatcgttcttgactgggagcccaatgcctgtgcaatccagcacacacagcaacatgtaatccgtgttgttgcaactgattcacgagatgaatgaacatcccgaagcacccaagtcagccagttgtccaacccggcttgttctgcaacttgctgtagttgtttatgtatcagagctaccggtgccggttaccgcagcagccgtgcttttgtcggccctgttggtgcttgttgcagtaccagttatcccctaaggcaggggacagaaactgcggaatagtttttgtttgcattgacgtgacagcactgtaatcttaaacatcgtaccatagtcctttctatgacaaaggtgtggtttctgatgtctgcaataaatgatctggacttggggggtaaaaatgaaatactgctgtgttgcatt

SEQ ID NO: 79273 - DNA, 4603 bp, Zea Mays
ggatgttaaaaattatgaactattcttcacatgctcccagtttattgcatggatgtctctaagtcttgtccgtgtcagtggggcttggtttgaaatcctctataacccaataatgtgcttcttctggatattgaaggttattctagagatacctcatttgcaatacaagcttatcttactgaaggcagcgtcatcttttatcgagattatctcattttgtactgcaaccatatttggactctttgtcactgtggctgctgtaataggccaatcaggcatcaaaagagaagcgaactctattgaagccccactcattccaaataatgaaaaggctgagggtgaaactacagacatgataaaggactacagtttgtgggaactgttgactttcaaattcgttaatccagtgatggacattggtatcacaagacaacttgacttcacagatttacttgagttaccaaatgagctcagagctacctcctgttatgacaaacttctgtcttcctggactgctgaatatcaaaaccaccatgataactcatctctacttagagccatgtctaattcttatggatggacatacttgcgtttgggccttcttaaggtattaaatgacagcatcggttttgttagccctctgttgcttaacaagtttataagacttcttcagcaaggttctgatggcatggatggatatattcttgccatttccttaggattgacttctattatcaagtcctttttagatagccaatactcatttcgtctagcaaagctcaagttgatgttacgatcaagcatcatggggataatttattggaagtgcctatgtctcagtctagctgagcgttctaggttttctgaaggtgagatacaaaccttcatgtctgttgatgctgatcgcacaataaacttgtgtaacagccttcatgatgcctggagcttgccactacagattggagttgctctttatctgttatatacacaagtcaattatgcttttctatctgggcttgcaataacaatcatactaataccagtgaacaaatggatttctacaaggattgctggtgcaacagaaaagatgatgaagcaaaaagacaggaggataagctgtgcaggggagctcttagcacatattagaacagtgaagatgtacagttgggagaaactattcactgaacgtttggtggaaagaagagaatcagaagtgaagcatctcgcgacaagaaaatatctggatgcttggtgcgtctatttctgggcaaccacaccgacattgttctccctttccaccttttctatttttgcaataacgggacacgcattggatgctgccacggtatttacttgtgttgcactctttaacacactaatatcaccgctaaactcatttccatgggttattaatgggatgattgatgctgttatctctagcagacggctgagtaattatttatctactccagagcatcactcatccgagttaaatgcctctgctgaccttttaaaccaccactttaagagatataccaaagtaactcataatccaatggccatcgtctttcagaatgtatcctgttcttggtctagcagctctgttgctgagctgaacatagttctcagagatatatctttgcagctacaaaaagggttctttattgcaattgtaggcgaggttggttctggtaaatcatctttattgaacacagtcattggagagactcgtgtcatcagtggttctattagctcctgtggttcaattgcctatgtaccacaggtaccatggatcttatctggctctttacgagataatattttgcttggtaaagaatttgatccaaggagatacgaagaagtaatagaggcatgtgcgcttcatgttgacatatcggcaatgaccagaggagatatgtcacatattggagagaaaggtaccaacttatctggtggacaaagagctcgtctagcattggcaagggctttgtaccacaattctgatgtatacttgtttgatgacatccttagcgcggttgactcccaagttgcttcgtgcatcctggaaaaggctattatggggcaccaactaatgcagaaaacaagattactaagcacacacaatcttcaggccatttttgctgcagatatgattgtagtcatggctaatgggctcatcaagtggttcgggacaccgaaatctttcttggcaactccatattcaagaacctctaagccagataattcaagtcctacctcatttgcagcttctgtgaaagataaaacaccaatggtaacatgtgaactgaaacctgatgctgtacttgaagattcagtggtttgttatgaggagacaaaagatcgggtagaagaagaggcaaggaaacaaggcaaggttgagcttggtgtctacaaaaaatatgcagcatttgtggggtggtcaactgttgttttaatattcctaagcgcattcttaatgcaaacatctcgtaacggcaatgatatttggttaacttactgggttgataccagcacaggcaccaacaacacgaggttttatcttattatccttgctatgtttggcatcatcaattctcttttcactttgggaagggcattttcttttgcattcggtggcctccgtgcagcaatccatattcatgcatctcttcttgaaaatatcatcagtgcaccgatttgtttctttgaccaaaatcccagtggtcggatcctaaacagattatcgtcagacctctatgccgttgatgattctcttcctttcatcctcaatatatttgtggccaacttcttcagcttattcggcactctggttgttttgtcttattcacaggtttccttcttactcgtcttacttccactctggcttatctataggaagttgcaggtctacatcacgtgaagtacggcgacttgatagcgttgctcgttcaccaatctattcatctttcacagagacacttgatggttcatcaacaataagagctttccagaatgaagggttcttctttgaaagattcatccaacatgtgacactatatcagaaaacgtcctacactgagctcgttgctagtttgtggctctcgttgagactccagttgttggcaggttttatcattctgtttatcgccatgatggctactatcagcttccatagcagttctcttgtcaactttgcaacacctggactggtgggcctggctttatcatatgcagcaccggtagtatcattgctcaatggcttcttaaccacctttacagagacagaaaaggaaatgatctccgtggaaagggttgacgagtacattggcatacctcaagaagaactccagggatcagaacctccaccgagaagctggccaacggaagggaagatcgagtttgaacatgtaacactgaagtacaagccagagctcccacctgctttaagtgacgtttcgttccttattgcatcaggcatgcaggttggaataataggaaggactggagcaggcaaatcaagtatactgaatgcacttttccgcttagttccaatttggaacggccgcatattagtagatggcattgatttggctaaagttgccgtccgagaactccgtggacattttgcagtggtcccacagagcccctttttgtttgatgggtctttgagggaaaacctggatcctttcaatacaaaaacagatcttaggatatgggaagttcttgaaaactgccatatgaagggacaggtagaatcaataggtggacttgacattcatgtgaaagaaagcggtgcatctttttcagtagggcagcggcagctcctatgccttgcccgagccatcctaaaatcatccaaggtgctttgtctagatgaatgcacagccaatgttgacaaccaaacagcctccctgttgcaaaatactatttctgctgaatgcaaaggcatgactgttctcaccatagcgcatcgtatttcaacagtgatgaagatggacaatattctagttcttgatcaaggaaaactggttgaagaaggaaacccagaagcccttatgaatcacagacactcaagattcgctcagcatgtcaaggcctctcagatgtgattatgggagcatggtttcctactatgttatgctaggcctttttacttttttagagttagaacttagacaatatttactatggagcaatgagcttgtaagaacagttccgaattgacaccactagctaatatggctaatagaggctttgaccctctccgaatcattgaacatgatgatcccctagctgttaaaattccatgctttgttactaacagggaatggatctcagaacctgtttctaaacaagtactgttcataaaacccttatttcatcgattgcttttcagttctcatggtttttgttttggtaaggagtagctgtattcaagtctagtggcatggtgcttgattgctcgctaaaagttaggcaatgcaaggatggattgaaatgcaaaaggcacaacgggcaatgagggaaaatgcaggggatttaataaccatctgcagtttcatttcacaagcacaactgaacgaggtagcaaagtaaccctaac

SEQ ID NO: 79274 - DNA, 4478 bp, Zea Mays
ctattcttcacatgctcccagtttattgcatggatgtctctaagtcttgtccgtgtcagtggggcttggtttgaaatcctctataacccaataatgtgcttcttctggatattgaaggttattctagagatacctcatttgcaatacaagcttatcttactgaaggcagcgtcatcttttatcgagattatctcattttgtactgcaaccatatttggactctttgtcactgtggctgctgtaataggccaatcaggcatcaaaagagaagcgaactctattgaagccccactcattccaaataatgaaaaggctgagggtgaaactacagacatgataaaggactacagtttgtgggaactgttgactttcaaattcgttaatccagtgatggacattggtatcacaagacaacttgacttcacagatttacttgagttaccaaatgagctcagagctacctcctgttatgacaaacttctgtcttcctggactgctgaatatcaaaaccaccatgataactcatctctacttagagccatgtctaattcttatggatggacatacttgcgtttgggccttcttaaggtattaaatgacagcatcggttttgttagccctctgttgcttaacaagtttataagacttcttcagcaaggttctgatggcatggatggatatattcttgccatttccttaggattgacttctattatcaagtcctttttagatagccaatactcatttcgtctagcaaagctcaagttgatgttacgatcaagcatcatggggataatttattggaagtgcctatgtctcagtctagctgagcgttctaggttttctgaaggtgagatacaaaccttcatgtctgttgatgctgatcgcacaataaacttgtgtaacagccttcatgatgcctggagcttgccactacagattggagttgctctttatctgttatatacacaagtcaattatgcttttctatctgggcttgcaataacaatcatactaataccagtgaacaaatggatttctacaaggattgctggtgcaacagaaaagatgatgaagcaaaaagacaggaggataagctgtgcaggggagctcttagcacatattagaacagtgaagatgtacagttgggagaaactattcactgaacgtttggtggaaagaagagaatcagaagtgaagcatctcgcggtatttacttgtgttgcactctttaacacactaatatcaccgctaaactcatttccatgggttattaatgggatgattgatgctgttatctctagcagacggctgagtaattatttatctactccagagcatcactcatccgagttaaatgcctctgctgaccttttaaaccaccactttaagagatataccaaagtaactcataatccaatggccatcgtctttcagaatgtatcctgttcttggtctagcagctctgttgctgagctgaacatagttctcagagatatatctttgcagctacaaaaagggttctttattgcaattgtaggcgaggttggttctggtaaatcatctttattgaacacagtcattggagagactcgtgtcatcagtggttctattagctcctgtggttcaattgcctatgtaccacaggtaccatggatcttatctggctctttacgagataatattttgcttggtaaagaatttgatccaaggagatacgaagaagtaatagaggcatgtgcgcttcatgttgacatatcggcaatgaccagaggagatatgtcacatattggagagaaaggtaccaacttatctggtggacaaagagctcgtctagcattggcaagggctttgtaccacaattctgatgtatacttgtttgatgacatccttagcgcggttgactcccaagttgcttcgtgcatcctggaaaaggctattatggggcaccaactaatgcagaaaacaagattactaagcacacacaatcttcaggccatttttgctgcagatatgattgtagtcatggctaatgggctcatcaagtggttcgggacaccgaaatctttcttggcaactccatattcaagaacctctaagccagataattcaagtcctacctcatttgcagcttctgtgaaagataaaacaccaatggtaacatgtgaactgaaacctgatgctgtacttgaagattcagtggtttgttatgaggagacaaaagatcgggtagaagaagaggcaaggaaacaaggcaaggttgagcttggtgtctacaaaaaatatgcagcatttgtggggtggtcaactgttgttttaatattcctaagcgcattcttaatgcaaacatctcgtaacggcaatgatatttggttaacttactgggttgataccagcacaggcaccaacaacacgaggttttatcttattatccttgctatgtttggcatcatcaattctcttttcactttgggaagggcattttcttttgcattcggtggcctccgtgcagcaatccatattcatgcatctcttcttgaaaatatcatcagtgcaccgatttgtttctttgaccaaaatcccagtggtcggatcctaaacagattatcgtcagacctctatgccgttgatgattctcttcctttcatcctcaatatatttgtggccaacttcttcagcttattcggcactctggttgttttgtcttattcacaggtttccttcttactcgtcttacttccactctggcttatctataggaagttgcagttctattacaggtctacatcacgtgaagtacggcgacttgatagcgttgctcgttcaccaatctattcatctttcacagagacacttgatggttcatcaacaataagagctttccagaatgaagggttcttctttgaaagattcatccaacatgtgacactatatcagaaaacgtcctacactgagctcgttgctagtttgtggctctcgttgagactccagttgttggcaggttttatcattctgtttatcgccatgatggctactatcagcttccatagcagttctcttgtcaactttgcaacacctggactggtgggcctggctttatcatatgcagcaccggtagtatcattgctcaatggcttcttaaccacctttacagagacagaaaaggaaatgatctccgtggaaagggttgacgagtacattggcatacctcaagaagaactccagggatcagaacctccaccgagaagctggccaacggaagggaagatcgagtttgaacatgtaacactgaagtacaagccagagctcccacctgctttaagtgacgtttcgttccttattgcatcaggcatgcaggttggaataataggaaggactggagcaggcaaatcaagtatactgaatgcacttttccgcttagttccaatttggaacggccgcatattagtagatggcattgatttggctaaagttgccgtccgagaactccgtggacattttgcagtggtcccacagagcccctttttgtttgatgggtctttgagggaaaacctggatcctttcaatacaaaaacagatcttaggatatgggaagttcttgaaaactgccatatgaagggacaggtagaatcaataggtggacttgacattcatgtgaaagaaagcggtgcatctttttcagtagggcagcggcagctcctatgccttgcccgagccatcctaaaatcatccaaggtgctttgtctagatgaatgcacagccaatgttgacaaccaaacagcctccctgttgcaaaatactatttctgctgaatgcaaaggcatgactgttctcaccatagcgcatcgtatttcaacagtgatgaagatggacaatattctagttcttgatcaaggaaaactggttgaagaaggaaacccagaagcccttatgaatcacagacactcaagattcgctcagcatgtcaaggcctctcagatgtgattatgggagcatggtttcctactatgttatgctaggcctttttacttttttagagttagaacttagacaatatttactatggagcaatgagcttgtaagaacagttccgaattgacaccactagctaatatggctaatagaggctttgaccctctccgaatcattgaacatgatgatcccctagctgttaaaattccatgctttgttactaacagggaatggatctcagaacctgtttctaaacaagtactgttcataaaacccttatttcatcgattgcttttcagttctcatggtttttgttttggtaaggagtagctgtattcaagtctagtggcatggtgcttgattgctcgctaaaagttaggcaatgcaaggatggattgaaatgcaaaaggcacaacgggcaatgagggaaaatgcaggggatttaataaccatctgcagtttcatttcacaagcacaactgaacgaggtagcaaagtaaccctaac

SEQ ID NO: 79275 - DNA, 4558 bp, Zea Mays
ctcatttgcaatacaagcttatcttactgaaggcagcgtcatcttttatcgagattatctcattttgtactgcaaccatatttggactctttgtcactgtggctgctgtaataggccaatcaggcatcaaaagagaagcgaactctattgaagccccactcattccaaataatgaaaaggctgagggtgaaactacagacatgataaaggactacagtttgtgggaactgttgactttcaaattcgttaatccagtgatggacattggtatcacaagacaacttgacttcacagatttacttgagttaccaaatgagctcagagctacctcctgttatgacaaacttctgtcttcctggactgctgaatatcaaaaccaccatgataactcatctctacttagagccatgtctaattcttatggatggacatacttgcgtttgggccttcttaaggtattaaatgacagcatcggttttgttagccctctgttgcttaacaagtttataagacttcttcagcaaggttctgatggcatggatggatatattcttgccatttccttaggattgacttctattatcaagtcctttttagatagccaatactcatttcgtctagcaaagctcaagttgatgttacgatcaagcatcatggggataatttattggaagtgcctatgtctcagtctagctgagcgttctaggttttctgaaggtgagatacaaaccttcatgtctgttgatgctgatcgcacaataaacttgtgtaacagccttcatgatgcctggagcttgccactacagattggagttgctctttatctgttatatacacaagtcaattatgcttttctatctgggcttgcaataacaatcatactaataccagtgaacaaatggatttctacaaggattgctggtgcaacagaaaagatgatgaagcaaaaagacaggaggataagctgtgcaggggagctcttagcacatattagaacagtgaagatgtacagttgggagaaactattcactgaacgtttggtggaaagaagagaatcagaagtgaagcatctcgcgacaagaaaatatctggatgcttggtgcgtctatttctgggcaaccacaccgacattgttctccctttccaccttttctatttttgcaataacgggacacgcattggatgctgccacggtatttacttgtgttgcactctttaacacactaatatcaccgctaaactcatttccatgggttattaatgggatgattgatgctgttatctctagcagacggctgagtaattatttatctactccagagcatcactcatccgagttaaatgcctctgctgaccttttaaaccaccactttaagagatataccaaagtaactcataatccaatggccatcgtctttcagaatgtatcctgttcttggtctagcagctctgttgctgagctgaacatagttctcagagatatatctttgcagctacaaaaagggttctttattgcaattgtaggcgaggttggttctggtaaatcatctttattgaacacagtcattggagagactcgtgtcatcagtggttctattagctcctgtggttcaattgcctatgtaccacaggtaccatggatcttatctggctctttacgagataatattttgcttggtaaagaatttgatccaaggagatacgaagaagtaatagaggcatgtgcgcttcatgttgacatatcggcaatgaccagaggagatatgtcacatattggagagaaaggtaccaacttatctggtggacaaagagctcgtctagcattggcaagggctttgtaccacaattctgatgtatacttgtttgatgacatccttagcgcggttgactcccaagttgcttcgtgcatcctggaaaaggctattatggggcaccaactaatgcagaaaacaagattactaagcacacacaatcttcaggccatttttgctgcagatatgattgtagtcatggctaatgggctcatcaagtggttcgggacaccgaaatctttcttggcaactccatattcaagaacctctaagccagataattcaagtcctacctcatttgcagcttctgtgaaagataaaacaccaatggtaacatgtgaactgaaacctgatgctgtacttgaagattcagtggtttgttatgaggagacaaaagatcgggtagaagaagaggcaaggaaacaaggcaaggttgagcttggtgtctacaaaaaatatgcagcatttgtggggtggtcaactgttgttttaatattcctaagcgcattcttaatgcaaacatctcgtaacggcaatgatatttggttaacttactgggttgataccagcacaggcaccaacaacacgaggttttatcttattatccttgctatgtttggcatcatcaattctcttttcactttgggaagggcattttcttttgcattcggtggcctccgtgcagcaatccatattcatgcatctcttcttgaaaatatcatcagtgcaccgatttgtttctttgaccaaaatcccagtggtcggatcctaaacaggtttggtatcttattcatcagatcacctctagttttcagtaagcatcgaaagattgaaatgtcccttggccttggcaacgctttatgaacttccagattatcgtcagacctctatgccgttgatgattctcttcctttcatcctcaatatatttgtggccaacttcttcagcttattcggcactctggttgttttgtcttattcacaggtttccttcttactcgtcttacttccactctggcttatctataggaagttgcagttctattacaggtctacatcacgtgaagtacggcgacttgatagcgttgctcgttcaccaatctattcatctttcacagagacacttgatggttcatcaacaataagagctttccagaatgaagggttcttctttgaaagattcatccaacatgtgacactatatcagaaaacgtcctacactgagctcgttgctagtttgtggctctcgttgagactccagttgttggcaggttttatcattctgtttatcgccatgatggctactatcagcttccatagcagttctcttgtcaactttgcaacacctggactggtgggcctggctttatcatatgcagcaccggtagtatcattgctcaatggcttcttaaccacctttacagagacagaaaaggaaatgatctccgtggaaagggttgacgagtacattggcatacctcaagaagaactccagggatcagaacctccaccgagaagctggccaacggaagggaagatcgagtttgaacatgtaacactgaagtacaagccagagctcccacctgctttaagtgacgtttcgttccttattgcatcaggcatgcaggttggaataataggaaggactggagcaggcaaatcaagtatactgaatgcacttttccgcttagttccaatttggaacggccgcatattagtagatggcattgatttggctaaagttgccgtccgagaactccgtggacattttgcagtggtcccacagagcccctttttgtttgatgggtctttgagggaaaacctggatcctttcaatacaaaaacagatcttaggatatgggaagttcttgaaaactgccatatgaagggacaggtagaatcaataggtggacttgacattcatgtgaaagaaagcggtgcatctttttcagtagggcagcggcagctcctatgccttgcccgagccatcctaaaatcatccaaggtgctttgtctagatgaatgcacagccaatgttgacaaccaaacagcctccctgttgcaaaatactatttctgctgaatgcaaaggcatgactgttctcaccatagcgcatcgtatttcaacagtgatgaagatggacaatattctagttcttgatcaaggaaaactggttgaagaaggaaacccagaagcccttatgaatcacagacactcaagattcgctcagcatgtcaaggcctctcagatgtgattatgggagcatggtttcctactatgttatgctaggcctttttacttttttagagttagaacttagacaatatttactatggagcaatgagcttgtaagaacagttccgaattgacaccactagctaatatggctaatagaggctttgaccctctccgaatcattgaacatgatgatcccctagctgttaaaattccatgctttgttactaacagggaatggatctcagaacctgtttctaaacaagtactgttcataaaacccttatttcatcgattgcttttcagttctcatggtttttgttttggtaaggagtagctgtattcaagtctagtggcatggtgcttgattgctcgctaaaagttaggcaatgcaaggatggattgaaatgcaaaaggcacaacgggcaatgagggaaaatgcaggggatttaataaccatctgcagtttcatttcacaagcacaactgaacgaggtagcaaagtaaccctaac

SEQ ID NO: 79276 - DNA, 3248 bp, Zea Mays
gcaaccacaccgacattgttctccctttccaccttttctatttttgcaataacgggacacgcattggatgctgccacggtatttacttgtgttgcactctttaacacactaatatcaccgctaaactcatttccatgggttattaatgggatgattgatgctgttatctctagcagacggctgagtaattatttatctactccagagcatcactcatccgagttaaatgcctctgctgaccttttaaaccaccactttaagagatataccaaagtaactcataatccaatggccatcgtctttcagaatgtatcctgttcttggtctagcagctctgttgctgagctgaacatagttctcagagatatatctttgcagctacaaaaagggttctttattgcaattgtaggcgaggttggttctggtaaatcatctttattgaacacagtcattggagagactcgtgtcatcagtggttctattagctcctgtggttcaattgcctatgtaccacaggtaccatggatcttatctggctctttacgagataatattttgcttggtaaagaatttgatccaaggagaggagatatgtcacatattggagagaaaggtaccaacttatctggtggacaaagagctcgtctagcattggcaagggctttgtaccacaattctgatgtatacttgtttgatgacatccttagcgcggttgactcccaagttgcttcgtgcatcctggaaaaggctattatggggcaccaactaatgcagaaaacaagattactaagcacacacaatcttcaggccatttttgctgcagatatgattgtagtcatggctaatgggctcatcaagtggttcgggacaccgaaatctttcttggcaactccatattcaagaacctctaagccagataattcaagtcctacctcatttgcagcttctgtgaaagataaaacaccaatggtaacatgtgaactgaaacctgatgctgtacttgaagattcagtggtttgttatgaggagacaaaagatcgggtagaagaagaggcaaggaaacaaggcaaggttgagcttggtgtctacaaaaaatatgcagcatttgtggggtggtcaactgttgttttaatattcctaagcgcattcttaatgcaaacatctcgtaacggcaatgatatttggttaacttactgggttgataccagcacaggcaccaacaacacgaggttttatcttattatccttgctatgtttggcatcatcaattctcttttcactttgggaagggcattttcttttgcattcggtggcctccgtgcagcaatccatattcatgcatctcttcttgaaaatatcatcagtgcaccgatttgtttctttgaccaaaatcccagtggtcggatcctaaacaggtttggtatcttattcatcagatcacctctagttttcagtaagcatcgaaagattgaaatgtcccttggccttggcaacgctttatgaacttccagattatcgtcagacctctatgccgttgatgattctcttcctttcatcctcaatatatttgtggccaacttcttcagcttattcggcactctggttgttttgtcttattcacaggtttccttcttactcgtcttacttccactctggcttatctataggaagttgcagttctattacaggtctacatcacgtgaagtacggcgacttgatagcgttgctcgttcaccaatctattcatctttcacagagacacttgatggttcatcaacaataagagctttccagaatgaaaaaacgtcctacactgagctcgttgctagtttgtggctctcgttgagactccaggtgggcctggctttatcatatgcagcaccggtagtatcattgctcaatggcttcttaaccacctttacagagacagaaaaggaaatgatctccgtggaaagggttgacgagtacattggcatacctcaagaagaactccagggatcagaacctccaccgagaagctggccaacggaagggaagatcgagtttgaacatgtaacactgaagtacaagccagagctcccacctgctttaagtgacgtttcgttccttattgcatcaggcatgcaggttggaataataggaaggactggagcaggcaaatcaagtatactgaatgcacttttccgcttagttccaatttggaacggccgcatattagtagatggcattgatttggctaaagttgccgtccgagaactccgtggacattttgcagtggtcccacagagcccctttttgtttgatgggtctttgagggaaaacctggatcctttcaatacaaaaacagatcttaggatatgggaagttcttgaaaactgccatatgaagggacaggtagaatcaataggtggacttgacattcatgtgaaagaaagcggtgcatctttttcagtagggcagcggcagctcctatgccttgcccgagccatcctaaaatcatccaaggtgctttgtctagatgaatgcacagccaatgttgacaaccaaacagcctccctgttgcaaaatactatttctgctgaatgcaaaggcatgactgttctcaccatagcgcatcgtatttcaacagtgatgaagatggacaatattctagttcttgatcaaggaaaactggttgaagaaggaaacccagaagcccttatgaatcacagacactcaagattcgctcagcatgtcaaggcctctcagatgtgattatgggagcatggtttcctactatgttatgctaggcctttttacttttttagagttagaacttagacaatatttactatggagcaatgagcttgtaagaacagttccgaattgacaccactagctaatatggctaatagaggctttgaccctctccgaatcattgaacatgatgatcccctagctgttaaaattccatgctttgttactaacagggaatggatctcagaacctgtttctaaacaagtactgttcataaaacccttatttcatcgattgcttttcagttctcatggtttttgttttggtaaggagtagctgtattcaagtctagtggcatggtgcttgattgctcgctaaaagttaggcaatgcaaggatggattgaaatgcaaaaggcacaacgggcaatgagggaaaatgcaggggatttaataaccatctgcagtttcatttcacaagcacaactgaacgaggtagcaaagtaaccctaac

SEQ ID NO: 79277 - DNA, 1588 bp, Zea Mays
ctctgaaatccacaagctcatatgtaacattgtcatctgacaaaattgtcagggaccttgctgtccagacaaagactaccaaggaagcgcgggaagccgatgaggagacggacattgctacggcagccggggccagacgcagcaagcgagcatcgaagcccagcaaggcatatgcgggctctgagtggggaaattaggcccatggcctgatgtggcaaatagacacatttatataccgtgtatgcctgaacagagaggtcaggctggttgtatgaacctggcggcggccggcggcgatcaggtgtgatcgttcctcagttcggcaaactaacaatactaccctcacggttgtgtgtgtgcgttatctgtgttcttgccagtcgagattgagtgaggtgctaacatttggtaatcggagcaaggtagatccaaatccccatcgccaatcccacaactggcaccatgttgaccgaggaacagcaagcgatgctctgggctgctgtctagaagatggagaacaatcgaaggacgcacacagcactttgcgagttcctgtccaccacggagcggatggcgaacgccatatcggcgctagtcgtcaccactgaggaggacggctccgacaagctggcagcaaccttaccagcaatgcccatgccttccccgaccttagatccatgccacgacaccagcttcaccacctcccttgtcaccacgaagctacccctcatctccaccaccacgagcatgcgtatcaaagtcaagttcgatattgatgctaacggtatcctttctgtcaccgctgtgaacaagggtactgggaagaagcaggatatcaaaattactggtgctagcaatctgccaaaggacgaggtggataggatggttggcgaagctgggaagttcacagaagaggacaagcagaagtgagacgccattaacactaagaaccaagccgagtcagtcacctaccagaccgagaagcaactgaaggaactaggggaccatgtcccaggtgatgtcaaggggaaagtagagtcgaagagctcaaggatccggttacaagtaacagaaatattgtggagcagcaggatgagactgatgagaaaataatgctatgaaatagacagggcacgcaacatagaagctactgaagaaaatgctattgctgctgagagtaacacaggaaccatcacaaatgttgttgaagaaaaaatccctaatgaagaaattattttaggcactatctcttttaacatggcaaacaacagtgttaaggaggaaaagatgtataacgaagaagtgaacaagggcctaggttctcattaggatattatggtacatggtcctgataaagtcaaagagaagatgtgtgaagcgaccatgtcaggtcccaccttagacaagctcagtttgcttaaatctactgacagtcagaggtaaggatgaaagcacgggtgcagaccctgtttcacacgagaccaatctggcacaaaccagcgatggtgctgatgaagagatgatcacagagcctgctgttgacactgggcaagaggagcatctaagggaaaatcacgatgaaagtgga

SEQ ID NO: 79278 - DNA, 2272 bp, Zea Mays
atggaaccattcgtcgccgcgcaggggctcgtgatcgtgctacagcggtcgcacgcacgcgcctacgacgacccgttaaacaaaccaaacgtccaaaccaccaaaaacctccgagaaaacaaatccaccggcgcggagttgccctccttgctgccaccagcaccacctccatccgtccctcctccccgatatatcgccaccaccggctctactgctcgtaacgtctcctccctgcccgactcctcctcccccacaaggttcggctacccggcggggcggcgcgttctctgtccggttcctgcgtcggcggccgggcggatgtccctgttccggcggctgttttaccggcggccgcccgatgggctcgtcgagatctccggcaacatcctcgtatttgaccactgttactccacggatttgttggaagaagacgagctaatgccatacattggaggaattttaaaacagctacttggccgccactctatcgactcattcatggtattcaactttgagggaagcaagaaggacaatcaaattgccagcattttctcatactatgacatgtctgtgatgggttacccacgtaactatgaagggtgccccttgctcaccatggagatgattcaccattttctgagatcgagtgaaagctggctctcattaagccaggacaactttctgctaatacatgcagaacatggtggatggccaattcttgcttttgcattggcagccttattggtttacctcaaaaggtataatgatgagaggaaagctctggaggcagtctgcaaacaggcacctgatgggttagctgagtttttttcaccactggacccagtgccttctcagctgagatatttgaagtgccaaattttgatgggcaagggggatgtagaccaatattccgcatttatggcctagatccccttgcacctaatgacaggggtactaaacttctctttttgaccccaaagacaagtgattttgtccagctctatacacaggaagactgtgagataatcaaggttaatgttcattgtcctgttcaaggagacattgtgattgagtgtgttagtctggatgaggactttgaacatgaagttatgatgttcagagccatgtttagcacagcttttattgaagacaacttgttggtacttgataggaacgagattgatattctgtgggacacaaaacaccggtttcctgtggacttcagagttgaggttatattttctgatatggaaataggcacagcagttcacaaatcagggttatctagcgaggagaaagaaagcctttccaaggttggtgatgccttcagccatctggaatggtcaagcaaaagcgttcacatcacaaacgaagattcaaaacagaagggattacagacagaacacgatggcttcgaaaaaatacctctagaggaaacaggaaccagcagcgcatcagctggaaacagcagcagaactgtccagattcatcacatagaacctgctgaaaaccattcttctcttgccagtgtgcattcttctccagaacctgaggcttctggttctggaccgaactttcaaggaggtcaactctccaatgatacatctgcacaggaggaacacgaagtggatgacaccaaagtcgaacccaatccagaaatcccccgagatgcagaagctggtgatgctgatgccgccgccaccgccgcagaatggtctgacaacaactcggatgtgttcctatcagacacgcacacgccctcgagcagcacgccgtctagtcccccaaagttcgacgaagacatcctggaggctggtatggttggaactcgatcacagctcactgaactgaagatataatgggtctcctttcttcgactgtaaattggggctcacctgatccatggatgatggagctgcccacacacccaaaacatgtactttcacagatacgtttacgcaacaacatgggcaaatgatggtagttcagccccccccccccccaaatactcatatatgtacagctgatattctcaaacatgtataaaaaagatttgtgcagatttttgttgcttaccggagtatttctattgcactcattaatagtagcaccgatgaattcttgatagatttgtcccgtgaaaacgagctgacgtgcttggcgtctgaccacaccgcgctggtgtcctttttaatcggtcgagtcgtcgagctcgtggcggctgcgctggcaggatttcctcatcatgagcacgggcccacaaaggcccaac

SEQ ID NO: 79279 - DNA, 2085 bp, Zea Mays
gagagacatcaaaagtcttcaaggaaagagctgtcaaagatggcacttggaaggatcaagatgacacaaacaacatatggaagaagatgacaacctgcattcagaaggtggtctcaaagtatttgaccactgttactccacggatttgttggaagaagacgagctaatgccatacattggaggaattttaaaacagctacttggccgccactctatcgactcattcatggtattcaactttgagggaagcaagaaggacaatcaaattgccagcattttctcatactatgacatgtctgtgatgggttacccacgtaactatgaagggtgccccttgctcaccatggagatgattcaccattttctgagatcgagtgaaagctggctctcattaagccaggacaactttctgctaatacatgcagaacatggtggatggccaattcttgcttttgcattggcagccttattggtttacctcaaaaggtataatgatgagaggaaagctctggaggcagtctgcaaacaggcacctgatgggttagctgagtttttttcaccactggacccagtgccttctcagctgagatatttgaagtatgtgtcaaaacggcacaaatcactagaatcatggcctcctgttgacagaatgctgaatctgaactgtataataatcaggaaggtgccaaattttgatgggcaagggggatgtagaccaatattccgcatttatggcctagatccccttgcacctaatgacaggggtactaaacttctctttttgaccccaaagacaagtgattttgtccagctctatacacaggaagactgtgagataatcaaggttaatgttcattgtcctgttcaaggagacattgtgattgagtgtgttagtctggatgaggactttgaacatgaagttatgatgttcagagccatgtttagcacagcttttattgaagacaacttgttggtacttgataggaacgagattgatattctgtgggacacaaaacaccggtttcctgtggacttcagagttgaggttatattttctgatatggaaataggcacagcagttcacaaatcagggttatctagcgaggagaaagaaagcctttccaaggttggtgatgccttcagccatctggaatggtcaagcaaaagcgttcacatcacaaacgaagattcaaaacagaagggattacagacagaacacgatggcttcgaaaaaatacctctagaggaaacaggaaccagcagcgcatcagctggaaacagcagcagaactgtccagattcatcacatagaacctgctgaaaaccattcttctcttgccagtgtgcattcttctccagaacctgaggcttctggttctggaccgaactttcaaggaggtcaactctccaatgatacatctgcacaggaggaacacgaagtggatgacaccaaagtcgaacccaatccagaaatcccccgagatgcagaagctggtgatgctgatgccgccgccaccgccgcagaatggtctgacaacaactcggatgtgttcctatcagacacgcacacgccctcgagcagcacgccgtctagtcccccaaagttcgacgaagacatcctggaggctggtatggttggaactcgatcacagctcactgaactgaagatataatgggtctcctttcttcgactgtaaattggggctcacctgatccatggatgatggagctgcccacacacccaaaacatgtactttcacagatacgtttacgcaacaacatgggcaaatgatggtagttcagccccccccccccccaaatactcatatatgtacagctgatattctcaaacatgtataaaaaagatttgtgcagatttttgttgcttaccggagtatttctattgcactcattaatagtagcaccgatgaattcttgatagatttgtcccgtgaaaacgagctgacgtgcttggcgtctgaccacaccgcgctggtgtcctttttaatcggtcgagtcgtcgagctcgtggcggctgcgctggcaggatttcctcatcatgagcacgggcccacaaaggcccaac

SEQ ID NO: 79280 - DNA, 4959 bp, Zea Mays
ttggattggatatcaggagatatcatatttcacaagatgcgttattttttccgaacaaatccaccgtccatacatgccttattgccttttgcacattcaagaccgctctagtccctgctctacagctctagtcgattacagaaatttggacaaagcagaaggttcaggtcgtaagatcgcctagtccctgctcttcctggtcagtggccgttaccactgccccctctcctctcctctcgctcgtgcagaggaggagacagactccccccgtcgccgccctcgcgcctcctccgcccgcagctcaagccgagcgtcaccccgtcggctaccttccattctcgccgcacttctcccactgggcacctcgcgccctcgtgacggtataaatagcccctagtcactcctcggcgctcctcaaacccaccaaaccctagcccacttagcggcggcggcgctagaggtggaacgagaccttggcggaggtagcgagggtagcgctgctcgctcgctcgttgggtttccatcccctactgcctagagcgagctctacgcgacgatgagcagccttgtcgagcggctgcgcgtgcggtcggagaggcggccgcggtacgcgctcgacgagtccgacgacgacctcccgctgcgcgttggggccggaaaggggaaggatcaacagaacgacgcgcccgccgagcggatcgagcgcgaggacgcgaaagaagaagcttgccagcgctgtggaaaaagtgataatctagtctcttgttcaacatgtacatacaaatttcacagaaaatgcttggttccttgcttaaacatcacatctgataaatggagctgcccagaatgtgtaagtccattaacagagatggagaggattctagatattgaagtgctggaagcacctcgtgaagattctagttccacagagcctcgatcaaagaagatggagcgatatcttatcaagtggaaaggattatcatacattcactgctcttgggtttcagaaaaagaatattcagaagccgcgaatatacaccctcgtctgaggactaggttgaataacttcagaaggcaaaaggaagccatgaaaatagaagcagaaagatctggtgaggacatcgttgcaattagaccggagtggacaactgttgacaggatccttgctagcagaaaaaacttagttggcgatcgggaatactatgttaaatggaatgaacttacatatgaggaatgtacatgggaaaatgagtctgacatcacggtgttccaacctgagattgaacgcttcaatgagatccagttcaggcgtaagaaatctggtgacaagggcaaggccactcgggagccacgccaattcaaggagagccctacgtttctttctggtggcacactacatccctatcagcttgaagggttaaactttttgcgatattcgtggtttcataacaaacgcgtaatccttggtgatgagatgggtcttgggaaaacgatacaaagtattgcttttcttgcctcactctttgaagacaagtttggtccgcatctggtcgttgctcccctctcaaccctgcggaattgggagcgtgaatttgcaacttgggcacctcaaatgaatgttgtaatgtattttggagctgctgcttctcgtgacattattaggaagtacgagttttactacccaaaagagaaactgaagaagctgaagaaaaagaaatcttctccatctaatgaagataagaagcagtcaaggataagatttgatgtcttattgacgtcttatgagatgatcaacatggactcgtctattctaaaaaatatagaatgggagtgcttggttgtggatgaggggcatcggttgaaaaacaaagattccaagttgtttggtcaacttaaagattataataccaaacatcgtgttctattaacggggaccccagtccagaataatcttgatgagcttttcatgcttatgcacttccttgagggtgaaagttttgggagtataactgatctccaagaagagttcaaggatataaaccaagacaagcaaattgagaagcttcatggaatgctgaagccacatcttcttcgaagattcaagaaggatgttatgaaagaacttcctccaaaaaaggaattgattctacgagttgaattgacaagaaaacagaaggagtactataaggcaattctcaccaagaattatgaagtgttagcccgtcgtaatggtggacatacatctctaataaacgttgtaatggagttgcgcaaactctgttgccatggattcatgattgatgaacctgatcttgaacctgccaatccagaagaaggtttaaggaggcttctagattcatcaggtaagatgcagctgctggacaagatgatggtgaaactgaaagagcagggtcatagagttctaatttattcacagttccagcacatgttggacttgctggaggactatttaagttacaggaaatggacttatgaacgcatcgatggcaagataagtggcgctgataggcagatacggatagatcgcttcaacgctaagaattcaactaggttttgctttcttctttctactagagctggtggtctgggaataaacttggcaactgcagatactgtaatcatctatgacagtgattggaacccacatgcggatttgcaagctatggcaagagctcatcgcttaggacagactagtaaggtgatgatatacaggcttgttagccgaggtacaattgaggagcgaatgatgcagcttacaaaaaagaagattttattggagcacttagttgttggtcgactcaccaaagctaataatgtcaatcaggaggagttggatgatattatacgctatggatcaaaggagctttttgaagacgagaatgatgaatctcgccaaattcattatgacgaagctgcaattgagaggttgttagaccgtgatcaagttgacggtgatgaatctgtggaagatgaagaagaagatggattcttaaaaggattcaaggttgcaaactttgaatatatcgatgaggcaaaggctcaggcagaaaaagaggaggcacggagaaaggctgcagctgaggctgaaaattctgaaagaaactactgggatgaactattgaaggatagatatgatgtacagaaagttgaagaacatactgctatgggaaaagggaaaagaagccgcaaacagatggctgccgctgatgaagatgacattcatgatttaagttccgaagatgaggattactcattggaggatgacatttcagataatgacacaagtttgcaaggaaatatttctgggaagaggggccaatattctaagagaaaatcacgtaatgttgattctattccattgatggagggcgaaggacgtaccttgagagttcttggattcaaccatgctcaacgagcaatgttcctacagacactcaatagattcggttttcagaattatgactggaaagagtatcttcctcgtcttaaaggaaaaagtgtcgaggaaatccagagatatgctgaacttgtcatggcacatcttgttgaagaaattaatgattctgactatttttcagatggcgttccaaaggaaatgatgcgtgttgatgatgtactagtcaggatagcaaacatatcccttattgaggagaagatggctgccacaggaccaggaaaaattacaaacatttttcctaattacttgctctatgagttccaaggcttatctggtggaagaatatggaaagcggagcatgatctactgttactgagaggcatactgaagcatggatatgcaaggtggcagtatatatcagatgacagagagaatgggctttttgaggctgcacgacgagagcttcatctcccttcggttaatgaaataattggtgctcagttgaacgaggcaaatgggaatttggaaggtgcacaggaaggccaagcgaacacaacaagcatgtcgcattacaaggagatccagagaaagatagttgagttcttgagaaagagatatcatcttatggagagagccttgaatatggaatatgctgtgataaagaaaaaaattcctgttcctgatgatattactgaacaaggtgttccagcaggacatgctccttttattccagatatcagtgaactgttgcgggaattgcccaatcttgagccaatttctaccaatgaattggtttctgagggcacagctggtcagttacaagttccccatctctacaataagatgtgtggagtgcttgaagagagtggtgcttatgcgctcagttccttctttggagacaagtccgcatcttctagtttggccaatagccttcgacagtttgaaactgtgtgcgagaatgtcgtcgaggccttgcgaccacaccaaaatggtactggcagtgccatcaaagaggaattggtagatgcagccaccaaagcagcagcagcagcagctcctcaacaagattcaggccatgatgcaccgcatgggcagtcttcgacagccaaggcggacatggaaatcgatggttgatttgtaggttccagagtggtaagaaagggaatccccctctaatcattatgtatactgtggtcagaatgtgcgctatatattgtaacatcaaagaaagcacctccaggcctgagggtgttactgctaatgcgtttggtttacttgttgtccttgtaatatgcatacacatttagaactcatgcagccattttgtgtgctcgaaccggtggatcgctgccctgttgtcttgtactgtgtttagggcctgtttggatacgaatggttaattataagacggggctaaagataagtacggataagtacggattagctatagttggctagcttgttggttaacaattagctaaactttggctagctagatggtaaacaattagttaaaagtttagcaaaagaattagttcacc

SEQ ID NO: 79281 - DNA, 3472 bp, Zea Mays
attttttccgaacaaatccaccgtccatacatgccttattgccttttgcacattcaagaccgctctagtccctgctctacagctctagtcgattacagaaatttggacaaagcagaaggttcaggtcgtaagatcgcctagtccctgctcttcctggtcagtggccgttaccactgccccctctcctctcctctcgctcgtgcagaggaggagacagactccccccgtcgccgccctcgcgcctcctccgcccgcagctcaagccgagcgtcaccccgtcggctaccttccattctcgccgcacttctcccactgggcacctcgcgccctcgtgacggtataaatagcccctagtcactcctcggcgctcctcaaacccaccaaaccctagcccacttagcggcggcggcgctagaggtggaacgagaccttggcggaggtagcgagggtagcgctgctcgctcgctcgttgggtttccatcccctactgcctagagcgagctctacgcgacgatgagcagccttgtcgagcggctgcgcgtgcggtcggagaggcggccgcggtacgcgctcgacgagtccgacgacgacctcccgctgcgcgttggggccggaaaggggaaggatcaacagaacgacgcgcccgccgagcggatcgagcgcgaggacgcgaaagaagaagcttgccagcgctgtggaaaaagtgataatctagtctcttgttcaacatgtacatacaaatttcacagaaaatgcttggttccttgcttaaacatcacatctgataaatggagctgcccagaatgtgtaagtccattaacagagatggagaggattctagatattgaagtgctggaagcacctcgtgaagattctagttccacagagcctcgatcaaagaagatggagcgatatcttatcaagtggaaaggattatcatacattcactgctcttgggtttcagaaaaagaatattcagaagccgcgaatatacaccctcgtctgaggactaggttgaataacttcagaaggcaaaaggaagccatgaaaatagaagcagaaagatctggtgaggacatcgttgcaattagaccggagtggacaactgttgacaggatccttgctagcagaaaaaacttagttggcgatcgggaatactatgttaaatggaatgaacttacatatgaggaatgtacatgggaaaatgagtctgacatcacggtgttccaacctgagattgaacgcttcaatgagatccagttcaggcgtaagaaatctggtgacaagggcaaggccactcgggagccacgccaattcaaggagagccctacgtttctttctggtggcacactacatccctatcagcttgaagggttaaactttttgcgatattcgtggtttcataacaaacgcgtaatccttggtgatgagatgggtcttgggaaaacgatacaaagtattgcttttcttgcctcactctttgaagacaagtttggtccgcatctggtcgttgctcccctctcaaccctgcggaattgggagcgtgaatttgcaacttgggcacctcaaatgaatgttgtaatgtattttggagctgctgcttctcgtgacattattaggaagtacgagttttactacccaaaagagaaactgaagaagctgaagaaaaagaaatcttctccatctaatgaagataagaagcagtcaaggataagatttgatgtcttattgacgtcttatgagatgatcaacatggactcgtctattctaaaaaatatagaatgggagtgcttggttgtggatgaggggcatcggttgaaaaacaaagattccaagttgtttggtcaacttaaagattataataccaaacatcgtgttctattaacggggaccccagtccagaataatcttgatgagcttttcatgcttatgcacttccttgagggtgaaagttttgggagtataactgatctccaagaagagttcaaggatataaaccaagacaagcaaattgagaagcttcatggaatgctgaagccacatcttcttcgaagattcaagaaggatgttatgaaagaacttcctccaaaaaaggaattgattctacgagttgaattgacaagaaaacagaaggagtactataaggcaattctcaccaagaattatgaagtgttagcccgtcgtaatggtggacatacatctctaataaacgttgtaatggagttgcgcaaactctgttgccatggattcatgattgatgaacctgatcttgaacctgccaatccagaagaaggtttaaggaggcttctagattcatcaggtaagatgcagctgctggacaagatgatggtgaaactgaaagagcagggtcatagagttctaatttattcacagttccagcacatgttggacttgctggaggactatttaagttacaggaaatggacttatgaacgcatcgatggcaagataagtggcgctgataggcagatacggatagatcgcttcaacgctaagaattcaactaggttttgctttcttctttctactagagctggtggtctgggaataaacttggcaactgcagatactgtaatcatctatgacagtgattggaacccacatgcggatttgcaagctatggcaagagctcatcgcttaggacagactagtaaggtgatgatatacaggcttgttagccgaggtacaattgaggagcgaatgatgcagcttacaaaaaagaagattttattggagcacttagttgttggtcgactcaccaaagctaataatgtcaatcaggaggagttggatgatattatacgctatggatcaaaggagctttttgaagacgagaatgatgaatctcgccaaattcattatgacgaagctgcaattgagaggttgttagaccgtgatcaagttgacggtgatgaatctgtggaagatgaagaagaagatggattcttaaaaggattcaaggttgcaaactttgaatatatcgatgaggcaaaggctcaggcagaaaaagaggaggcacggagaaaggctgcagctgaggctgaaaattctgaaagaaactactgggatgaactattgaaggatagatatgatgtacagaaagttgaagaacatactgctatgggaaaagggaaaagaagccgcaaacagatggctgccgctgatgaagatgacattcatgatttaagttccgaagatgaggattactcattggaggatgacatttcagataatgacacaagtttgcaaggaaatatttctgggaagaggggccaatattctaagagaaaatcacgtaatgttgattctattccattgatggagggcgaaggacgtaccttgagagttcttggattcaaccatgctcaacgagcaatgttcctacagacactcaatagcataaaatatttgcactgaggtcattggctattccctagttgtactatcagac

SEQ ID NO: 79282 - DNA, 4213 bp, Zea Mays
attttttccgaacaaatccaccgtccatacatgccttattgccttttgcacattcaagaccgctctagtccctgctctacagctctagtcgattacagaaatttggacaaagcagaaggttcaggtcgtaagatcgcctagtccctgctcttcctggtcagtggccgttaccactgccccctctcctctcctctcgctcgtgcagaggaggagacagactccccccgtcgccgccctcgcgcctcctccgcccgcagctcaagccgagcgtcaccccgtcggctaccttccattctcgccgcacttctcccactgggcacctcgcgccctcgtgacggtataaatagcccctagtcactcctcggcgctcctcaaacccaccaaaccctagcccacttagcggcggcggcgctagaggtggaacgagaccttggcggaggtagcgagggtagcgctgctcgctcgctcgttgggtttccatcccctactgcctagagcgagctctacgcgacgatgagcagccttgtcgagcggctgcgcgtgcggtcggagaggcggccgcggtacgcgctcgacgagtccgacgacgacctcccgctgcgcgttggggccggaaaggggaaggatcaacagaacgacgcgcccgccgagcggatcgagcgcgaggacgcgaaagaagaagcttgccagcgctgtggaaaaagtgataatctagtctcttgttcaacatgtacatacaaatttcacagaaaatgcttggttccttgcttaaacatcacatctgataaatggagctgcccagaatgtgtaagtccattaacagagatggagaggattctagatattgaagtgctggaagcacctcgtgaagattctagttccacagagcctcgatcaaagaagatggagcgatatcttatcaagtggaaaggattatcatacattcactgctcttgggtttcagaaaaagaatattcagaagccgcgaatatacaccctcgtctgaggactaggttgaataacttcagaaggcaaaaggaagccatgaaaatagaagcagaaagatctggtgaggacatcgttgcaattagaccggagtggacaactgttgacaggatccttgctagcagaaaaaacttagttggcgatcgggaatactatgttaaatggaatgaacttacatatgaggaatgtacatgggaaaatgagtctgacatcacggtgttccaacctgagattgaacgcttcaatgagatccagttcaggcgtaagaaatctggtgacaagggcaaggccactcgggagccacgccaattcaaggagagccctacgtttctttctggtggcacactacatccctatcagcttgaagggttaaactttttgcgatattcgtggtttcataacaaacgcgtaatccttggtgatgagatgggtcttgggaaaacgatacaaagtattgcttttcttgcctcactctttgaagacaagtttggtccgcatctggtcgttgctcccctctcaaccctgcggaattgggagcgtgaatttgcaacttgggcacctcaaatgaatgttgtaatgtattttggagctgctgcttctcgtgacattattaggaagtacgagttttactacccaaaagagaaactgaagaagctgaagaaaaagaaatcttctccatctaatgaagataagaagcagtcaaggataagatttgatgtcttattgacgtcttatgagatgatcaacatggactcgtctattctaaaaaatatagaatgggagtgcttggttgtggatgaggggcatcggttgaaaaacaaagattccaagttgtttggtcaacttaaagattataataccaaacatcgtgttctattaacggggaccccagtccagaataatcttgatgagcttttcatgcttatgcacttccttgagggtgaaagttttgggagtataactgatctccaagaagagttcaaggatataaaccaagacaagcaaattgagaagcttcatggaatgctgaagccacatcttcttcgaagattcaagaaggatgttatgaaagaacttcctccaaaaaaggaattgattctacgagttgaattgacaagaaaacagaaggagtactataaggcaattctcaccaagaattatgaagtgttagcccgtcgtaatggtggacatacatctctaataaacgttgtaatggagttgcgcaaactctgttgccatggattcatgattgatgaacctgatcttgaacctgccaatccagaagaaggtttaaggaggcttctagattcatcaggtaagatgcagctgctggacaagatgatggtgaaactgaaagagcagggtcatagagttctaatttattcacagttccagcacatgttggacttgctggaggactatttaagttacaggaaatggacttatgaacgcatcgatggcaagataagtggcgctgataggcagatacggatagatcgcttcaacgctaagaattcaactaggttttgctttcttctttctactagagctggtggtctgggaataaacttggcaactgcagatactgtaatcatctatgacagtgattggaacccacatgcggatttgcaagctatggcaagagctcatcgcttaggacagactagtaaggtgatgatatacaggcttgttagccgaggtacaattgaggagcgaatgatgcagcttacaaaaaagaagattttattggagcacttagttgttggtcgactcaccaaagctaataatgtcaatcaggaggagttggatgatattatacgctatggatcaaaggagctttttgaagacgagaatgatgaatctcgccaaattcattatgacgaagctgcaattgagaggttgttagaccgtgatcaagttgacggtgatgaatctgtggaagatgaagaagaagatggattcttaaaaggattcaaggttgcaaactttgaatatatcgatgaggcaaaggctcaggcagaaaaagaggaggcacggagaaaggctgcagctgaggctgaaaattctgaaagaaactactgggatgaactattgaaggatagatatgatgtacagaaagttgaagaacatactgctatgggaaaagggaaaagaagccgcaaacagatggctgccgctgatgaagatgacattcatgatttaagttccgaagatgaggattactcattggaggatgacatttcagataatgacacaagtttgcaaggaaatatttctgggaagaggggccaatattctaagagaaaatcacgtaatgttgattctattccattgatggagggcgaaggacgtaccttgagagttcttggattcaaccatgctcaacgagcaatgttcctacagacactcaatagattcggttttcagaattatgactggaaagagtatcttcctcgtcttaaaggaaaaagtgtcgaggaaatccagagatatgctgaacttgtcatggcacatcttgttgaagaaattaatgattctgactatttttcagatggcgttccaaaggaaatgatgcgtgttgatgatgtactagtcaggatagcaaacatatcccttattgaggagaagatggctgccacaggaccaggaaaaattacaaacatttttcctaattacttgctctatgagttccaaggcttatctggtggaagaatatggaaagcggagcatgatctactgttactgagaggcatactgaagcatggatatgcaaggtggcagtatatatcagatgacagagagaatgggctttttgaggctgcacgacgagagcttcatctcccttcggttaatgaaataattggggaatttggaaggtgcacaggaaggccaagcgaacacaacaagcatgtcgcattacaaggagatccagagaaagatagttgagttcttgagaaagagatatcatcttatggagagagccttgaatatggaatatgctgtgataaagaaaaaaattcctgttcctgatgatattactgaacaaggtgttccagcaggacatgctccttttattccagatatcagtgaactgttgcgggaattgcccaatcttgagccaatttctaccaatgaattggtttctgagggcacagctggtcagttacaagttccccatctctacaataagactgtgtacgtatgctct

SEQ ID NO: 79283 - DNA, 2479 bp, Zea Mays
attttttccgaacaaatccaccgtccatacatgccttattgccttttgcacattcaagaccgctctagtccctgctctacagctctagtcgattacagaaatttggacaaagcagaaggttcaggtcgtaagatcgcctagtccctgctcttcctggtcagtggccgttaccactgccccctctcctctcctctcgctcgtgcagaggaggagacagactccccccgtcgccgccctcgcgcctcctccgcccgcagctcaagccgagcgtcaccccgtcggctaccttccattctcgccgcacttctcccactgggcacctcgcgccctcgtgacggtataaatagcccctagtcactcctcggcgctcctcaaacccaccaaaccctagcccacttagcggcggcggcgctagaggtggaacgagaccttggcggaggtagcgagggtagcgctgctcgctcgctcgttgggtttccatcccctactgcctagagcgagctctacgcgacgatgagcagccttgtcgagcggctgcgcgtgcggtcggagaggcggccgcggtacgcgctcgacgagtccgacgacgacctcccgctgcgcgttggggccggaaaggggaaggatcaacagaacgacgcgcccgccgagcggatcgagcgcgaggacgcgaaagaagaagcttgccagcgctgtggaaaaagtgataatctagtctcttgttcaacatgtacatacaaatttcacagaaaatgcttggttccttgcttaaacatcacatctgataaatggagctgcccagaatgtgtaagtccattaacagagatggagaggattctagatattgaagtgctggaagcacctcgtgaagattctagttccacagagcctcgatcaaagaagatggagcgatatcttatcaagtggaaaggattatcatacattcactgctcttgggtttcagaaaaagaatattcagaagccgcgaatatacaccctcgtctgaggactaggttgaataacttcagaaggcaaaaggaagccatgaaaatagaagcagaaagatctggtgaggacatcgttgcaattagaccggagtggacaactgttgacaggatccttgctagcagaaaaaacttagttggcgatcgggaatactatgttaaatggaatgaacttacatatgaggaatgtacatgggaaaatgagtctgacatcacggtgttccaacctgagattgaacgcttcaatgagatccagttcaggcgtaagaaatctggtgacaagggcaaggccactcgggagccacgccaattcaaggagagccctacgtttctttctggtggcagtatatatcagatgacagagagaatgggctttttgaggctgcacgacgagagcttcatctcccttcggttaatgaaataattggtgctcagttgaacgaggcaaatgggaatttggaaggtgcacaggaaggccaagcgaacacaacaagcatgtcgcattacaaggagatccagagaaagatagttgagttcttgagaaagagatatcatcttatggagagagccttgaatatggaatatgctgtgataaagaaaaaaattcctgttcctgatgatattactgaacaaggtgttccagcaggacatgctccttttattccagatatcagtgaactgttgcgggaattgcccaatcttgagccaatttctaccaatgaattggtttctgagggcacagctggtcagttacaagttccccatctctacaataagatgtgtggagtgcttgaagagagtggtgcttatgcgctcagttccttctttggagacaagtccgcatcttctagtttggccaatagccttcgacagtttgaaactgtgtgcgagaatgtcgtcgaggccttgcgaccacaccaaaatggtactggcagtgccatcaaagaggaattggtagatgcagccaccaaagcagcagcagcagcagctcctcaacaagattcaggccatgatgcaccgcatgggcagtcttcgacagccaaggcggacatggaaatcgatggttgatttgtaggttccagagtggtaagaaagggaatccccctctaatcattatgtatactgtggtcagaatgtgcgctatatattgtaacatcaaagaaagcacctccaggcctgagggtgttactgctaatgcgtttggtttacttgttgtccttgtaatatgcatacacatttagaactcatgcagccattttgtgtgctcgaaccggtggatcgctgccctgttgtcttgtactgtgtttagggcctgtttggatacgaatggttaattataagacggggctaaagataagtacggataagtacggattagctatagttggctagcttgttggttaacaattagctaaactttggctagctagatggtaaacaattagttaaaagtttagcaaaagaattagttcacc

SEQ ID NO: 79284 - DNA, 4339 bp, Zea Mays
attttttccgaacaaatccaccgtccatacatgccttattgccttttgcacattcaagaccgctctagtccctgctctacagctctagtcgattacagaaatttggacaaagcagaaggttcaggtcgtaagatcgcctagtccctgctcttcctggtcagtggccgttaccactgccccctctcctctcctctcgctcgtgcagaggaggagacagactccccccgtcgccgccctcgcgcctcctccgcccgcagctcaagccgagcgtcaccccgtcggctaccttccattctcgccgcacttctcccactgggcacctcgcgccctcgtgacggtataaatagcccctagtcactcctcggcgctcctcaaacccaccaaaccctagcccacttagcggcggcggcgctagaggtggaacgagaccttggcggaggtagcgagggtagcgctgctcgctcgctcgttgggtttccatcccctactgcctagagcgagctctacgcgacgatgagcagccttgtcgagcggctgcgcgtgcggtcggagaggcggccgcggtacgcgctcgacgagtccgacgacgacctcccgctgcgcgttggggccggaaaggggaaggatcaacagaacgacgcgcccgccgagcggatcgagcgcgaggacgcgaaagaagaagcttgccagcgctgtggaaaaagtgataatctagtctcttgttcaacatgtacatacaaatttcacagaaaatgcttggttccttgcttaaacatcacatctgataaatggagctgcccagaatgtgtaagtccattaacagagatggagaggattctagatattgaagtgctggaagcacctcgtgaagattctagttccacagagcctcgatcaaagaagatggagcgatatcttatcaagtggaaaggattatcatacattcactgctcttgggtttcagaaaaagaatattcagaagccgcgaatatacaccctcgtctgaggactaggttgaataacttcagaaggcaaaaggaagccatgaaaatagaagcagaaagatctggtgaggacatcgttgcaattagaccggagtggacaactgttgacaggatccttgctagcagaaaaaacttagttggcgatcgggaatactatgttaaatggaatgaacttacatatgaggaatgtacatgggaaaatgagtctgacatcacggtgttccaacctgagattgaacgcttcaatgagatccagttcaggcgtaagaaatctggtgacaagggcaaggccactcgggagccacgccaattcaaggagagccctacgtttctttctggtggcacactacatccctatcagcttgaagggttaaactttttgcgatattcgtggtttcataacaaacgcgtaatccttggtgatgagatgggtcttgggaaaacgatacaaagtattgcttttcttgcctcactctttgaagacaagtttggtccgcatctggtcgttgctcccctctcaaccctgcggaattgggagcgtgaatttgcaacttgggcacctcaaatgaatgttgtaatgtattttggagctgctgcttctcgtgacattattaggaagtacgagttttactacccaaaagagaaactgaagaagctgaagaaaaagaaatcttctccatctaatgaagataagaagcagtcaaggataagatttgatgtcttattgacgtcttatgagatgatcaacatggactcgtctattctaaaaaatatagaatgggagtgcttggttgtggatgaggggcatcggttgaaaaacaaagattccaagttgtttggtcaacttaaagattataataccaaacatcgtgttctattaacggggaccccagtccagaataatcttgatgagcttttcatgcttatgcacttccttgagggtgaaagttttgctttcttctttctactagagctggtggtctgggaataaacttggcaactgcagatactgtaatcatctatgacagtgattggaacccacatgcggatttgcaagctatggcaagagctcatcgcttaggacagactagtaaggtgatgatatacaggcttgttagccgaggtacaattgaggagcgaatgatgcagcttacaaaaaagaagattttattggagcacttagttgttggtcgactcaccaaagctaataatgtcaatcaggaggagttggatgatattatacgctatggatcaaaggagctttttgaagacgagaatgatgaatctcgccaaattcattatgacgaagctgcaattgagaggttgttagaccgtgatcaagttgacggtgatgaatctgtggaagatgaagaagaagatggattcttaaaaggattcaaggttgcaaactttgaatatatcgatgaggcaaaggctcaggcagaaaaagaggaggcacggagaaaggctgcagctgaggctgaaaattctgaaagaaactactgggatgaactattgaaggatagatatgatgtacagaaagttgaagaacatactgctatgggaaaagggaaaagaagccgcaaacagatggctgccgctgatgaagatgacattcatgatttaagttccgaagatgaggattactcattggaggatgacatttcagataatgacacaagtttgcaaggaaatatttctgggaagaggggccaatattctaagagaaaatcacgtaatgttgattctattccattgatggagggcgaaggacgtaccttgagagttcttggattcaaccatgctcaacgagcaatgttcctacagacactcaatagattcggttttcagaattatgactggaaagagtatcttcctcgtcttaaaggaaaaagtgtcgaggaaatccagagatatgctgaacttgtcatggcacatcttgttgaagaaattaatgattctgactatttttcagatggcgttccaaaggaaatgatgcgtgttgatgatgtactagtcaggatagcaaacatatcccttattgaggagaagatggctgccacaggaccaggaaaaattacaaacatttttcctaattacttgctctatgagttccaaggcttatctggtggaagaatatggaaagcggagcatgatctactgttactgagaggcatactgaagcatggatatgcaaggtggcagtatatatcagatgacagagagaatgggctttttgaggctgcacgacgagagcttcatctcccttcggttaatgaaataattggtgctcagttgaacgaggcaaatgggaatttggaaggtgcacaggaaggccaagcgaacacaacaagcatgtcgcattacaaggagatccagagaaagatagttgagttcttgagaaagagatatcatcttatggagagagccttgaatatggaatatgctgtgataaagaaaaaaattcctgttcctgatgatattactgaacaaggtgttccagcaggacatgctccttttattccagatatcagtgaactgttgcgggaattgcccaatcttgagccaatttctaccaatgaattggtttctgagggcacagctggtcagttacaagttccccatctctacaataagatgtgtggagtgcttgaagagagtggtgcttatgcgctcagttccttctttggagacaagtccgcatcttctagtttggccaatagccttcgacagtttgaaactgtgtgcgagaatgtcgtcgaggccttgcgaccacaccaaaatggtactggcagtgccatcaaagaggaattggtagatgcagccaccaaagcagcagcagcagcagctcctcaacaagattcaggccatgatgcaccgcatgggcagtcttcgacagccaaggcggacatggaaatcgatggttgatttgtaggttccagagtggtaagaaagggaatccccctctaatcattatgtatactgtggtcagaatgtgcgctatatattgtaacatcaaagaaagcacctccaggcctgagggtgttactgctaatgcgtttggtttacttgttgtccttgtaatatgcatacacatttagaactcatgcagccattttgtgtgctcgaaccggtggatcgctgccctgttgtcttgtactgtgtttagggcctgtttggatacgaatggttaattataagacggggctaaagataagtacggataagtacggattagctatagttggctagcttgttggttaacaattagctaaactttggctagctagatggtaaacaattagttaaaagtttagcaaaagaattagttcacc

SEQ ID NO: 79285 - DNA, 4910 bp, Zea Mays
attttttccgaacaaatccaccgtccatacatgccttattgccttttgcacattcaagaccgctctagtccctgctctacagctctagtcgattacagaaatttggacaaagcagaaggttcaggtcgtaagatcgcctagtccctgctcttcctggtcagtggccgttaccactgccccctctcctctcctctcgctcgtgcagaggaggagacagactccccccgtcgccgccctcgcgcctcctccgcccgcagctcaagccgagcgtcaccccgtcggctaccttccattctcgccgcacttctcccactgggcacctcgcgccctcgtgacggtataaatagcccctagtcactcctcggcgctcctcaaacccaccaaaccctagcccacttagcggcggcggcgctagaggtggaacgagaccttggcggaggtagcgagggtagcgctgctcgctcgctcgttgggtttccatcccctactgcctagagcgagctctacgcgacgatgagcagccttgtcgagcggctgcgcgtgcggtcggagaggcggccgcggtacgcgctcgacgagtccgacgacgacctcccgctgcgcgttggggccggaaaggggaaggatcaacagaacgacgcgcccgccgagcggatcgagcgcgaggacgcgaaagaagaagcttgccagcgctgtggaaaaagtgataatctagtctcttgttcaacatgtacatacaaatttcacagaaaatgcttggttccttgcttaaacatcacatctgataaatggagctgcccagaatgtgtaagtccattaacagagatggagaggattctagatattgaagtgctggaagcacctcgtgaagattctagttccacagagcctcgatcaaagaagatggagcgatatcttatcaagtggaaaggattatcatacattcactgctcttgggtttcagaaaaagaatattcagaagccgcgaatatacaccctcgtctgaggactaggttgaataacttcagaaggcaaaaggaagccatgaaaatagaagcagaaagatctggtgaggacatcgttgcaattagaccggagtggacaactgttgacaggatccttgctagcagaaaaaacttagttggcgatcgggaatactatgttaaatggaatgaacttacatatgaggaatgtacatgggaaaatgagtctgacatcacggtgttccaacctgagattgaacgcttcaatgagatccagttcaggcgtaagaaatctggtgacaagggcaaggccactcgggagccacgccaattcaaggagagccctacgtttctttctggtggcacactacatccctatcagcttgaagggttaaactttttgcgatattcgtggtttcataacaaacgcgtaatccttggtgatgagatgggtcttgggaaaacgatacaaagtattgcttttcttgcctcactctttgaagacaagtttggtccgcatctggtcgttgctcccctctcaaccctgcggaattgggagcgtgaatttgcaacttgggcacctcaaatgaatgttgtaatgtattttggagctgctgcttctcgtgacattattaggaagtacgagttttactacccaaaagagaaactgaagaagctgaagaaaaagaaatcttctccatctaatgaagataagaagcagtcaaggataagatttgatgtcttattgacgtcttatgagatgatcaacatggactcgtctattctaaaaaatatagaatgggagtgcttggttgtggatgaggggcatcggttgaaaaacaaagattccaagttgtttggtcaacttaaagattataataccaaacatcgtgttctattaacggggaccccagtccagaataatcttgatgagcttttcatgcttatgcacttccttgagggtgaaagttttgggagtataactgatctccaagaagagttcaaggatataaaccaagacaagcaaattgagaagcttcatggaatgctgaagccacatcttcttcgaagattcaagaaggatgttatgaaagaacttcctccaaaaaaggaattgattctacgagttgaattgacaagaaaacagaaggagtactataaggcaattctcaccaagaattatgaagtgttagcccgtcgtaatggtggacatacatctctaataaacgttgtaatggagttgcgcaaactctgttgccatggattcatgattgatgaacctgatcttgaacctgccaatccagaagaaggtttaaggaggcttctagattcatcaggtaagatgcagctgctggacaagatgatggtgaaactgaaagagcagggtcatagagttctaatttattcacagttccagcacatgttggacttgctggaggactatttaagttacaggaaatggacttatgaacgcatcgatggcaagataagtggcgctgataggcagatacggatagatcgcttcaacgctaagaattcaactaggttttgctttcttctttctactagagctggtggtctgggaataaacttggcaactgcagatactgtaatcatctatgacagtgattggaacccacatgcggatttgcaagctatggcaagagctcatcgcttaggacagactagtaaggtgatgatatacaggcttgttagccgaggtacaattgaggagcgaatgatgcagcttacaaaaaagaagattttattggagcacttagttgttggtcgactcaccaaagctaataatgtcaatcaggaggagttggatgatattatacgctatggatcaaaggagctttttgaagacgagaatgatgaatctcgccaaattcattatgacgaagctgcaattgagaggttgttagaccgtgatcaagttgacggtgatgaatctgtggaagatgaagaagaagatggattcttaaaaggattcaaggttgcaaactttgaatatatcgatgaggcaaaggctcaggcagaaaaagaggaggcacggagaaaggctgcagctgaggctgaaaattctgaaagaaactactgggatgaactattgaaggatagatatgatgtacagaaagttgaagaacatactgctatgggaaaagggaaaagaagccgcaaacagatggctgccgctgatgaagatgacattcatgatttaagttccgaagatgaggattactcattggaggatgacatttcagataatgacacaagtttgcaaggaaatatttctgggaagaggggccaatattctaagagaaaatcacgtaatgttgattctattccattgatggagggcgaaggacgtaccttgagagttcttggattcaaccatgctcaacgagcaatgttcctacagacactcaatagattcggttttcagaattatgactggaaagagtatcttcctcgtcttaaaggaaaaagtgtcgaggaaatccagagatatgctgaacttgtcatggcacatcttgttgaagaaattaatgattctgactatttttcagatggcgttccaaaggaaatgatgcgtgttgatgatgtactagtcaggatagcaaacatatcccttattgaggagaagatggctgccacaggaccaggaaaaattacaaacatttttcctaattacttgctctatgagttccaaggcttatctggtggaagaatatggaaagcggagcatgatctactgttactgagaggcatactgaagcatggatatgcaaggtggcagtatatatcagatgacagagagaatgggctttttgaggctgcacgacgagagcttcatctcccttcggttaatgaaataattggtgctcagttgaacgaggggaatttggaaggtgcacaggaaggccaagcgaacacaacaagcatgtcgcattacaaggagatccagagaaagatagttgagttcttgagaaagagatatcatcttatggagagagccttgaatatggaatatgctgtgataaagaaaaaaattcctgttcctgatgatattactgaacaaggtgttccagcaggacatgctccttttattccagatatcagtgaactgttgcgggaattgcccaatcttgagccaatttctaccaatgaattggtttctgagggcacagctggtcagttacaagttccccatctctacaataagatgtgtggagtgcttgaagagagtggtgcttatgcgctcagttccttctttggagacaagtccgcatcttctagtttggccaatagccttcgacagtttgaaactgtgtgcgagaatgtcgtcgaggccttgcgaccacaccaaaatggtactggcagtgccatcaaagaggaattggtagatgcagccaccaaagcagcagcagcagcagctcctcaacaagattcaggccatgatgcaccgcatgggcagtcttcgacagccaaggcggacatggaaatcgatggttgatttgtaggttccagagtggtaagaaagggaatccccctctaatcattatgtatactgtggtcagaatgtgcgctatatattgtaacatcaaagaaagcacctccaggcctgagggtgttactgctaatgcgtttggtttacttgttgtccttgtaatatgcatacacatttagaactcatgcagccattttgtgtgctcgaaccggtggatcgctgccctgttgtcttgtactgtgtttagggcctgtttggatacgaatggttaattataagacggggctaaagataagtacggataagtacggattagctatagttggctagcttgttggttaacaattagctaaactttggctagctagatggtaaacaattagttaaaagtttagcaaaagaattagttcacc

SEQ ID NO: 79286 - DNA, 4905 bp, Zea Mays
attttttccgaacaaatccaccgtccatacatgccttattgccttttgcacattcaagaccgctctagtccctgctctacagctctagtcgattacagaaatttggacaaagcagaaggttcaggtcgtaagatcgcctagtccctgctcttcctggtcagtggccgttaccactgccccctctcctctcctctcgctcgtgcagaggaggagacagactccccccgtcgccgccctcgcgcctcctccgcccgcagctcaagccgagcgtcaccccgtcggctaccttccattctcgccgcacttctcccactgggcacctcgcgccctcgtgacggtataaatagcccctagtcactcctcggcgctcctcaaacccaccaaaccctagcccacttagcggcggcggcgctagaggtggaacgagaccttggcggaggtagcgagggtagcgctgctcgctcgctcgttgggtttccatcccctactgcctagagcgagctctacgcgacgatgagcagccttgtcgagcggctgcgcgtgcggtcggagaggcggccgcggtacgcgctcgacgagtccgacgacgacctcccgctgcgcgttggggccggaaaggggaaggatcaacagaacgacgcgcccgccgagcggatcgagcgcgaggacgcgaaagaagaagcttgccagcgctgtggaaaaagtgataatctagtctcttgttcaacatgtacatacaaatttcacagaaaatgcttggttccttgcttaaacatcacatctgataaatggagctgcccagaatgtgtaagtccattaacagagatggagaggattctagatattgaagtgctggaagcacctcgtgaagattctagttccacagagcctcgatcaaagaagatggagcgatatcttatcaagtggaaaggattatcatacattcactgctcttgggtttcagaaaaagaatattcagaagccgcgaatatacaccctcgtctgaggactaggttgaataacttcagaaggcaaaaggaagccatgaaaatagaagcagaaagatctggtgaggacatcgttgcaattagaccggagtggacaactgttgacaggatccttgctagcagaaaaaacttagttggcgatcgggaatactatgttaaatggaatgaacttacatatgaggaatgtacatgggaaaatgagtctgacatcacggtgttccaacctgagattgaacgcttcaatgagatccagttcaggcgtaagaaatctggtgacaagggcaaggccactcgggagccacgccaattcaaggagagccctacgtttctttctggtggcacactacatccctatcagcttgaagggttaaactttttgcgatattcgtggtttcataacaaacgcgtaatccttggtgatgagatgggtcttgggaaaacgatacaaagtattgcttttcttgcctcactctttgaagacaagtttggtccgcatctggtcgttgctcccctctcaaccctgcggaattgggagcgtgaatttgcaacttgggcacctcaaatgaatgttgtaatgtattttggagctgctgcttctcgtgacattattaggaagtacgagttttactacccaaaagagaaactgaagaagctgaagaaaaagaaatcttctccatctaatgaagataagaagcagtcaaggataagatttgatgtcttattgacgtcttatgagatgatcaacatggactcgtctattctaaaaaatatagaatgggagtgcttggttgtggatgaggggcatcggttgaaaaacaaagattccaagttgtttggtcaacttaaagattataataccaaacatcgtgttctattaacggggaccccagtccagaataatcttgatgagcttttcatgcttatgcacttccttgagggtgaaagttttgggagtataactgatctccaagaagagttcaaggatataaaccaagacaagcaaattgagaagcttcatggaatgctgaagccacatcttcttcgaagattcaagaaggatgttatgaaagaacttcctccaaaaaaggaattgattctacgagttgaattgacaagaaaacagaaggagtactataaggcaattctcaccaagaattatgaagtgttagcccgtcgtaatggtggacatacatctctaataaacgttgtaatggagttgcgcaaactctgttgccatggattcatgattgatgaacctgatcttgaacctgccaatccagaagaaggtttaaggaggcttctagattcatcaggtaagatgcagctgctggacaagatgatggtgaaactgaaagagcagggtcatagagttctaatttattcacagttccagcacatgttggacttgctggaggactatttaagttacaggaaatggacttatgaacgcatcgatggcaagataagtggcgctgataggcagatacggatagatcgcttcaacgctaagaattcaactaggttttgctttcttctttctactagagctggtggtctgggaataaacttggcaactgcagatactgtaatcatctatgacagtgattggaacccacatgcggatttgcaagctatggcaagagctcatcgcttaggacagactagtgatgatatacaggcttgttagccgaggtacaattgaggagcgaatgatgcagcttacaaaaaagaagattttattggagcacttagttgttggtcgactcaccaaagctaataatgtcaatcaggaggagttggatgatattatacgctatggatcaaaggagctttttgaagacgagaatgatgaatctcgccaaattcattatgacgaagctgcaattgagaggttgttagaccgtgatcaagttgacggtgatgaatctgtggaagatgaagaagaagatggattcttaaaaggattcaaggttgcaaactttgaatatatcgatgaggcaaaggctcaggcagaaaaagaggaggcacggagaaaggctgcagctgaggctgaaaattctgaaagaaactactgggatgaactattgaaggatagatatgatgtacagaaagttgaagaacatactgctatgggaaaagggaaaagaagccgcaaacagatggctgccgctgatgaagatgacattcatgatttaagttccgaagatgaggattactcattggaggatgacatttcagataatgacacaagtttgcaaggaaatatttctgggaagaggggccaatattctaagagaaaatcacgtaatgttgattctattccattgatggagggcgaaggacgtaccttgagagttcttggattcaaccatgctcaacgagcaatgttcctacagacactcaatagattcggttttcagaattatgactggaaagagtatcttcctcgtcttaaaggaaaaagtgtcgaggaaatccagagatatgctgaacttgtcatggcacatcttgttgaagaaattaatgattctgactatttttcagatggcgttccaaaggaaatgatgcgtgttgatgatgtactagtcaggatagcaaacatatcccttattgaggagaagatggctgccacaggaccaggaaaaattacaaacatttttcctaattacttgctctatgagttccaaggcttatctggtggaagaatatggaaagcggagcatgatctactgttactgagaggcatactgaagcatggatatgcaaggtggcagtatatatcagatgacagagagaatgggctttttgaggctgcacgacgagagcttcatctcccttcggttaatgaaataattggtgctcagttgaacgaggggaatttggaaggtgcacaggaaggccaagcgaacacaacaagcatgtcgcattacaaggagatccagagaaagatagttgagttcttgagaaagagatatcatcttatggagagagccttgaatatggaatatgctgtgataaagaaaaaaattcctgttcctgatgatattactgaacaaggtgttccagcaggacatgctccttttattccagatatcagtgaactgttgcgggaattgcccaatcttgagccaatttctaccaatgaattggtttctgagggcacagctggtcagttacaagttccccatctctacaataagatgtgtggagtgcttgaagagagtggtgcttatgcgctcagttccttctttggagacaagtccgcatcttctagtttggccaatagccttcgacagtttgaaactgtgtgcgagaatgtcgtcgaggccttgcgaccacaccaaaatggtactggcagtgccatcaaagaggaattggtagatgcagccaccaaagcagcagcagcagcagctcctcaacaagattcaggccatgatgcaccgcatgggcagtcttcgacagccaaggcggacatggaaatcgatggttgatttgtaggttccagagtggtaagaaagggaatccccctctaatcattatgtatactgtggtcagaatgtgcgctatatattgtaacatcaaagaaagcacctccaggcctgagggtgttactgctaatgcgtttggtttacttgttgtccttgtaatatgcatacacatttagaactcatgcagccattttgtgtgctcgaaccggtggatcgctgccctgttgtcttgtactgtgtttagggcctgtttggatacgaatggttaattataagacggggctaaagataagtacggataagtacggattagctatagttggctagcttgttggttaacaattagctaaactttggctagctagatggtaaacaattagttaaaagtttagcaaaagaattagttcacc

SEQ ID NO: 79287 - DNA, 4911 bp, Zea Mays
attttttccgaacaaatccaccgtccatacatgccttattgccttttgcacattcaagaccgctctagtccctgctctacagctctagtcgattacagaaatttggacaaagcagaaggttcaggtcgtaagatcgcctagtccctgctcttcctggtcagtggccgttaccactgccccctctcctctcctctcgctcgtgcagaggaggagacagactccccccgtcgccgccctcgcgcctcctccgcccgcagctcaagccgagcgtcaccccgtcggctaccttccattctcgccgcacttctcccactgggcacctcgcgccctcgtgacggtataaatagcccctagtcactcctcggcgctcctcaaacccaccaaaccctagcccacttagcggcggcggcgctagaggtggaacgagaccttggcggaggtagcgagggtagcgctgctcgctcgctcgttgggtttccatcccctactgcctagagcgagctctacgcgacgatgagcagccttgtcgagcggctgcgcgtgcggtcggagaggcggccgcggtacgcgctcgacgagtccgacgacgacctcccgctgcgcgttggggccggaaaggggaaggatcaacagaacgacgcgcccgccgagcggatcgagcgcgaggacgcgaaagaagaagcttgccagcgctgtggaaaaagtgataatctagtctcttgttcaacatgtacatacaaatttcacagaaaatgcttggttccttgcttaaacatcacatctgataaatggagctgcccagaatgttccattaacagagatggagaggattctagatattgaagtgctggaagcacctcgtgaagattctagttccacagagcctcgatcaaagaagatggagcgatatcttatcaagtggaaaggattatcatacattcactgctcttgggtttcagaaaaagaatattcagaagccgcgaatatacaccctcgtctgaggactaggttgaataacttcagaaggcaaaaggaagccatgaaaatagaagcagaaagatctggtgaggacatcgttgcaattagaccggagtggacaactgttgacaggatccttgctagcagaaaaaacttagttggcgatcgggaatactatgttaaatggaatgaacttacatatgaggaatgtacatgggaaaatgagtctgacatcacggtgttccaacctgagattgaacgcttcaatgagatccagttcaggcgtaagaaatctggtgacaagggcaaggccactcgggagccacgccaattcaaggagagccctacgtttctttctggtggcacactacatccctatcagcttgaagggttaaactttttgcgatattcgtggtttcataacaaacgcgtaatccttggtgatgagatgggtcttgggaaaacgatacaaagtattgcttttcttgcctcactctttgaagacaagtttggtccgcatctggtcgttgctcccctctcaaccctgcggaattgggagcgtgaatttgcaacttgggcacctcaaatgaatgttgtaatgtattttggagctgctgcttctcgtgacattattaggaagtacgagttttactacccaaaagagaaactgaagaagctgaagaaaaagaaatcttctccatctaatgaagataagaagcagtcaaggataagatttgatgtcttattgacgtcttatgagatgatcaacatggactcgtctattctaaaaaatatagaatgggagtgcttggttgtggatgaggggcatcggttgaaaaacaaagattccaagttgtttggtcaacttaaagattataataccaaacatcgtgttctattaacggggaccccagtccagaataatcttgatgagcttttcatgcttatgcacttccttgagggtgaaagttttgggagtataactgatctccaagaagagttcaaggatataaaccaagacaagcaaattgagaagcttcatggaatgctgaagccacatcttcttcgaagattcaagaaggatgttatgaaagaacttcctccaaaaaaggaattgattctacgagttgaattgacaagaaaacagaaggagtactataaggcaattctcaccaagaattatgaagtgttagcccgtcgtaatggtggacatacatctctaataaacgttgtaatggagttgcgcaaactctgttgccatggattcatgattgatgaacctgatcttgaacctgccaatccagaagaaggtttaaggaggcttctagattcatcaggtaagatgcagctgctggacaagatgatggtgaaactgaaagagcagggtcatagagttctaatttattcacagttccagcacatgttggacttgctggaggactatttaagttacaggaaatggacttatgaacgcatcgatggcaagataagtggcgctgataggcagatacggatagatcgcttcaacgctaagaattcaactaggttttgctttcttctttctactagagctggtggtctgggaataaacttggcaactgcagatactgtaatcatctatgacagtgattggaacccacatgcggatttgcaagctatggcaagagctcatcgcttaggacagactagtaaggtgatgatatacaggcttgttagccgaggtacaattgaggagcgaatgatgcagcttacaaaaaagaagattttattggagcacttagttgttggtcgactcaccaaagctaataatgtcaatcaggaggagttggatgatattatacgctatggatcaaaggagctttttgaagacgagaatgatgaatctcgccaaattcattatgacgaagctgcaattgagaggttgttagaccgtgatcaagttgacggtgatgaatctgtggaagatgaagaagaagatggattcttaaaaggattcaaggttgcaaactttgaatatatcgatgaggcaaaggctcaggcagaaaaagaggaggcacggagaaaggctgcagctgaggctgaaaattctgaaagaaactactgggatgaactattgaaggatagatatgatgtacagaaagttgaagaacatactgctatgggaaaagggaaaagaagccgcaaacagatggctgccgctgatgaagatgacattcatgatttaagttccgaagatgaggattactcattggaggatgacatttcagataatgacacaagtttgcaaggaaatatttctgggaagaggggccaatattctaagagaaaatcacgtaatgttgattctattccattgatggagggcgaaggacgtaccttgagagttcttggattcaaccatgctcaacgagcaatgttcctacagacactcaatagattcggttttcagaattatgactggaaagagtatcttcctcgtcttaaaggaaaaagtgtcgaggaaatccagagatatgctgaacttgtcatggcacatcttgttgaagaaattaatgattctgactatttttcagatggcgttccaaaggaaatgatgcgtgttgatgatgtactagtcaggatagcaaacatatcccttattgaggagaagatggctgccacaggaccaggaaaaattacaaacatttttcctaattacttgctctatgagttccaaggcttatctggtggaagaatatggaaagcggagcatgatctactgttactgagaggcatactgaagcatggatatgcaaggtggcagtatatatcagatgacagagagaatgggctttttgaggctgcacgacgagagcttcatctcccttcggttaatgaaataattggtgctcagttgaacgaggcaaatgggaatttggaaggtgcacaggaaggccaagcgaacacaacaagcatgtcgcattacaaggagatccagagaaagatagttgagttcttgagaaagagatatcatcttatggagagagccttgaatatggaatatgctgtgataaagaaaaaaattcctgttcctgatgatattactgaacaaggtgttccagcaggacatgctccttttattccagatatcagtgaactgttgcgggaattgcccaatcttgagccaatttctaccaatgaattggtttctgagggcacagctggtcagttacaagttccccatctctacaataagatgtgtggagtgcttgaagagagtggtgcttatgcgctcagttccttctttggagacaagtccgcatcttctagtttggccaatagccttcgacagtttgaaactgtgtgcgagaatgtcgtcgaggccttgcgaccacaccaaaatggtactggcagtgccatcaaagaggaattggtagatgcagccaccaaagcagcagcagcagcagctcctcaacaagattcaggccatgatgcaccgcatgggcagtcttcgacagccaaggcggacatggaaatcgatggttgatttgtaggttccagagtggtaagaaagggaatccccctctaatcattatgtatactgtggtcagaatgtgcgctatatattgtaacatcaaagaaagcacctccaggcctgagggtgttactgctaatgcgtttggtttacttgttgtccttgtaatatgcatacacatttagaactcatgcagccattttgtgtgctcgaaccggtggatcgctgccctgttgtcttgtactgtgtttagggcctgtttggatacgaatggttaattataagacggggctaaagataagtacggataagtacggattagctatagttggctagcttgttggttaacaattagctaaactttggctagctagatggtaaacaattagttaaaagtttagcaaaagaattagttcacc

SEQ ID NO: 79288 - DNA, 4925 bp, Zea Mays
attttttccgaacaaatccaccgtccatacatgccttattgccttttgcacattcaagaccgctctagtccctgctctacagctctagtcgattacagaaatttggacaaagcagaaggttcaggtcgtaagatcgcctagtccctgctcttcctggtcagtggccgttaccactgccccctctcctctcctctcgctcgtgcagaggaggagacagactccccccgtcgccgccctcgcgcctcctccgcccgcagctcaagccgagcgtcaccccgtcggctaccttccattctcgccgcacttctcccactgggcacctcgcgccctcgtgacggtataaatagcccctagtcactcctcggcgctcctcaaacccaccaaaccctagcccacttagcggcggcggcgctagaggtggaacgagaccttggcggaggtagcgagggtagcgctgctcgctcgctcgttgggtttccatcccctactgcctagagcgagctctacgcgacgatgagcagccttgtcgagcggctgcgcgtgcggtcggagaggcggccgcggtacgcgctcgacgagtccgacgacgacctcccgctgcgcgttggggccggaaaggggaaggatcaacagaacgacgcgcccgccgagcggatcgagcgcgaggacgcgaaagaagaagcttgccagcgctgtggaaaaagtgataatctagtctcttgttcaacatgtacatacaaatttcacagaaaatgcttggttccttgcttaaacatcacatctgataaatggagctgcccagaatgtgtaagtccattaacagagatggagaggattctagatattgaagtgctggaagcacctcgtgaagattctagttccacagagcctcgatcaaagaagatggagcgatatcttatcaagtggaaaggattatcatacattcactgctcttgggtttcagaaaaagaatattcagaagccgcgaatatacaccctcgtctgaggactaggttgaataacttcagaaggcaaaaggaagccatgaaaatagaagcagaaagatctggtgaggacatcgttgcaattagaccggagtggacaactgttgacaggatccttgctagcaggtatacaggaaaaaacttagttggcgatcgggaatactatgttaaatggaatgaacttacatatgaggaatgtacatgggaaaatgagtctgacatcacggtgttccaacctgagattgaacgcttcaatgagatccagttcaggcgtaagaaatctggtgacaagggcaaggccactcgggagccacgccaattcaaggagagccctacgtttctttctggtggcacactacatccctatcagcttgaagggttaaactttttgcgatattcgtggtttcataacaaacgcgtaatccttggtgatgagatgggtcttgggaaaacgatacaaagtattgcttttcttgcctcactctttgaagacaagtttggtccgcatctggtcgttgctcccctctcaaccctgcggaattgggagcgtgaatttgcaacttgggcacctcaaatgaatgttgtaatgtattttggagctgctgcttctcgtgacattattaggaagtacgagttttactacccaaaagagaaactgaagaagctgaagaaaaagaaatcttctccatctaatgaagataagaagcagtcaaggataagatttgatgtcttattgacgtcttatgagatgatcaacatggactcgtctattctaaaaaatatagaatgggagtgcttggttgtggatgaggggcatcggttgaaaaacaaagattccaagttgtttggtcaacttaaagattataataccaaacatcgtgttctattaacggggaccccagtccagaataatcttgatgagcttttcatgcttatgcacttccttgagggtgaaagttttgggagtataactgatctccaagaagagttcaaggatataaaccaagacaagcaaattgagaagcttcatggaatgctgaagccacatcttcttcgaagattcaagaaggatgttatgaaagaacttcctccaaaaaaggaattgattctacgagttgaattgacaagaaaacagaaggagtactataaggcaattctcaccaagaattatgaagtgttagcccgtcgtaatggtggacatacatctctaataaacgttgtaatggagttgcgcaaactctgttgccatggattcatgattgatgaacctgatcttgaacctgccaatccagaagaaggtttaaggaggcttctagattcatcaggtaagatgcagctgctggacaagatgatggtgaaactgaaagagcagggtcatagagttctaatttattcacagttccagcacatgttggacttgctggaggactatttaagttacaggaaatggacttatgaacgcatcgatggcaagataagtggcgctgataggcagatacggatagatcgcttcaacgctaagaattcaactaggttttgctttcttctttctactagagctggtggtctgggaataaacttggcaactgcagatactgtaatcatctatgacagtgattggaacccacatgcggatttgcaagctatggcaagagctcatcgcttaggacagactagtaaggtgatgatatacaggcttgttagccgaggtacaattgaggagcgaatgatgcagcttacaaaaaagaagattttattggagcacttagttgttggtcgactcaccaaagctaataatgtcaatcaggaggagttggatgatattatacgctatggatcaaaggagctttttgaagacgagaatgatgaatctcgccaaattcattatgacgaagctgcaattgagaggttgttagaccgtgatcaagttgacggtgatgaatctgtggaagatgaagaagaagatggattcttaaaaggattcaaggttgcaaactttgaatatatcgatgaggcaaaggctcaggcagaaaaagaggaggcacggagaaaggctgcagctgaggctgaaaattctgaaagaaactactgggatgaactattgaaggatagatatgatgtacagaaagttgaagaacatactgctatgggaaaagggaaaagaagccgcaaacagatggctgccgctgatgaagatgacattcatgatttaagttccgaagatgaggattactcattggaggatgacatttcagataatgacacaagtttgcaaggaaatatttctgggaagaggggccaatattctaagagaaaatcacgtaatgttgattctattccattgatggagggcgaaggacgtaccttgagagttcttggattcaaccatgctcaacgagcaatgttcctacagacactcaatagattcggttttcagaattatgactggaaagagtatcttcctcgtcttaaaggaaaaagtgtcgaggaaatccagagatatgctgaacttgtcatggcacatcttgttgaagaaattaatgattctgactatttttcagatggcgttccaaaggaaatgatgcgtgttgatgatgtactagtcaggatagcaaacatatcccttattgaggagaagatggctgccacaggaccaggaaaaattacaaacatttttcctaattacttgctctatgagttccaaggcttatctggtggaagaatatggaaagcggagcatgatctactgttactgagaggcatactgaagcatggatatgcaaggtggcagtatatatcagatgacagagagaatgggctttttgaggctgcacgacgagagcttcatctcccttcggttaatgaaataattggtgctcagttgaacgaggcaaatgggaatttggaaggtgcacaggaaggccaagcgaacacaacaagcatgtcgcattacaaggagatccagagaaagatagttgagttcttgagaaagagatatcatcttatggagagagccttgaatatggaatatgctgtgataaagaaaaaaattcctgttcctgatgatattactgaacaaggtgttccagcaggacatgctccttttattccagatatcagtgaactgttgcgggaattgcccaatcttgagccaatttctaccaatgaattggtttctgagggcacagctggtcagttacaagttccccatctctacaataagatgtgtggagtgcttgaagagagtggtgcttatgcgctcagttccttctttggagacaagtccgcatcttctagtttggccaatagccttcgacagtttgaaactgtgtgcgagaatgtcgtcgaggccttgcgaccacaccaaaatggtactggcagtgccatcaaagaggaattggtagatgcagccaccaaagcagcagcagcagcagctcctcaacaagattcaggccatgatgcaccgcatgggcagtcttcgacagccaaggcggacatggaaatcgatggttgatttgtaggttccagagtggtaagaaagggaatccccctctaatcattatgtatactgtggtcagaatgtgcgctatatattgtaacatcaaagaaagcacctccaggcctgagggtgttactgctaatgcgtttggtttacttgttgtccttgtaatatgcatacacatttagaactcatgcagccattttgtgtgctcgaaccggtggatcgctgccctgttgtcttgtactgtgtttagggcctgtttggatacgaatggttaattataagacggggctaaagataagtacggataagtacggattagctatagttggctagcttgttggttaacaattagctaaactttggctagctagatggtaaacaattagttaaaagtttagcaaaagaattagttcacc

SEQ ID NO: 79289 - DNA, 4348 bp, Zea Mays
ctcaagcttgacctaggactcttgatgaaattatcataagagaggacattcaaatatttgaaattttatttgttaccagtttaccacttcactgtcggctctccagaacaaaagaagaagcttgccagcgctgtggaaaaagtgataatctagtctcttgttcaacatgtacatacaaatttcacagaaaatgcttggttccttgcttaaacatcacatctgataaatggagctgcccagaatgtgtaagtccattaacagagatggagaggattctagatattgaagtgctggaagcacctcgtgaagattctagttccacagagcctcgatcaaagaagatggagcgatatcttatcaagtggaaaggattatcatacattcactgctcttgggtttcagaaaaagaatattcagaagccgcgaatatacaccctcgtctgaggactaggttgaataacttcagaaggcaaaaggaagccatgaaaatagaagcagaaagatctggtgaggacatcgttgcaattagaccggagtggacaactgttgacaggatccttgctagcagaaaaaacttagttggcgatcgggaatactatgttaaatggaatgaacttacatatgaggaatgtacatgggaaaatgagtctgacatcacggtgttccaacctgagattgaacgcttcaatgagatccagttcaggcgtaagaaatctggtgacaagggcaaggccactcgggagccacgccaattcaaggagagccctacgtttctttctggtggcacactacatccctatcagcttgaagggttaaactttttgcgatattcgtggtttcataacaaacgcgtaatccttggtgatgagatgggtcttgggaaaacgatacaaagtattgcttttcttgcctcactctttgaagacaagtttggtccgcatctggtcgttgctcccctctcaaccctgcggaattgggagcgtgaatttgcaacttgggcacctcaaatgaatgttgtaatgtattttggagctgctgcttctcgtgacattattaggaagtacgagttttactacccaaaagagaaactgaagaagctgaagaaaaagaaatcttctccatctaatgaagataagaagcagtcaaggataagatttgatgtcttattgacgtcttatgagatgatcaacatggactcgtctattctaaaaaatatagaatgggagtgcttggttgtggatgaggggcatcggttgaaaaacaaagattccaagttgtttggtcaacttaaagattataataccaaacatcgtgttctattaacggggaccccagtccagaataatcttgatgagcttttcatgcttatgcacttccttgagggtgaaagttttgggagtataactgatctccaagaagagttcaaggatataaaccaagacaagcaaattgagaagcttcatggaatgctgaagccacatcttcttcgaagattcaagaaggatgttatgaaagaacttcctccaaaaaaggaattgattctacgagttgaattgacaagaaaacagaaggagtactataaggcaattctcaccaagaattatgaagtgttagcccgtcgtaatggtggacatacatctctaataaacgttgtaatggagttgcgcaaactctgttgccatggattcatgattgatgaacctgatcttgaacctgccaatccagaagaaggtttaaggaggcttctagattcatcaggtaagatgcagctgctggacaagatgatggtgaaactgaaagagcagggtcatagagttctaatttattcacagttccagcacatgttggacttgctggaggactatttaagttacaggaaatggacttatgaacgcatcgatggcaagataagtggcgctgataggcagatacggatagatcgcttcaacgctaagaattcaactaggttttgctttcttctttctactagagctggtggtctgggaataaacttggcaactgcagatactgtaatcatctatgacagtgattggaacccacatgcggatttgcaagctatggcaagagctcatcgcttaggacagactagtaaggtgatgatatacaggcttgttagccgaggtacaattgaggagcgaatgatgcagcttacaaaaaagaagattttattggagcacttagttgttggtcgactcaccaaagctaataatgtcaatcaggaggagttggatgatattatacgctatggatcaaaggagctttttgaagacgagaatgatgaatctcgccaaattcattatgacgaagctgcaattgagaggttgttagaccgtgatcaagttgacggtgatgaatctgtggaagatgaagaagaagatggattcttaaaaggattcaaggttgcaaactttgaatatatcgatgaggcaaaggctcaggcagaaaaagaggaggcacggagaaaggctgcagctgaggctgaaaattctgaaagaaactactgggatgaactattgaaggatagatatgatgtacagaaagttgaagaacatactgctatgggaaaagggaaaagaagccgcaaacagatggctgccgctgatgaagatgacattcatgatttaagttccgaagatgaggattactcattggaggatgacatttcagataatgacacaagtttgcaaggaaatatttctgggaagaggggccaatattctaagagaaaatcacgtaatgttgattctattccattgatggagggcgaaggacgtaccttgagagttcttggattcaaccatgctcaacgagcaatgttcctacagacactcaatagattcggttttcagaattatgactggaaagagtatcttcctcgtcttaaaggaaaaagtgtcgaggaaatccagagatatgctgaacttgtcatggcacatcttgttgaagaaattaatgattctgactatttttcagatggcgttccaaaggaaatgatgcgtgttgatgatgtactagtcaggatagcaaacatatcccttattgaggagaagatggctgccacaggaccaggaaaaattacaaacatttttcctaattacttgctctatgagttccaaggcttatctggtggaagaatatggaaagcggagcatgatctactgttactgagaggcatactgaagcatggatatgcaaggtggcagtatatatcagatgacagagagaatgggctttttgaggctgcacgacgagagcttcatctcccttcggttaatgaaataattggtgctcagttgaacgaggggaatttggaaggtgcacaggaaggccaagcgaacacaacaagcatgtcgcattacaaggagatccagagaaagatagttgagttcttgagaaagagatatcatcttatggagagagccttgaatatggaatatgctgtgataaagaaaaaaattcctgttcctgatgatattactgaacaaggtgttccagcaggacatgctccttttattccagatatcagtgaactgttgcgggaattgcccaatcttgagccaatttctaccaatgaattggtttctgagggcacagctggtcagttacaagttccccatctctacaataagatgtgtggagtgcttgaagagagtggtgcttatgcgctcagttccttctttggagacaagtccgcatcttctagtttggccaatagccttcgacagtttgaaactgtgtgcgagaatgtcgtcgaggccttgcgaccacaccaaaatggtactggcagtgccatcaaagaggaattggtagatgcagccaccaaagcagcagcagcagcagctcctcaacaagattcaggccatgatgcaccgcatgggcagtcttcgacagccaaggcggacatggaaatcgatggttgatttgtaggttccagagtggtaagaaagggaatccccctctaatcattatgtatactgtggtcagaatgtgcgctatatattgtaacatcaaagaaagcacctccaggcctgagggtgttactgctaatgcgtttggtttacttgttgtccttgtaatatgcatacacatttagaactcatgcagccattttgtgtgctcgaaccggtggatcgctgccctgttgtcttgtactgtgtttagggcctgtttggatacgaatggttaattataagacggggctaaagataagtacggataagtacggattagctatagttggctagcttgttggttaacaattagctaaactttggctagctagatggtaaacaattagttaaaagtttagcaaaagaattagttcacc

SEQ ID NO: 79290 - DNA, 911 bp, Zea Mays
cggtactaggcttttttccctgaacagataaagaaaaaaattcctgttcctgatgatattactgaacaaggtgttccagcaggacatgctccttttattccagatatcagtgaactgttgcgggaattgcccaatcttgagccaatttctaccaatgaattggtttctgagggcacagctggtcagttacaagttccccatctctacaataagatgtgtggagtgcttgaagagagtggtgcttatgcgctcagttccttctttggagacaagtccgcatcttctagtttggccaatagccttcgacagtttgaaactgtgtgcgagaatgtcgtcgaggccttgcgaccacaccaaaatggtactggcagtgccatcaaagaggaattggtagatgcagccaccaaagcagcagcagcagcagctcctcaacaagattcaggccatgatgcaccgcatgggcagtcttcgacagccaaggcggacatggaaatcgatggttgatttgtaggttccagagtggtaagaaagggaatccccctctaatcattatgtatactgtggtcagaatgtgcgctatatattgtaacatcaaagaaagcacctccaggcctgagggtgttactgctaatgcgtttggtttacttgttgtccttgtaatatgcatacacatttagaactcatgcagccattttgtgtgctcgaaccggtggatcgctgccctgttgtcttgtactgtgtttagggcctgtttggatacgaatggttaattataagacggggctaaagataagtacggataagtacggattagctatagttggctagcttgttggttaacaattagctaaactttggctagctagatggtaaacaattagttaaaagtttagcaaaagaattagttcacc

SEQ ID NO: 79291 - DNA, 1923 bp, Zea Mays
acccgtacgtgcggtcagagagctatctggggtggcattggagttggagccggcctgacagcaccagagagagggttgccgacatgggagaagcggcagaccgcgagcggccgccgtggcgctgcacggtagccgtgcaggccgcgctctgcctcgcgctctacgcggccttcagcctcggcgagccgcagctcatcccgcggggcggggtggacgcactcgggcggggcgcgcgcggcggcggcgtcgccttcctcagcgtcgctggcggcgcgcgcggacccatcgaccaggagaggctcctgaggcagatggagaccacagcaaagctttatgaagtcaagttcgtgctggatgttactcaactgggagcggatgatccactctggcaaaatggttccatgtacttccaggctctgaacatcccgtgaaagtgaagatgccctacgatcaggttctagatattattggtctgggcacatggcctctgcaggaacctctacatggtggcaggataagcacttcttacaagggacaaattaaatggttggatcgattactagcactcactgaaagcaattggtaagtgcttactagcacttgtccctgtgtttgtgcaaactctttgtattgttattggatatgctagtttttttagataatgggaattgaaagttcccgacttttgtctcaaagagactacagccgatttattacaaactcagacaacataatatagagctgagaaacgaaactagagacaaagcctaaatgcagatccccatccatgatgtctaaaaatatgcatcaccaattcttccaaactacaacatgccttgtttaaagagatgcactgagttagcgggactgagttagcattgtatagtttagtattgaagaatgaaggtaccttgagaaactttaaacatccataagaaatagtaaaataaccctgtttagttgaatttatgccttcatgctgcatatggagatttatgcatgtgttactgtctgtaaccataatgctcacattctttttgttttaaaaaaggaaaatagttgttggatataatccattacttgtttgcaatgggaaagaaacaacaaagctcgatgtgccatttcaacatatttttgcaaaatatgaagtggtaacttctgtcctcttcattgatcgccttttttcctttaaattaatgattgctagtacttagttccctctatacatatagaatgcatacataagcatgggcgggtcttgtggctacttccatcgagacaactcgatactgtacattggacaccccaggagccctggtggtgcccaaacaagtgtagatggttttttcttgcacagagttagacccctcgagatggagtcaatgttgataaatgtagaaggcaagctagttcagagatctgatgttcagcagcatggaacgggagccatgtgaacctcacaactttcagtttctgttccattatgtcgtagcgccgaacaaaggcgtgacataatgttgtgttgtattgtattcattcagtttaaaaaaagctgcattagatttttgtcattttgcctgtttcaacatgtttgagtttgtaggtagtctttatcattatttacaaacatacaagagttcactatcacatgcagagtgctgcccaagcagggacgagaagttagttaatacattacttttctttatctgctggttctgtgccagttgatctctcaaccgatacagtccgattttgtttcagaaattttagatgatggttgcaaggctgtaactatcgttttgatgattcctacggcccactacatttcattttatcttttacaaaaactaaattcagaactcagaaagatacggttggtggtatagcagtttctttggagacttgctgactgacaaagagtct

SEQ ID NO: 79292 - DNA, 1888 bp, Zea Mays
acccgtacgtgcggtcagagagctatctggggtggcattggagttggagccggcctgacagcaccagagagagggttgccgacatgggagaagcggcagaccgcgagcggccgccgtggcgctgcacggtagccgtgcaggccgcgctctgcctcgcgctctacgcggccttcagcctcggcgagccgcagctcatcccgcggggcggggtggacgcactcgggcggggcgcgcgcggcggcggcgtcgccttcctcagcgtcgctggcggcgcgcgcggacccatcgaccaggagaggctcctgaggcagatggagaccacagcaaagctttatgaagtcaagttcgtgctggatgttactcaactgggagcggatgatccactctggcaaaatggttccatgtacttccaggctctgaacatcccgtggtactccacttcatcacatgggcggacggttggtaactttttgaagaaagtgaagatgccctacgatcaggttctagatattattggtctgggcacatggcctctgcaggaacctctacatggtggcaggataagcacttcttacaagggacaaattaaatggttggatcgattactagcactcactgaaagcaattggtaagtgcttactagcacttgtccctgtgtttgtgcaaactctttgtattgttattggatatgctagtttttttagataatgggaattgaaagttcccgacttttgtctcaaagagactacagccgatttattacaaactcagacaacataatatagagctgagaaacgaaactagagacaaagcctaaatgcagatccccatccatgatgtctaaaaatatgcatcaccaattcttccaaactacaacatgccttgtttaaagagatgcactgagttagcgggactgagttagcattgtatagtttagtattgaagaatgaaggtaccttgagaaactttaaacatccataagaaatagtaaaataaccctgtttagttgaatttatgccttcatgctgcatatggagatttatgcatgtgttactgtctgtaaccataatgctcacattctttttgttttaaaaaaggaaaatagttgttggatataatccattacttgtttgcaatgggaaagaaacaacaaagctcgatgtgccatttcaacatatttttgcaaaatatgaagtgaatgcatacataagcatgggcgggtcttgtggctacttccatcgagacaactcgatactgtacattggacaccccaggagccctggtggtgcccaaacaagtgtagatggttttttcttgcacagagttagacccctcgagatggagtcaatgttgataaatgtagaaggcaagctagttcagagatctgatgttcagcagcatggaacgggagccatgtgaacctcacaactttcagtttctgttccattatgtcgtagcgccgaacaaaggcgtgacataatgttgtgttgtattgtattcattcagtttaaaaaaagctgcattagatttttgtcattttgcctgtttcaacatgtttgagtttgtaggtagtctttatcattatttacaaacatacaagagttcactatcacatgcagagtgctgcccaagcagggacgagaagttagttaatacattacttttctttatctgctggttctgtgccagttgatctctcaaccgatacagtccgattttgtttcagaaattttagatgatggttgcaaggctgtaactatcgttttgatgattcctacggcccactacatttcattttatcttttacaaaaactaaattcagaactcagaaagatacggttggtggtatagcagtttctttggagacttgctgactgacaaagagtct

SEQ ID NO: 79293 - DNA, 1139 bp, Zea Mays
actcccataaccgctactcctaatcgcgaagatggagaccacagcaaagctttatgaagtcaagttcgtgctggatgttactcaactgggagcggatgatccactctggcaaaatggttccatgtacttccaggctctgaacatcccgtggtactccacttcatcacatgggcggacggttggtaactttttgaagaaagtgaagatgccctacgatcaggttctagatattattggtctgggcacatggcctctgcaggaacctctacatggtggcaggataagcacttcttacaagggacaaattaaatggttggatcgattactagcactcactgaaagcaattggaaaatagttgttggatataatccattacttgtttgcaatgggaaagaaacaacaaagctcgatgtgccatttcaacatatttttgcaaaatatgaagtgaatgcatacataagcatgggcgggtcttgtggctacttccatcgagacaactcgatactgtacattggacaccccaggagccctggtggtgcccaaacaagtgtagatggttttttcttgcacagagttagacccctcgagatggagtcaatgttgataaatgtagaaggcaagctagttcagagatctgatgttcagcagcatggaacgggagccatgtgaacctcacaactttcagtttctgttccattatgtcgtagcgccgaacaaaggcgtgacataatgttgtgttgtattgtattcattcagtttaaaaaaagctgcattagatttttgtcattttgcctgtttcaacatgtttgagtttgtaggtagtctttatcattatttacaaacatacaagagttcactatcacatgcagagtgctgcccaagcagggacgagaagttagttaatacattacttttctttatctgctggttctgtgccagttgatctctcaaccgatacagtccgattttgtttcagaaattttagatgatggttgcaaggctgtaactatcgttttgatgattcctacggcccactacatttcattttatcttttacaaaaactaaattcagaactcagaaagatacggttggtggtatagcagtttctttggagacttgctgactgacaaagagtct

SEQ ID NO: 79294 - DNA, 250 bp, Zea Mays
ttcacacatgtaaactgacttaatagtactccacttcatcacatgggcggacggttggtaactttttgaagaaagtgaagatgccctacgatcaggttctagatattattggtctgggcacatggcctctgcaggaacctctacatggtggcaggataagcacttcttacaagggacaaattaaatggttggatcgattactagcactcactgaaagcaattgggtaaaacaataatgttcattcatcaa

SEQ ID NO: 79295 - DNA, 473 bp, Zea Mays
gtctcgtttccttcgaccagaagccagaaagttttccttgacagactgcagcttccatggagggctccgtgcggctgggggacttgaagccctccccatcgcacatcaagccctcgccatcgccggacactggtgaaccttttctcgcgtcccagcctcctccatctctaggcttgcgcgacctggctaggatagacgtgtgcagcccagcagtgtctagtcggacgctacctccatgccccgtagcagatgtgtctaggccagcgccgccaggccagatgacgcctccatgccccgcgtccgtcctgcctactctagcagcaccacatcgaggccccaaaccaaacaccgaaagttgtttccgctatgatgttcctcgaccaatgaagtggattccaaccgggctacacccacccatcctaaggagaactgcagggaggccaaaaatacaaagatacaaaggaagtcatgag

SEQ ID NO: 79296 - DNA, 459 bp, Zea Mays
gttttccttgacagactgcagcttccatggagggctccgtgcggctgggggacttgaagccctccccatcgcacatcaagccctcgccatcgccggacactggtgaaccttttctcgcgtcccagcctcctccatctctaggcttgcgcgacctggctaggatagacgtgtgcagcccagcagtgtctagtcggacgctacctccatgccccgtagcagatgtgtctaggccagcgccgccaggccagatgacgcctccatgccccgcgtccgtcctgcctactctagcagcaccacatcgaggccccaaaccaaacaccgaaagttgtttccgctatgatgttcctcgaccaatgaagtggattccaaccggtgaatcttggatttaggctacacccacccatcctaaggagaactgcagggaggccaaaaatacaaagatacaaaggaagtcatgag

SEQ ID NO: 79297 - DNA, 1356 bp, Zea Mays
atttcttcgagttcatgctaaagcacgaaactgcagatctgttataataaactttgaaaaagcatggcgtgtggaaaatttctctcttctacgaaaaagaaggaagcatacgggacgtacaaaaatcacacaaaaaaaggggagtggaagaccgcgtcacattctacacgcggccgtctggagtcgccggtctcgccgctacgtacgcactggtgcagcaactactccccctctctccgagccgccaacaaaactagtcagtccatcgccgtacttgccgcgtccagcgcgcggcccagtaactaccgcatgccgctctcctgcttcgccggcggcgacccatccgcggcgccgccgtcctcctcggcgacgtcggtctactggacccacctcggcggcgtcacgctgacgtggtcccgcgctccgatcggcctcctcctggccgcggagctcagcctgcgccccgccggggacgtccacggcggcgaggacgccacgcccgcgcggttcgcgttccggccgtggctcccgtggcggcggcgcgggtccaagcggttcgcggcgccgggcggccgcgccgtcaagttctcgtgggacctgtcgcgcgcgcgcttcgccgccaccgggcgccggccggagcccgtgtcccggtactccctgcgcgtctgggtggacggcgagctggcgctggccgtcggggaccacgcgcccgcggcggggctgctcctctcccgccgggagagcgccgccgtcgtcgccgacgggcgaggcgaggcctactcgaccgccgtcgacgtcgcgggcgagcggcacgacgtgtccctcgccgtggagggctccaccatgtgggtcgccatcgacggcgagaaggccctccaggtgcgccggctccggtggaagttccgcggcagcgagaggctggacctcccgaccggccgccgcgtccgggtcacgtgggacctccacggctggctcttctgcccggacgcggccgccgccgtcttcgtcctccggttcgaaacctccgacgcggccgaagcggacgacgagggcgacgcggacgagagcgaggccggcccgcacgtgctgaggcagccctcgttcagtttcaggaaccaccaggcgcacggcagcggcggcgacagctggttcagcagcgacagcgataggagggggtggatgcgcgggccgttcaggtcgggcggctccgacacgtcgccgtcggtgtcggtggcgtcgacgtccgcggcgtcgtcggctgccagcgtggccacggtgtcggagtgggcggctgcggaggaggcggcgacgctgaaggatggcggcgggttctccctcgtcgtccagctgtggtgg

SEQ ID NO: 79298 - DNA, 710 bp, Zea Mays
ccaaaacataatgcatatatttcacaatcatacaaagtgacaatttttttccaacatccacatatatttcaagcataatatgtcaatcacataaaagaacatggttcataatcctttaacctaacaaatattaagagaacacatataatagccagaagttgtagttctatacaacaagcataaggataaaaagaggtgcaaagttctgtgagatggatcttcaggatggttgacaccaacaccttggcaagcatacttaaggagtcatctgactacgactgatacttaatctttgtcgaagaatactggtattttctgctaaggacttcttcaaatctgcaatttcagtagattgattagcaatggttgcctcggatgcttgtgacttggcctttaaggttttcatttcttctcaaagtccatcttttcttgtctctcagtgtccaattgagactaaatctcttgcatcattgttgaaactgtccttatgttgcttctcttggaggacacaagaccagcattgcgaagaaatttacttgaaaccaacaccacattggaaacaacttctgtagaatactttacagggagctaaacttttcaacataattccttatggtttggggtagaccacatttgtaccaaatccctccattgatcatcagtcataatgacactggcgatgtagtcctaactttatttgcaggaatctc

SEQ ID NO: 79299 - DNA, 1115 bp, Zea Mays
ggcgcgggacgagcgcggcgagagttccgaaacaaataaaaagaccggcgtgcagcgcgaggtgtactcgaagaaggtcgtgatgcggcggctgatcccggtgtagccggccgcggtggaccgcggcggagcaggcggagtgcgcggtgtgcctggacgagttccgcgcgggcgacgtgctggcgcacctgcgctgcggccaccgcttccactgggcctgcgcgctgccctggctcgagggcacctcacggtgccccttctgccgcgccgccgtggacgccggcgccgccgccgccgccgacggcgcctagaagcggccgaggctctggtcttgctggggcttgccctgggctgggacggcgcggggcgccttgtcgctgtcggcccacgccagctacgctacccccatggcgttgccacgctaggcagtggctagtgggggtggtcatggtgagtggtgaccggcctgcttgtgcatgtggcgcggagcggaggaggacagcgagacgcgcacgacgaacccgtgagtgccttggcagtttttgcacgctttgcgcgcgcaaaggcacggttggtgcacatttgttggttggaccgtttggcccccccctttgccgtgtcctcctcccatcatcgcgagcaaagtgatgaacggttttgtttttcgtgtttggggagcgctttgtttatggactctggtattagcggatagcggttccatcatgtaattcatgtcaaaaaaaaaaagatcgtctgatcgatcttggagaaagaactgtaatttagatcaacatcaatcacatctgtgtacagtctcagtgttgttgctctgaacttgtataattttctgtttgctcagttgaaggtaaatgcagttggaggtgaggtctctttagaacgtgatgctaatgtaggatcttgttcccccatgaccacgcaggatattttttttgttctgttaaaattcccgcagtgttctcgcggaacatatgcttccccgaaggatgctacatgatcatgatgcccatacatgtggtcgtcgtggatccgcattaccatatactcggggtgtacggacccaacggtttctccagccctcccacaggccacagact

SEQ ID NO: 79300 - DNA, 1688 bp, Zea Mays
aaaactgccaaacactgcacactcgggactgggccgtttcagtgtcacttccgccgccttctccctcaatcaagagcgcccgtcccttcgcccgcgcgccccgccatggccgcgccgtgcggccgcggcggcggcacgctgacgctggtcctcgtggctctctccgcggcgttcctcacctacaacgtgctcatctccttccactcctccctccagcccctcccttcctccttccccaccgcctcccgccgcttcggcgccgcggggtccgccaggcggagggcgttccacaccgcggtgaccgcgtcagggtccgcgtacaacacgtggcagtgccgcgtcatgtaccactggttcaaggaggcgcgccgggcgccgggcggcgacgagatgggcgggttcaccaggatcctgcactccgggaaacccgacgagttcgtcgatgagatccccacattcgtcgccgacccactccccgatggggatcagggatacatcgttctcaataggccatgggcatttgttcagtggctccagaaagcagacataaaggaagactatattttgatggcagagccagatcacataattgtcaagcctatcccaaacttgtcgagagatggtcaggcagcagctttccctttcttttacattgagcctaaaaaatatgagaatgtgttgcgtaagttcttccctgaagacaaggggccaatcactaagattgatcctataggaaactctcctgtcattattgagaaggaatctcttggaaggattgcaccgacttggatgaatgtttcattagcaatgaaaaaagatcctgacgcagataaatcttttggctgggttcttgaaatgtatgcctatgccgtggcatctgctctccatggagtgggcaacatcttacgcaaggactttatgattcagccaccttgggacttggaagttggtgattcttttattattcattatacttatggctgtgattatgacatgacgggtaagctgacttatggcaaaattggagaatggagatttgacaagagatcatacacggacaaacctccacctagaaatttgccgttaccaccacatggtgtagctcaaagtgacacttgtgaaaatggtcaatgaagcaacagccaacataccaaactgggactcctatgccgctgctttttaacctgttacaaatttggctcacaattttgtttgccagatatttccattccagctgactttgatacatgataattgcctaacatggaagatgagtggatgatacagtggaatgcataccaggttttacacaaggctgccggttccttacctttctgattgaatcctgataatatatggtgcaatgccatcccttttttctcctaattttgttaaacacatgcacatcagcacatgacacaatatgtcaaaacacactcacctttggtgaaagctgcaatgtagatgactgagagatgtgatgttcttatctggatctgaatgtgcttattagaagaagaaaaaaaagagtcaggcgctgctctgacaaacgcaaaacctcctgtgtactggttttcctaatgcttgatttactcgattattcatttggaatgaagctgtgaaaagttgcatcaatcaaactcaatgtgcaatataagccgaccctctggaggtaccaacaacttgtg

SEQ ID NO: 79301 - DNA, 1676 bp, Zea Mays
ctcttggagtcatgtcggatctgacgcctgttcaccacgtgcctttcttcctccttggttcttcacagctctcctgccggatcagagtttactgctcaccgcacctccgttcctctctcctgagtctcctctcctcgtcaagtcaacagtcgccactgtccactgtccccacccgactgcctccataaaaaaaaaccgagcggagcgcgagctacgcgctgtgcctcgtgcctagacgaacggcataggcaccggacggtggcgtcatgtgcgtggaggagccgaaggacgccgaacggtttggttttggagacccaggggtcgaggagcccgctaagtttcccttggctcaggcagaagttaagcaattttgtcccagtaatccgatcgggggattggtctgatattggaggtcgccaatacatggaagacacccacgtgtgcattccagaccttgctaagaactttggtttcccatcattagataatgaagttgtttcattctatggggtctttgatggtcacggtggaaaagatgctgcccatttcgtttgtgataatttaccaaggatgattgtggaagattcagatttccctcttcagcttgaaaaagttgtgagaaggtcctttatgcagattgattgccagtttgctgagacatgctctctccatagagcatcgtcctccggtacaactgcacttacagcaatggtttttggaaggtctcttctggtcgctaatgccggtgactgtagggcggttctttcccggtgtggcaccgcagtcgaaatgtccatggaccacaggccttgcagtctcagcgaaaaactgcgcgtagaatcgcttggtggctacgtggacgatggctatctgaacggtctgctaggagtcaccagagcacttggtgactggcatctcgagggcatgaaaggagctggtgagacaggtggtcccctgagtgctgacccagagctcaagatgaccacgctgacgaaggatgacgagttcttgataattggcagcgacgggatctgggacgtcttctcgaaccagaactcggtggacttcgcccggaagcgcctccaggagcacaacgatgtgaagttgtgctgcagggaaatcgtcgaggaggcgatcaggcggggggctactgataacttgactgcagtgctggtctcgttccacctggaggccccgcctcggatcagagtggaccgtcctggtagggtggagaggagcatatctgctgaagggctcaatagcctcaggatactcctgggaaggcagtagctgcgttcttgtcgcgattttaggtgctgtgccgcattgccgagctgtaattgtttgtagtcatctcggctcctcattgtcgttagctgttacccgttgctgcgactgcgacacgtgttacgattcttgttggtgattgaaccaacaaacctgatattattcttgttggtgattgaaccaacaaacctgatactattcttgttggtgactgaaccaacagatttgagctctgtcctgtgagagattttaagcagatgaaagtatatctggcaaagaagctgtgagttcccagctcactgtgtaatgtttgccttccgttatgtaacaaaacaaaacaattcattgactgaaatgtgtcaggactgggtcaaatttcctgttctcgc

SEQ ID NO: 79302 - DNA, 1935 bp, Zea Mays
ctcttggagtcatgtcggatctgacgcctgttcaccacgtgcctttcttcctccttggttcttcacagctctcctgccggatcagagtttactgctcaccgcacctccgttcctctctcctgagtctcctctcctcgtcaagtcaacagtcgccactgtccactgtccccacccgactgcctccataaaaaaaaaccgaggtccaacaaacaaccactgcaatctccatgcccttccttccttccttccccacacaccatctctctttcacatgaggatttctttcccttctttctttcccacaaatattcccaaagaatcttctgtgttgcttctctcctcggattcctcttcccctcctcgcctcccactccaattattcctctccttactgacttgcttcgcttctctgttatctctgtcctctcctcgtgtttgttcttcctaccagcggagcgcgagctacgcgctgtgcctcgtgcctagacgaacggcataggcaccggacggtggcgtcatgtgcgtggaggagccgaaggacgccgaacggtttggttttggagacccaggggtcgaggagcccgctaagtttcccttggctcagatggagagagtttgtgaaaatacaacttctgctgatttcaggcagaagttaagcaattttgtcccagtaatccgatcgggggattggtctgatattggaggtcgccaatacatggaagacacccacgtgtgcattccagaccttgctaagaactttggtttcccatcattagataatgaagttgtttcattctatggggtctttgatggtcacggtggaaaagatgctgcccatttcgtttgtgataatttaccaaggatgattgtggaagattcagatttccctcttcagcttgaaaaagttgtgagaaggtcctttatgcagattgattgccagtttgctgagacatgctctctccatagagcatcgtcctccggtacaactgcacttacagcaatggtttttggaagggcggttctttcccggtgtggcaccgcagtcgaaatgtccatggaccacaggccttgcagtctcagcgaaaaactgcgcgtagaatcgcttggtggctacgtggacgatggctatctgaacggtctgctaggagtcaccagagcacttggtgactggcatctcgagggcatgaaaggagctggtgagacaggtggtcccctgagtgctgacccagagctcaagatgaccacgctgacgaaggatgacgagttcttgataattggcagcgacgggatctgggacgtcttctcgaaccagaactcggtggacttcgcccggaagcgcctccaggagcacaacgatgtgaagttgtgctgcagggaaatcgtcgaggaggcgatcaggcggggggctactgataacttgactgcagtgctggtctcgttccacctggaggccccgcctcggatcagagtggaccgtcctggtagggtggagaggagcatatctgctgaagggctcaatagcctcaggatactcctgggaaggcagtagctgcgttcttgtcgcgattttaggtgctgtgccgcattgccgagctgtaattgtttgtagtcatctcggctcctcattgtcgttagctgttacccgttgctgcgactgcgacacgtgttacgattcttgttggtgattgaaccaacaaacctgatattattcttgttggtgattgaaccaacaaacctgatactattcttgttggtgactgaaccaacagatttgagctctgtcctgtgagagattttaagcagatgaaagtatatctggcaaagaagctgtgagttcccagctcactgtgtaatgtttgccttccgttatgtaacaaaacaaaacaattcattgactgaaatgtgtcaggactgggtcaaatttcctgttctcgc

SEQ ID NO: 79303 - DNA, 1722 bp, Zea Mays
ctcttggagtcatgtcggatctgacgcctgttcaccacgtgcctttcttcctccttggttcttcacagctctcctgccggatcagagtttactgctcaccgcacctccgttcctctctcctgagtctcctctcctcgtcaagtcaacagtcgccactgtccactgtccccacccgactgcctccataaaaaaaaaccgagaccagcggagcgcgagctacgcgctgtgcctcgtgcctagacgaacggcataggcaccggacggtggcgtcatgtgcgtggaggagccgaaggacgccgaacggtttggttttggagacccaggggtcgaggagcccgctaagtttcccttggctcagatggagagagtttgtgaaaatacaacttctgctgatttcaggcagaagttaagcaattttgtcccagtaatccgatcgggggattggtctgatattggaggtcgccaatacatggaagacacccacgtgtgcattccagaccttgctaagaactttggtttcccatcattagataatgaagttgtttcattctatggggtctttgatggtcacggtggaaaagatgctgcccatttcgtttgtgataatttaccaaggatgattgtggaagattcagatttccctcttcagcttgaaaaagttgtgagaaggtcctttatgcagattgattgccagtttgctgagacatgctctctccatagagcatcgtcctccggtacaactgcacttacagcaatggtttttggaaggtctcttctggtcgctaatgccggtgactgtagggcggttctttcccggtgtggcaccgcagtcgaaatgtccatggaccacaggccttgcagtctcagcgaaaaactgcgcgtagaatcgcttggtggctacgtggacgatggctatctgaacggtctgctaggagtcaccagagcacttggtgactggcatctcgagggcatgaaaggagctggtgagacaggtggtcccctgagtgctgacccagagctcaagatgaccacgctgacgaaggatgacgagttcttgataattggcagcgacgggatctgggacgtcttctcgaaccagaactcggtggacttcgcccggaagcgcctccaggagcacaacgatgtgaagttgtgctgcagggaaatcgtcgaggaggcgatcaggcggggggctactgataacttgactgcagtgctggtctcgttccacctggaggccccgcctcggatcagagtggaccgtcctggtagggtggagaggagcatatctgctgaagggctcaatagcctcaggatactcctgggaaggcagtagctgcgttcttgtcgcgattttaggtgctgtgccgcattgccgagctgtaattgtttgtagtcatctcggctcctcattgtcgttagctgttacccgttgctgcgactgcgacacgtgttacgattcttgttggtgattgaaccaacaaacctgatattattcttgttggtgattgaaccaacaaacctgatactattcttgttggtgactgaaccaacagatttgagctctgtcctgtgagagattttaagcagatgaaagtatatctggcaaagaagctgtgagttcccagctcactgtgtaatgtttgccttccgttatgtaacaaaacaaaacaattcattgactgaaatgtgtcaggactgggtcaaatttcctgttctcgc

SEQ ID NO: 79304 - DNA, 1460 bp, Zea Mays
gttggctccagcctcatgaacagtacagtcgccctgattgaagctagcttcgagctcgctgaacaagtgaagccatagcgggagcagctacaacgaagtgatcctccatgggcaacaccttcggcttccgtggtggcctccgcgccgacgtcgccgatctgatgcaggatgctggcgaacacctgaggagcagtggggtgttcgtcaagagagcggtggcttctcagtaccaaagcaaccgcaccgggaacgacgaaatcgacgagtcgtccgccgaggagctgcgcgacgcggcgagctacgtgcagcacaacgcgatgctgatccaggtgccggtggtagggacagcgaggacgttctggcggctatcggacgaagccacgaggatgatcaggaagctcgcgttgatcctgaggaaccaccactccgtctgcaagtgcctcgccgctcctctgcaggcgtccaacgtctgggtcgggagcgctgggaacgccaagctaaggggggcgaggttcaccgacaaaggcttcagcgtcgagcgcgtgagggaggactacaggaacctgtccagggtgctccagcagctgatcagtatctctggtggggataccagcaaactgcctccggattacatagattttctctcgctcttgacggaggacaaccttacaaacaaggatgagttcttggttgtaaaccatgctgctctgctgcctctgaaaaaccgcaccgaggccttcctgatgctatacgacaggatcgtcaagtacctcggcaaaagaaaccgagcgaagatgaacaggatactctcctgcctcccctaccaggacgactggctggacaccgcgacggcgaatgccaagatcaaccagtggattgtgaatgtccagaatacaaaggagtacaggaagactacactcgatctcctgcggctcaacagaaacgtgagaagccacttgcacgagtacggccacgacgacgacgtcgaggagatcctgtactgtgagtggcccatgctgctcgtcgtcatggagaagatgttgcaccgggaaggcgagctccaagacacggacatcgagaacaagttcggctagccgctagccggtctacactgcaaaacagatgagatggaaggtgtgttctgcgtttcctggggttggaaatggtgagctactgttcttcgatcttctgtgagaatgttcatggtgatggagtgacacgctaccggtacctggtttgctttatgtaataggctacctgctttctcttgtcccttcaacttggaaaaggcaacgccagtcagcttcataaactgtggtctaaaacatcgccttaaaactttaaaatctttatgctgtaaagtcgtcttgtcattgagtttgcattcatcctttaatctaaaattcttgtaaaaaaactctattgcaccagttgggaacctccttcaaaaagtttttcta

SEQ ID NO: 79305 - DNA, 2330 bp, Zea Mays
ttccccgcaccttttcccaccgccagtcctccacccacgcgtccgcgcgcacacggaccccaacccaaaccggcaaaccccagctccaagcgaagcacagctcccaaagttccaagtcggacactgtaggcgcggcgcccgcggacacccatactgcgctcaccgagacaccgacccgcgatcccgacggcagctcccctccccctctccaggtctccactgtacgtctgaactgcatatcgcgcacgccgctccggtgctcccctcggcgagcgagatgcgggggccggcgtcggtgaaggcggggagccggccgccttggctggggctgggggcggccgcgtgggtgcaggtcgcgggcggcgccagctccacgttcgcgctctactcgcacgcgctcaaggtcgccctaggcgccgaccagagccgcctggcgctgctcggggtcgcctgcgacgtcggcgagaacctcggcctgctcccgggggtgctctgcaaccggctccaccccgcgctgctactcctcatcggcgccggcgcgtgccttctcgggtacggcaccgcgtggctcctcgtctccggcgtcgcgcccgcgctgccttactggctgatttggtttgcgttatgtcttgctacaaatggtggtgcatggttggcgactgccgttctagtgaccaacatgaggaacttcccgctcagcagaggtgccgttgctggcattctgaaagggtactcgggtttaagtgccgctgtttacactgaaatatacaccggagtgctccgtgattcacccatcaaccttttgctctctctcgctctgggaattcctgccgtgtgcctcctgggaatgtactttgttcagccctgcgaaccctctctggtggagacgaacgcagagcaagtccattttatgtttgcgcaagtggcaagcgttcttcttggggtttatctggttggggctacaatattggatcacgtcgtggctgtcaatgacattatgaactattctctgcttgtcgttatggttcttctcattttcgctccactggcaataccattgaagatgacgctattcccgaagaaaaaaaacccattggattcacactctccaacagttgataatgatcacacacagccgcttttgccttcttcctccgaatcaaacctcggtaatcttgaagaagatgattccacagacatcgatgtcctcttagccgagggtgaaggggccataaagccgaagagaagaagaccaagaaggggagaggatttcaggtttcgcgaagcgatactgaaggccgatttctggcttctgtttgcaatatgctttgttgggattggatctggaatcaccgttcttaataatctggcacagataggaatcgccgcaggtgctgtcgacacaaccatctcactctctgtcttcagtttctgcaacttctttggccggctgggaggtggtgctgtttccgagtatcttgtcaggtcaaggacactcccacgaagcgtcctggtcatatgcacccaggtagtgatgataatcacgtacctgctcttcgcgttgggccggctcgccacgctctacgtctccgtcgccttactcggcttatgctacggggtcctgctctccgtggtgatctcgacctcgtcggagctcttcgggctgaagcacttcggaaagatatacaacttcatcacgctggcgaacccggtcggcgcgtacctgttcaacaccctcgcggggtacgtctacgacctcgaggtggagaggcagcacgccgccgcggcggcggcagggtcggacgtcgtcgcgtgccacggccctagctgcttcaggctcacgttctgcgtcctcgccggcgcggcctgcctgggcacgctgctgagcacggtcctcaccgtgagggtccggcccgtgtaccagatgctctacgcaggggggtccttcagccagcccaggaactctgcgcattgaccggcggtgatacaaagccttgttgttttctgctgctagaataaaaatccggtatggcctctctgaatagcttcgttaatggcctgctgtagttcatgagcatgcacgctagtcttgtgctctgtggctgtattttttgggtccttcttggcctaataggaggagggagcgatggcctcgtgcagcagcagatgcttgctcccggtttagccgccgacgccgaggcccgagttttagggggtgtataattgaaatccctacttattatgtagaacaatgttgcttgtatacgacacgggtttaccggacattttggcagatcgcatatggcagtggttgagatgtgatcagggtt

SEQ ID NO: 79306 - DNA, 2209 bp, Zea Mays
ttccccgcaccttttcccaccgccagtcctccacccacgcgtccgcgcgcacacggaccccaacccaaaccggcaaaccccagctccaagcgaagcacagctcccaaagttccaagtcggacactgtaggcgcggcgcccgcggacacccatactgcgctcaccgagacaccgacccgcgatcccgacggcagctcccctccccctctccaggtctccactgtacgtctgaactgcatatcgcgcacgccgctccggtgctcccctcggcgagcgagatgcgggggccggcgtcggtgaaggcggggagccggccgccttggctggggctgggggcggccgcgtgggtgcaggtcgcgggcggcgccagctccacgttcgcgctctactcgcacgcgctcaaggtcgccctaggcgccgaccagagccgcctggcgctgctcggggtcgcctgcgacgtcggcgagaacctcggcctgctcccgggggtgctctgcaaccggctccaccccgcgctgctactcctcatcggcgccggcgcgtgccttctcgggtacggcaccgcgtggctcctcgtctccggcgtcgcgcccgcgctgccttactggctgatttggtttgcgttatgtcttgctacaaatggtggtgcatggttggcgactgccgttctagtgaccaacatgaggaacttcccgctcagcagaggtgccgttgctggcattctgaaagggtactcgggtttaagtgccgctgtttacactgaaatatacaccggagtgctccgtgattcacccatcaaccttttgctctctctcgctctgggaattcctgccgtgtgcctcctgggaatgtactttgttcagccctgcgaaccctctctggtggagacgaacgcagagcaagtccattttatgtttgcgcaagtggcaagcgttcttcttggggtttatctggttggggctacaatattggatcacgtcgtggctgtcaatgacattatgaactattctctgcttgtcgttatggttcttctcattttcgctccactggcaataccattgaagatgacgctattcccgaagaaaaaaaacccattggattcacactctccaacagttgataatgatcacacacagccgcttttgccttcttcctccgaatcaaacctcggtaatcttgaagaagatgattccacagacatcgatgtcctcttagccgagggtgaaggggccataaagccgaagagaagaagaccaagaaggggagaggatttcaggtttcgcgaagcgatactgaaggccgatttctggcttctgtttgcaatatgctttgttgggattggatctggaatcaccgttcttaataatctggcacagataggaatcgccgcaggtgctgtcgacacaaccatctcactctctgtcttcagtttctgcaacttctttggccggctgggaggtggtgctgtttccgagtatcttgtcaggtcaaggacactcccacgaagcgtcctggtcatatgcacccaggtagtgatgataatcacgtacctgctcttcgcgttgggccggctcgccacgctctacgtctccgtcgccttactcggcttatgctacggggtcctgctctccgtggtgatctcgacctcgtcggagctcttcgggctgaagcacttcggaaagatatacaacttcatcacgctggcgaacccggtcggcgcgtacctgttcaacaccctcgcggggtacgtctacgacctcgaggtggagaggcagcacgccgccgcggcggcggcagggtcggacgtcgtcgcgtgccacggccctagctgcttcaggctcacgttctgcgtcctcgccggcgcggcctgcctgggcacgctgctgagcacggtcctcaccgtgagggtccggcccgtgtaccagatgctctacgcaggggggtccttcagccagcccaggaactctgcgcattgaccggcggtgatacaaagccttgttgttttctgctgctagaataaaaatccgacactcaagacagcaggtaagctagctagtgagcagtggtgaccactgaccgagcactggcgtcgtcttcgctcgcggtacgtacgtgcgtacgtgcacggttggatggcggcaggaagaggcaagaacagggcgcactcgtcggcacgcgagcgcccgggcctaagttggcctcaggtcctg

SEQ ID NO: 79307 - DNA, 2649 bp, Zea Mays
cgcgtgctaaccgctaaacaggccgccgagcttaccgcgtcatcacgcaccgtgcatggacaggacaggagccagcgagcacggaatggtggtcgcagccgcagagtcgcatcgcacggtggagtggaggtgtcctgcgcgccgcacccccgcgttatcaggctccgatcccatccccgtcccgctctgcctggcctctgtcgcggggtcgcatcgcatgcctccatgccttggctggcagcatttactatttagccgaggtgtgggtgggggcgttggcggcaaccggcaacaccgtcctcccctccccctcctcctcccgcgtgctctcctctcctatcctctctgcccccggtaactacaactgttggagtaggcccgggttggccacggccgccacactgctccgctctgctctctgaaggcattgcctgcgcggcttcttcctccgccggcgtcggtccgcgagttgttggcatggccgccgcagggacgcagctaggccggcttctgggcggcctatggttcctggccgcgttgctaggacgaccgggcgccacggcggcggccgccgggcagccggcggcaccagcggtggccgccgtcgacgggcggcgcgccgtcgcggcgaccggggaggacttcgtgtgcgcgacgttggactggtggccgccggacaagtgcgactacggcacctgcgcctggggccgcgccggcctgctcaacctgtttctctctgtcctctcgcgccgccgcaggatctctccaacaaggtcctgctcaatgccgtcagagccttctcgccgccgctgctgctccgcctgggagggtcgctgcaggacaaggtgatgtacgggtacggcgccgggcggccgtgcgcgccgttcgtcaggaacgcgtcggagatgcacggcttctcgcagggctgcctgcccctgcgcaggtgggacgacctcaacgccttcttccggagatccggtgccaaggtcgtgttcgggctcaacgcgctcaacggccgcgtcccgttgccggacgggtccatgggagggccgtgggactacaccaacgcggcgtcgctgatccggtacaccgcgaacaagggctaccgaatccatggatgggagcttgggaacgaactgagcggcactggagtgggagctcgggttggcgcggaccagtacgccgcagacgtgatcgccctgaaagcgctagtcgacgacgtgtaccggagcgagccatcgaagccgctggtggttgctcccggaggattcttcgaccaagcctggtttactgagcttgtcgtcaagaccgggccggatctactgagcgtggtcacgcaccacgtctacaatctaggaccaggaagggacacgcacctgatcgacaagatcctcgacccgtcaaccctcgacgggatggtcagcacgttcagcgacctccagcggctgctcaagtccacggggacgtcggctgtggcgtgggtcggggaagccggaggcgcctacaacagcggccgccacctcgtcactgacgcgttcgtgttcagcttctggtttttagatcagcttgggatggcagcgaggttcgacaccaagagctactgcaggcagagtttggtcggcggcaactacggcctgctaaacaccacgacgttccagcctaaccctgactattacagtgctctactgtggcatcgcctcatggggaccaaagttctagcagtaacattcagcggcacgaacaagatccgcgcgtacgcgcactgcgcgagagattcagtaagcaattcagccgcccttttttttcatctcctagagaattcacgctctctcgatgttgcgtccagccaggaatcactctgctgctgatcaacctgagcggcaacgccaccgcgcgggtctcggtgacggcccaaggggctgccgcggcgcacgcgcacaggcacaggcacgacgcgaggaagcacggcggcggcaggaagttccggcacgtgcacgtccccggcttcgccggcggcggcgaggcggcggcgggcgccgtgagacacgagtaccacctcacccccaaggacggcgacctgacgagccaggtcgtgatgctgaacggcagggcgttggccaccgacgcggcggggaacatccccgccctggaggcggtcgaggtggacgcggcgcggcccatcgccgtcacgccctactccatcgtgttcgctcgcgttccgcatttcagtgccccggcgtgtagggtagaccggtagagtagcggtttagatgggtagattcataatgggtttggcgtgattggtgatgatggacagctaagctttccatctggtgagatgaggtgaagtgaggtgcaaggcatctgtcgaaagaaaagggatgcaatgcaatgggggtgagtttgttttctttttacgattggaattgtaaaaggtcgaagaaatttatgatgatcagcgatgggaaagggaaaaactcgttcccgtttgtctttctgttcatggttggaaacaccagtgaaatcgacgtaagagcggtactaacgaaatttggtgagctcaaggaaagcatcagcttttcaaaaagagcaaaaaaaataacggaaagcatctaagaattactttgcctagaaccaaagaaataccag

SEQ ID NO: 79308 - DNA, 2552 bp, Zea Mays
cgcgtgctaaccgctaaacaggccgccgagcttaccgcgtcatcacgcaccgtgcatggacaggacaggagccagcgagcacggaatggtggtcgcagccgcagagtcgcatcgcacggtggagtggaggtgtcctgcgcgccgcacccccgcgttatcaggctccgatcccatccccgtcccgctctgcctggcctctgtcgcggggtcgcatcgcatgcctccatgccttggctggcagcatttactatttagccgaggtgtgggtgggggcgttggcggcaaccggcaacaccgtcctcccctccccctcctcctcccgcgtgctctcctctcctatcctctctgcccccggtaactacaactgttggagtaggcccgggttggccacggccgccacactgctccgctctgctctctgaaggcattgcctgcgcggcttcttcctccgccggcgtcggtccgcgagttgttggcatggccgccgcagggacgcagctaggccggcttctgggcggcctatggttcctggccgcgttgctaggacgaccgggcgccacggcggcggccgccgggcagccggcggcaccagcggtggccgccgtcgacgggcggcgcgccgtcgcggcgaccggggaggacttcgtgtgcgcgacgttggactggtggccgccggacaagtgcgactacggcacctgcgcctggggccgcgccggcctgctcaacctggatctctccaacaaggtcctgctcaatgccgtcagagccttctcgccgccgctgctgctccgcctgggagggtcgctgcaggacaaggtgatgtacgggtacggcgccgggcggccgtgcgcgccgttcgtcaggaacgcgtcggagatgcacggcttctcgcagggctgcctgcccctgcgcaggtgggacgacctcaacgccttcttccggagatccggtgccaaggtcgtgttcgggctcaacgcgctcaacggccgcgtcccgttgccggacgggtccatgggagggccgtgggactacaccaacgcggcgtcgctgatccggtacaccgcgaacaagggctaccgaatccatggatgggagcttgggaacgaactgagcggcactggagtgggagctcgggttggcgcggaccagtacgccgcagacgtgatcgccctgaaagcgctagtcgacgacgtgtaccggagcgagccatcgaagccgctggtggttgctcccggaggattcttcgaccaagcctggtttactgagcttgtcgtcaagaccgggccggatctactgagcgtggtcacgcaccacgtctacaatctaggaccaggaagggacacgcacctgatcgacaagatcctcgacccgtcaaccctcgacgggatggtcagcacgttcagcgacctccagcggctgctcaagtccacggggacgtcggctgtggcgtgggtcggggaagccggaggcgcctacaacagcggccgccacctcgtcactgacgcgttcgtgttcagcttctggtttttagatcagcttgggatggcagcgaggttcgacaccaagagctactgcaggcagagtttggtcggcggcaactacggcctgctaaacaccacgacgttccagcctaaccctgactattacagtgctctactgtggcatcgcctcatggggaccaaagttctagcagtaacattcagcggcacgaacaagatccgcgcgtacgcgcactgcgcgagagattcaccaggaatcactctgctgctgatcaacctgagcggcaacgccaccgcgcgggtctcggtgacggcccaaggggctgccgcggcgcacgcgcacaggcacaggcacgacgcgaggaagcacggcggcggcaggaagttccggcacgtgcacgtccccggcttcgccggcggcggcgaggcggcggcgggcgccgtgagacacgagtaccacctcacccccaaggacggcgacctgacgagccaggtcgtgatgctgaacggcagggcgttggccaccgacgcggcggggaacatccccgccctggaggcggtcgaggtggacgcggcgcggcccatcgccgtcacgccctactccatcgtgttcgctcgcgttccgcatttcagtgccccggcgtgtagggtagaccggtagagtagcggtttagatgggtagattcataatgggtttggcgtgattggtgatgatggacagctaagctttccatctggtgagatgaggtgaagtgaggtgcaaggcatctgtcgaaagaaaagggatgcaatgcaatgggggtgagtttgttttctttttacgattggaattgtaaaaggtcgaagaaatttatgatgatcagcgatgggaaagggaaaaactcgttcccgtttgtctttctgttcatggttggaaacaccagtgaaatcgacgtaagagcggtactaacgaaatttggtgagctcaaggaaagcatcagcttttcaaaaagagcaaaaaaaataacggaaagcatctaagaattactttgcctagaaccaaagaaataccag

SEQ ID NO: 79309 - DNA, 2548 bp, Zea Mays
cgcgtgctaaccgctaaacaggccgccgagcttaccgcgtcatcacgcaccgtgcatggacaggacaggagccagcgagcacggaatggtggtcgcagccgcagagtcgcatcgcacggtggagtggaggtgtcctgcgcgccgcacccccgcgttatcaggctccgatcccatccccgtcccgctctgcctggcctctgtcgcggggtcgcatcgcatgcctccatgccttggctggcagcatttactatttagccgaggtgtgggtgggggcgttggcggcaaccggcaacaccgtcctcccctccccctcctcctcccgcgtgctctcctctcctatcctctctgcccccggtaactacaactgttggagtaggcccgggttggccacggccgccacactgctccgctctgctctctgaaggcattgcctgcgcggcttcttcctccgccggcgtcggtccgcgagttgttggcatggccgccgcagggacgcagctaggccggcttctgggcggcctatggttcctggccgcgttgctaggacgaccgggcgccacggcggcggccgccgggcagccggcggcaccagcggtggccgccgtcgacgggcggcgcgccgtcgcggcgaccggggaggacttcgtgtgcgcgacgttggactggtggccgccggacaagtgcgactacggcacctgcgcctggggccgcgccggcctgctcaacctggatctctccaacaaggtcctgctcaatgccgtcagagccttctcgccgccgctgctgctccgcctgggagggtcgctgcaggacaaggtgatgtacgggtacggcgccgggcggccgtgcgcgccgttcgtcaggaacgcgtcggagatgcacggcttctcgcagggctgcctgcccctgcgcaggtgggacgacctcaacgccttcttccggagatccggtgccaaggtcgtgttcgggctcaacgcgctcaacggccgcgtcccgttgccggacgggtccatgggagggccgtgggactacaccaacgcggcgtcgctgatccggtacaccgcgaacaagggctaccgaatccatggatgggagcttgggaacgaactgagcggcactggagtgggagctcgggttggcgcggaccagtacgccgcagacgtgatcgccctgaaagcgctagtcgacgacgtgtaccggagcgagccatcgaagccgctggtggttgctcccggaggattcttcgaccaagcctggtttactgagcttgtcgtcaagaccgggccggatctactgagcgtggtcacgcaccacgtctacaatctaggaccaggaagggacacgcacctgatcgacaagatcctcgacccgtcaaccctcgacgggatggtcagcacgttcagcgacctccagcggctgctcaagtccacggggacgtcggctgtggcgtgggtcggggaagccggaggcgcctacaacagcggccgccacctcgtcactgacgcgttcgtgttcagcttctggtttttagatcagcttgggatggcagcgaggttcgacaccaagagctactgcaggcagagtttggtcggcggcaactacggcctgctaaacaccacgacgttccagcctaaccctgactattacagtgctctactgtggcatcgcctcatggggaccaaagttctagcagtaacattcagcggcacgaacaagatccgcgcgtacgcgcactgcgcgagagattcagaatcactctgctgctgatcaacctgagcggcaacgccaccgcgcgggtctcggtgacggcccaaggggctgccgcggcgcacgcgcacaggcacaggcacgacgcgaggaagcacggcggcggcaggaagttccggcacgtgcacgtccccggcttcgccggcggcggcgaggcggcggcgggcgccgtgagacacgagtaccacctcacccccaaggacggcgacctgacgagccaggtcgtgatgctgaacggcagggcgttggccaccgacgcggcggggaacatccccgccctggaggcggtcgaggtggacgcggcgcggcccatcgccgtcacgccctactccatcgtgttcgctcgcgttccgcatttcagtgccccggcgtgtagggtagaccggtagagtagcggtttagatgggtagattcataatgggtttggcgtgattggtgatgatggacagctaagctttccatctggtgagatgaggtgaagtgaggtgcaaggcatctgtcgaaagaaaagggatgcaatgcaatgggggtgagtttgttttctttttacgattggaattgtaaaaggtcgaagaaatttatgatgatcagcgatgggaaagggaaaaactcgttcccgtttgtctttctgttcatggttggaaacaccagtgaaatcgacgtaagagcggtactaacgaaatttggtgagctcaaggaaagcatcagcttttcaaaaagagcaaaaaaaataacggaaagcatctaagaattactttgcctagaaccaaagaaataccag

SEQ ID NO: 79310 - DNA, 1125 bp, Zea Mays
ccacctcgtcactgacgcgttcgtgttcagcttctgatcagcttgggatggcagcgaggttcgacaccaagagctactgcaggcagagtttggtcggcggcaactacggcctgctaaacaccacgacgttccagcctaaccctgactattacagtgctctactgtggcatcgcctcatggggaccaaagttctagcagtaacattcagcggcacgaacaagatccgcgcgtacgcgcactgcgcgagagattcagtaagcaattcagccgcccttttttttcatctcctagagaattcacgctctctcgatgttgcgtccagccaggaatcactctgctgctgatcaacctgagcggcaacgccaccgcgcgggtctcggtgacggcccaaggggctgccgcggcgcacgcgcacaggcacaggcacgacgcgaggaagcacggcggcggcaggaagttccggcacgtgcacgtccccggcttcgccggcggcggcgaggcggcggcgggcgccgtgagacacgagtaccacctcacccccaaggacggcgacctgacgagccaggtcgtgatgctgaacggcagggcgttggccaccgacgcggcggggaacatccccgccctggaggcggtcgaggtggacgcggcgcggcccatcgccgtcacgccctactccatcgtgttcgctcgcgttccgcatttcagtgccccggcgtgtagggtagaccggtagagtagcggtttagatgggtagattcataatgggtttggcgtgattggtgatgatggacagctaagctttccatctggtgagatgaggtgaagtgaggtgcaaggcatctgtcgaaagaaaagggatgcaatgcaatgggggtgagtttgttttctttttacgattggaattgtaaaaggtcgaagaaatttatgatgatcagcgatgggaaagggaaaaactcgttcccgtttgtctttctgttcatggttggaaacaccagtgaaatcgacgtaagagcggtactaacgaaatttggtgagctcaaggaaagcatcagcttttcaaaaagagcaaaaaaaataacggaaagcatctaagaattactttgcctagaaccaaagaaataccag

SEQ ID NO: 79311 - DNA, 343 bp, Zea Mays
ctctgccacaacgagggccgcctcgtctcgagtcgctgaagccatggcgaccacgccgaccactgcaatcctccgcctcactccagccccttctccccgcaccgcgcgccatcctcgctctgctaccttcctccagcccgcgctctccgtttccctctcctactccctccccgactgccgcaaccaccgccttgcggccgcttccaaggacactgctagcagcaaggggcaggaacaagaccaagagcccgcaccgtcggcgccgcaggaaggaggaccagagaaggtaacggaggtgggggcagcatcgcccggggagaagagcccggaggcggtggctgga

SEQ ID NO: 79312 - DNA, 680 bp, Zea Mays
ctctgccacaacgagggccgcctcgtctcgagtcgctgaagccatggcgaccacgccgaccactgcaatcctccgcctcactccagccccttctccccgcaccgcgcgccatcctcgctctgctaccttcctccagcccgcgctctccgtttccctctcctactccctccccgactgccgcaaccaccgccttgcggccgcttccaaggacactgctagcagcaaggggcaggaacaagaccaagagcccgcaccgtcggcgccgcaggaaggaggaccagagaaggtaacggaggtgggggcagcatcgcccggggagaagagcccggaggcggtggcggcggagctgaaggaggtgctgagggcgcggaaggaggcggaggccgccgagggccgcggcgggtggtgggcaggcgtggcgcaggagatgaccgagatcgagtggccggcgcctgggaaggtgttgggcaccaccggcgtggtgcttggggtcatcgcgggctccactgtcgcgctgctgtccgtcaacgccctcctcgccgagctctccgacaccgtcttcgccggacgcggacttcaggacttcttctccggctgacgaagcggcgtgcttcgtgtactctctaggactggaagattatgttacgagagattttggagtcaattctgtaatgcctcat

SEQ ID NO: 79313 - DNA, 2200 bp, Zea Mays
ctaccatatccctgccttgctgtgctcaagggtccggcgtggatcttcaggattgagccacgcatccatacccatgcgttcactggcacctccagagcccccctcgctgtaatcccatgaacctagacatcgcttgatcttttccctgcccatttaagagtaaccaaagggggggagaaaggggagtaaaggagagatccctgcctctgtcgtaagccactttgtgtgacttcaaaacagtattgttgccttcgcttctccagactataccctggaaacgcccaagcctctagccaagtggcttcacgtgtctggtgaccacgtcgccgacgcctcaacctcacgtggccagaacgtagtcgcgccaccgcaaatcgtcgtcgtgtttagtttcatcgtcggccggccaacgtacgacttccccgagcagtttcatgcacccaccaagaacttggactgtcagaattcctagaagaagaagatgatgaaattcaagaagtggtttctgaagaggagtctgcttcagtgcttgctcatcaagtgatgggagccatctaactcggtatttaatagagggatctgaaacctctttattgcaataaggcaagccccggtgcatttaccccttccttgtatttttaaaaagacttttatacacttaagtctagtgaaatgtgcattaagtttataggaattgcttggaaattatttgatgcattgcctaccttaatatccatacctttatagatacttctgatgaagtatcaaaatatgatttacaaaaatgcttagccctgcttagatcttgtggatagaggctatcttttgcaataatgcctagctcaggggttatcccgaggaaggatggcttctacctgcaagaatattttcattgggagcatggtgggatcttactgcaaagttccctataatgctcttttcatcctaaggaacacaaaacaatcctaaggatggaagtacttaactcgagacttgggctaggaacaggtgatgctccacccaggttaattaaggattggatgtatatgtaggcctgtatgatcaaggactatcttaactggccatatgccctggatataggacagggtaagcttgaacccagctattccatacgtgaaaagacaaccgcgcactaggcgtgggagatggtgggagtagcgtgtaccctcctggctagaggctggacggaggagtattgtgctcccggatagggcggaccggttcacattgtggaggatctgtgggaatggttgacatatgcaagggttaagtgctacatatgtcgtgtggttagagatcctcagttgagtaaatcgattcggatcatcgttacatcctcggacaatggagacttgatctctgacctgcaacctaagtcaggatgtaaacattataaataaaaatgatgttgtattgatgagatggtgaaattagactagatgtaactagagtctattaatatttaatctggcgttaaaatattgaaagtaaggactcactttagtaagttatttctgcaaaagtatctaatttgattcttgctaaagccttttccttgattcctatttaaccagcatatccttgagagtcatttttccttagtcgggtaagacttgcgaaaatacactccgtactcagggttttcgaacccatgttgttgtaggtgatgaggagtactctaggtgttcctgtggctggagggcgtttccagttctgaaggaggattagttaggtttatgtatgagctttggaagggttctaccttcctacttttgtatgtaagctttgcactttgagtatatcaggacttgtaataattacaaatctttctagcatgtaaaacttgagttttgaaataaagaatgctttgtaaagtcttccgctctatctccgaagtgtgtttgtatcgaatgtgattactgtaatatacatgaatgtgggagatctctgggataatgagttcaagttgttgaactcgaaagccttgttaagttacctgatacacgtgcataactatctgaggccatcaagacaaggattggtgcatgtgggcctggtaacttgggagggctgccacaacttttatacccaggaggctaggctcggtaggttggttcgctagccagcaggctcttgggggttgttacggatggatctcccatgcaccggtatcttaggc

SEQ ID NO: 79314 - DNA, 2154 bp, Zea Mays
agacatcgcttgatcttttccctgcccatttaagagtaaccaaagggggggagaaaggggagtaaaggagagatccctgcctctgtcgtaagccactttgtgtgacttcaaaacagtattgttgccttcgcttctccagactataccctggaaacgcccaagcctctagccaagtggcttcacgtgtctggtgaccacgtcgccgacgcctcaacctcacgtggccagaacgtagtcgcgccaccgcaaatcgtcgtcgtgtttagtttcatcgtcggccggccaacgtacgacttccccgagcagtttcatgcacccaccaagaacttggactgtcaggaatttgtgagttacaaagcactgaacagagggagaggaatggagcactagaagatgaattcagagaaacgaaaacagaattcctagaagaagaagatgatgaaattcaagaagtggtttctgaagaggagtctgcttcagtgcttgctcatcaagtgatgggagccatctaactcggtatttaatagagggatctgaaacctctttattgcaataaggcaagccccggtgcatttaccccttccttgtatttttaaaaagacttttatacacttaagtctagtgaaatgtgcattaagtttataggaattgcttggaaattatttgatgcattgcctaccttaatatccatacctttatagatacttctgatgaagtatcaaaatatgatttacaaaaatgcttagccctgcttagatcttgtggatagaggctatcttttgcaataatgcctagctcaggggttatcccgaggaaggatggcttctacctgcaagaatattttcattgggagcatggtgggatcttactgcaaagttccctataatgctcttttcatcctaaggaacacaaaacaatcctaaggatggaagtacttaactcgagacttgggctaggaacaggtgatgctccacccaggttaattaaggattggatgtatatgtaggcctgtatgatcaaggactatcttaactggccatatgccctggatataggacagggtaagcttgaacccagctattccatacgtgaaaagacaaccgcgcactaggcgtgggagatggtgggagtagcgtgtaccctcctggctagaggctggacggaggagtattgtgctcccggatagggcggaccggttcacattgtggaggatctgtgggaatggttgacatatgcaagggttaagtgctacatatgtcgtgtggttagagatcctcagttgagtaaatcgattcggatcatcgttacatcctcggacaatggagacttgatctctgacctgcaacctaagtcaggatgtaaacattataaataaaaatgatgttgtattgatgagatggtgaaattagactagatgtaactagagtctattaatatttaatctggcgttaaaatattgaaagtaaggactcactttagtaagttatttctgcaaaagtatctaatttgattcttgctaaagccttttccttgattcctatttaaccagcatatccttgagagtcatttttccttagtcgggtaagacttgcgaaaatacactccgtactcagggttttcgaacccatgttgttgtaggtgatgaggagtactctaggtgttcctgtggctggagggcgtttccagttctgaaggaggattagttaggtttatgtatgagctttggaagggttctaccttcctacttttgtatgtaagctttgcactttgagtatatcaggacttgtaataattacaaatctttctagcatgtaaaacttgagttttgaaataaagaatgctttgtaaagtcttccgctctatctccgaagtgtgtttgtatcgaatgtgattactgtaatatacatgaatgtgggagatctctgggataatgagttcaagttgttgaactcgaaagccttgttaagttacctgatacacgtgcataactatctgaggccatcaagacaaggattggtgcatgtgggcctggtaacttgggagggctgccacaacttttatacccaggaggctaggctcggtaggttggttcgctagccagcaggctcttgggggttgttacggatggatctcccatgcaccggtatcttaggc

SEQ ID NO: 79315 - DNA, 2478 bp, Zea Mays
gtttatttgggtgccgcgtccctgtccgaccaccgggtggtggttagcctccgggttggccgagccaggaaagctaccgctcctcctcttcttctcctccctccctggctccctccctccctctcgtctcctcgccaagaacgcactgagtccattcctcctcttcccctcctatcgcctctctctgcccctctcctccccggagattcctgctcctcccgactcccaagggttatcctattcactctgcctgctgccaaggccaactaggatatcaactaggaggagttgaggaggaatggctgttggcggaactcaaccggtcctcaggaagtacctaggtgccctcaaggacacaacgactgtgagcctggcaaaagtgaacagtgattataaggaattggatattgcaattgtcaaggccacaaaccatgttgagcgtccatcaaaggagaagtacataagagaaattttccattccatttctgctgctaggccacgggcagatgtagcttattgcattcatgcccttgctagacgtctttcgaagacgcgcaattgggcggttgcgctaaagacattgatcgtcattcatcgtgcccttcgggaagttgatcccacttttcgtgaagagcttcttaattatggcagatctaggtcacatatgttgaacatggcctactttaaggatgactctagtgcagaagcttgggactattctgcatgggtgcgcatttatgctttatatttagaggagagactcgaatgtttccgagtgttgaagtatgatgtagaaacagatcctccgaggactaaggatcttgatactgttgatttgcttgatcatctgccacaattgcagcaactcctttttcgtcttcttgcttgccagccacaaggagcgtcatcttacaatgttataatccagcatgcactctcaatggttgctttagagagtgttaagatctacactgcaattagcgatggaacaatcaatctagttgacaagttcttcgagatgcaaaggaatgatgctgttagggcacttgatgtatacaaaagagcaactaaccaggctgaacgactttcagaatttcatgaagtgtgtaaaactatacacattgggcgtggtgagaaattcctgaaaatcgagcagcctccagcatcattcctgcagactatggaggactatgttagagatgctccaacaggtcaaaaacaaaagactatactagcgatagaatacaaaaaagagccagaggaggaagaaaaaccggcctcccctcctcctgctccagaacaggaaccggaacaagagcctgagccagaacccgaaccagtgaaagaggaagcaccagaagccgagccggacttgctgggtctgaacgaaccgagccctgctgcgaccgcgatagaagagcagaatgctttggcgctagcaattgtcccgatagatgatgttccgggagctgctcctacttttgagaacggagtcacaggctgggaactggccctggtgacagcaccgagttcgaccgagaccgccgttgccccaagcaagaaactggccggtggtctggacttgctgacccttgatagcctgtacgacgaggcgaaccggagagcgagccagccggcgagctacaacccctgggatgcaaccgcgtctgccccgatgatgaccaccatggcgccggcgatgcacgatccgttctacgcctcgaacgggtacgcggcgccgcacggcgtgcagatggcggcgatggctcaccaccagcagcagcagcaggttttcatgctgcagcagcagatgatggcgccggcgccggcggtccaccacccgatgcagatgcagcagaaccccgcgaaccctttcggcaaccccttcgcggccgccggcgcgcatccctacggcgccgccggcatgccgctccacgccgggcccggcaacgtctacacggggctgatctgatctagtaccccacgcggccacgcccggtggccagtttcttggttgcgttagcgctactgttgccccaccattcattctttttgtccaagttttcttggtgccattgtgagaaggaaatttgtagcacagacaggcaggcaggcaggtagaggcggtcacggttggttatttataaatagcagcgtcgggtggtgtcctgtacgtaggaggtgagtgcatgtatattatacaacatagagtttggccacttgttcgtgtgcacatgagagtcgattctcgtggcggcgagactcgtcaggacggcccgtcgagattgagattggattattcttggtgaacatacgctggatacggttgaataatgcaggcattcttttttttagcagctgactttgtgtgatccaatggaaacaagtagatcgacatctcatcatgaagctggaaagtcgatcctgctcttgccggtgctagtgtgtggccccgtctttcccctcggcgtgcgcttg

SEQ ID NO: 79316 - DNA, 2451 bp, Zea Mays
gtccctgtccgaccaccgggtggtggttagcctccgggttggccgagccaggaaagctaccgctcctcctcttcttctcctccctccctggctccctccctccctctcgtctcctcgccaagaacgcactgagtccattcctcctcttcccctcctatcgcctctctctgcccctctcctccccggagattcctgctcctcccgactcccaagggttatcctattcactctgcctgctgccaaggccaactaggatatcaactaggaggagttgaggaggaatggctgttggcggaactcaaccggtcctcaggaagtacctaggtgccctcaaggacacaacgactgtgagcctggcaaaagtgaacagtgattataaggaattggatattgcaattgtcaaggccacaaaccatgttgagcgtccatcaaaggagaagtacataagagaaattttccattccatttctgctgctaggccacgggcagatgtagcttattgcattcatgcccttgctagacgtctttcgaagacgcgcaattgggcggttgcgctaaagacattgatcgtcattcatcgtgcccttcgggaagttgatcccacttttcgtgaagagcttcttaattatggcagatctaggtcacatatgttgaacatggcctactttaaggatgactctagtgcagaagcttgggactattctgcatgggtgcgcatttatgctttatatttagaggagagactcgaatgtttccgagtgttgaagtatgatgtagaaacagatcctccgaggactaaggatcttgatactgttgatttgcttgatcatctgccacaattgcagcaactcctttttcgtcttcttgcttgccagccacaaggagcgtcatcttacaatgttataatccagcatgcactctcaatgagagtgttaagatctacactgcaattagcgatggaacaatcaatctagttgacaagttcttcgagatgcaaaggaatgatgctgttagggcacttgatgtatacaaaagagcaactaaccaggctgaacgactttcagaatttcatgaagtgtgtaaaactatacacattgggcgtggtgagaaattcctgaaaatcgagcagcctccagcatcattcctgcagactatggaggactatgttagagatgctccaacaggtcaaaaacaaaagactatactagcgatagaatacaaaaaagagccagaggaggaagaaaaaccggcctcccctcctcctgctccagaacaggaaccggaacaagagcctgagccagaacccgaaccagtgaaagaggaagcaccagaagccgagccggacttgctgggtctgaacgaaccgagccctgctgcgaccgcgatagaagagcagaatgctttggcgctagcaattgtcccgatagatgatgttccgggagctgctcctacttttgagaacggagtcacaggctgggaactggccctggtgacagcaccgagttcgaccgagaccgccgttgccccaagcaagaaactggccggtggtctggacttgctgacccttgatagcctgtacgacgaggcgaaccggagagcgagccagccggcgagctacaacccctgggatgcaaccgcgtctgccccgatgatgaccaccatggcgccggcgatgcacgatccgttctacgcctcgaacgggtacgcggcgccgcacggcgtgcagatggcggcgatggctcaccaccagcagcagcagcaggttttcatgctgcagcagcagatgatggcgccggcgccggcggtccaccacccgatgcagatgcagcagaaccccgcgaaccctttcggcaaccccttcgcggccgccggcgcgcatccctacggcgccgccggcatgccgctccacgccgggcccggcaacgtctacacggggctgatctgatctagtaccccacgcggccacgcccggtggccagtttcttggttgcgttagcgctactgttgccccaccattcattctttttgtccaagttttcttggtgccattgtgagaaggaaatttgtagcacagacaggcaggcaggcaggtagaggcggtcacggttggttatttataaatagcagcgtcgggtggtgtcctgtacgtaggaggtgagtgcatgtatattatacaacatagagtttggccacttgttcgtgtgcacatgagagtcgattctcgtggcggcgagactcgtcaggacggcccgtcgagattgagattggattattcttggtgaacatacgctggatacggttgaataatgcaggcattcttttttttagcagctgactttgtgtgatccaatggaaacaagtagatcgacatctcatcatgaagctggaaagtcgatcctgctcttgccggtgctagtgtgtggccccgtctttcccctcggcgtgcgcttg

SEQ ID NO: 79317 - DNA, 2248 bp, Zea Mays
tgagtgcgctgtgcgggctacgctctcttaggccaactaggatatcaactaggaggagttgaggaggaatggctgttggcggaactcaaccggtcctcaggaagtacctaggtgccctcaaggacacaacgactgtgagcctggcaaaagtgaacagtgattataaggaattggatattgcaattgtcaaggccacaaaccatgttgagcgtccatcaaaggagaagtacataagagaaattttccattccatttctgctgctaggccacgggcagatgtagcttattgcattcatgcccttgctagacgtctttcgaagacgcgcaattgggcggttgcgctaaagacattgatcgtcattcatcgtgcccttcgggaagttgatcccacttttcgtgaagagcttcttaattatggcagatctaggtcacatatgttgaacatggcctactttaaggatgactctagtgcagaagcttgggactattctgcatgggtgcgcatttatgctttatatttagaggagagactcgaatgtttccgagtgttgaagtatgatgtagaaacagatcctccgaggactaaggatcttgatactgttgatttgcttgatcatctgccacaattgcagcaactcctttttcgtcttcttgcttgccagccacaaggagcgtcatcttacaatgttataatccagcatgcactctcaatggttgctttagagagtgttaagatctacactgcaattagcgatggaacaatcaatctagttgacaagttcttcgagatgcaaaggaatgatgctgttagggcacttgatgtatacaaaagagcaactaaccaggctgaacgactttcagaatttcatgaagtgtgtaaaactatacacattgggcgtggtgagaaattcctgaaaatcgagcagcctccagcatcattcctgcagactatggaggactatgttagagatgctccaacaggtcaaaaacaaaagactatactagcgatagaatacaaaaaagagccagaggaggaagaaaaaccggcctcccctcctcctgctccagaacaggaaccggaacaagagcctgagccagaacccgaaccagtgaaagaggaagcaccagaagccgagccggacttgctgggtctgaacgaaccgagccctgctgcgaccgcgatagaagagcagaatgctttggcgctagcaattgtcccgatagatgatgttccgggagctgctcctacttttgagaacggagtcacaggctgggaactggccctggtgacagcaccgagttcgaccgagaccgccgttgccccaagcaagaaactggccggtggtctggacttgctgacccttgatagcctgtacgacgaggcgaaccggagagcgagccagccggcgagctacaacccctgggatgcaaccgcgtctgccccgatgatgaccaccatggcgccggcgatgcacgatccgttctacgcctcgaacgggtacgcggcgccgcacggcgtgcagatggcggcgatggctcaccaccagcagcagcagcaggttttcatgctgcagcagcagatgatggcgccggcgccggcggtccaccacccgatgcagatgcagcagaaccccgcgaaccctttcggcaaccccttcgcggccgccggcgcgcatccctacggcgccgccggcatgccgctccacgccgggcccggcaacgtctacacggggctgatctgatctagtaccccacgcggccacgcccggtggccagtttcttggttgcgttagcgctactgttgccccaccattcattctttttgtccaagttttcttggtgccattgtgagaaggaaatttgtagcacagacaggcaggcaggcaggtagaggcggtcacggttggttatttataaatagcagcgtcgggtggtgtcctgtacgtaggaggtgagtgcatgtatattatacaacatagagtttggccacttgttcgtgtgcacatgagagtcgattctcgtggcggcgagactcgtcaggacggcccgtcgagattgagattggattattcttggtgaacatacgctggatacggttgaataatgcaggcattcttttttttagcagctgactttgtgtgatccaatggaaacaagtagatcgacatctcatcatgaagctggaaagtcgatcctgctcttgccggtgctagtgtgtggccccgtctttcccctcggcgtgcgcttg

SEQ ID NO: 79318 - DNA, 2290 bp, Zea Mays
tggcctcgtccgccatttctggaatcgtggacgcgtgactggaattggatccagctagcctctcgtggatttggccaactaggatatcaactaggaggagttgaggaggaatggctgttggcggaactcaaccggtcctcaggaagtacctaggtgccctcaaggacacaacgactgtgagcctggcaaaagtgaacagtgattataaggaattggatattgcaattgtcaaggccacaaaccatgttgagcgtccatcaaaggagaagtacataagagaaattttccattccatttctgctgctaggccacgggcagatgtagcttattgcattcatgcccttgctagacgtctttcgaagacgcgcaattgggcggttgcgctaaagacattgatcgtcattcatcgtgcccttcgggaagttgatcccacttttcgtgaagagcttcttaattatggcagatctaggtcacatatgttgaacatggcctactttaaggatgactctagtgcagaagcttgggactattctgcatgggtgcgcatttatgctttatatttagaggagagactcgaatgtttccgagtgttgaagtatgatgtagaaacagatcctccgaggactaaggatcttgatactgttgatttgcttgatcatctgccacaattgcagcaactcctttttcgtcttcttgcttgccagccacaaggagcgtcatcttacaatgttataatccagcatgcactctcaatggttgctttagagagtgttaagatctacactgcaattagcgatggaacaatcaatctagttgacaagttcttcgagatgcaaaggaatgatgctgttagggcacttgatgtatacaaaagagcaactaaccaggctgaacgactttcagaatttcatgaagtgtgtaaaactatacacattgggcgtggtgagaaattcctgaaaatcgagcagcctccagcatcattcctgcagactatggaggactatgttagagatgctccaacaggtcaaaaacaaaagactatactagcgatagaatacaaaaaagagccagaggaggaagaaaaaccggcctcccctcctcctgctccagaacaggaaccggaacaagagcctgagccagaacccgaaccagtgaaagaggaagcaccagaagccgagccggacttgctgggtctgaacgaaccgagccctgctgcgaccgcgatagaagagcagaatgctttggcgctagcaattgtcccgatagatgatgttccgggagctgctcctacttttgagaacggagtcacaggctgggaactggccctggtgacagcaccgagttcgaccgagaccgccgttgccccaagcaagaaactggccggtggtctggacttgctgacccttgatagcctgtacgacgaggcgaaccggagagcgagccagccggcgagctacaacccctgggatgcaaccgcgtctgccccgatgatgaccaccatggcgccggcgatgcacgatccgttctacgcctcgaacgggtacgcggcgccgcacggcgtgcagatggcggcgatggctcaccaccagcagcagcagcaggttttcatgctgcagcagcagatgatggcgccggcgccggcggtccaccacccgatgcagatgcagcagaaccccgcgaaccctttcggcaaccccttcgcggccgccggcgcgcatccctacggcgccgccggcatgccgctccacgccgggcccggcaacgtctacacggggctgatctgatctagtaccccacgcggccacgcccggtggccagtttcttggttgcgttagcgctactgttgccccaccattcattctttttgtccaagttttcttggtgccattgtgagaaggaaatttgtagcacagacaggcaggcaggcaggtagaggcggtcacggttggttatttataaatagcagcgtcgggtggtgtcctgtacgtaggaggtgagtgcatgtatattatacaacatagagtttggccacttgttcgtgtgcacatgagagtcgattctcgtggcggcgagactcgtcaggacggcccgtcgagattgagattggattattcttggtgaacatacgctggatacggttgaataatgcaggcattcttttttttagcagctgactttgtgtgatccaatggaaacaagtagatcgacatctcatcatgaagctggaaagtcgatcctgctcttgccggtgctagtgtgtggccccgtctttcccctcggcgtgcgcttg

SEQ ID NO: 79319 - DNA, 1558 bp, Zea Mays
cctcttcctgctgccgcaagtcccaatcattgcctcccccaccaagcccacgtcacttcaccccacccacaccacgccaagtcgccaaggcaaggccccccagcgaaagcaaagggggaagcaaccccccgcaccgcgaggccgcaaaagcaatcgcgaaagcgagcgcgaggcgagtcggccggcgaagggggcggatggcgcgcgggctgcgcggcgtccgcgacgacctatccgagctggggcgccacctgctcgacatcgcctgcttcctgcacccgctcctcaacccggcccacaccgactccccgtccccgcaccccgccgcgccgccgtcaccgtcgctcctcgcgggcatcctctccgacctcgccgagatcggcggctccttccgcggcggcttctcccgctcctcgccggcgcccgaccaccccgcccccgacgcgctcgagtcacagcaggccgcctcgtccccgtccccgcgtccgcctcctcctgctgctgccgaccagatcgcagatgatgtcgtgggagcagcgcgtgccctcgccgcgcggcccgaggcgtggatcgacttccccgtgctcgccctagatgagggttctgtaatttctggtatccaaagagatcatatggaatccattgaaaaacttgtcccagatttagcatctctacggggtaggctctgtccttcttacatggatgaagacatattctggaagatttactttaggttgcttgagtcaaacataaatgagcatagttctgaggaagatatccggagcgtgccaaattctgtacatcacaacaatgagatagagtctgattctccacctcacgtctgtgagatagaaagtgtgaaaagcaaccaagaagggtaccaatcttcggatggtcgtgctttccccaagacaagatctgagcgaagcattgaccaatgggtatttgcaaagtcaaaatctgaagaaagcatggatcagtggtctgaaataccttcagatgtggaatccttcagagaaggtaaaaggtacctcagtagcgaggagctgagtgacgttgatagtgccaacgttgttgtcatggacaaatacatggattcactcctctctgaccggaggaaccttccctacgctagctcctcggtgcgccgggattcagtcagacgaaaacctgcttcgtccgccgattacagccgccgacctccgcagccaactccacctgcatcgctgtcaaagaaggaatcgtgggatgtcattgaagattcggagttcgatatacttgacagttagtaattgagatctttgcgatctcaaggctgtttatccttctattttcttccatgtttccccacacttcacctcgtttgtaaatgtggacgtgcaggtggcgtcagtgatagtgggaaaggactaatgttctttttaccaatatattataacagtgtgtgcatataaatcttctgagctcgcaagctgtgagcctcccaggttaaaagtgtttatatgttggcatcattgtttgtttcagatattttattgcagaacagaaaattgccacc

SEQ ID NO: 79320 - DNA, 1880 bp, Zea Mays
cttccacaatcctgctgacattgttgttctgcaccagcacagcacctcaacgaacgatgcgcgatgccttctgcttcttcgtcctcgtcttcctccctctacatcattggcgactcctcgcgtctccgtgacgaccccatcatcgaggtcggtgacatggacgaggacggcagcagcggcggcgcgctctcggggaagtatggagtaccggagcagtactcggcggtcctccccgccggccaccagcgcgcgtgttcgccccccgggtccgccgtctccgtgtacgcgcacgcgctggaggccggcatgcgcgtcccgctgcacggcttcttctgcgaggtgctcgcccacttcggcgtcgcgccgagccagatcgcgcccaacgggtggcgcgccatggccggcttcgtcgtcctctcccactccgccggcgtggccccgtctctccccgtgttccggcacttcttctcactgtgcgcgttcaagctcaaggggtggtactacttccgtggcaaggacgccgccggcttgctcttcaaggggatgccgctttccattgctgggtggaaggaggccttcttcttcctcaagtcgccgacgccgtggccgtgccccgtgaagtggggcgggctgtccatgggctccactgttgagccggcgctcaccagagaggagcagagcgtggccaagaagctgctccgtgttcacggtgcggcagtcgatatcatgacgtatctttccgagagcaatcttgctgctgcaacgattgctggttcatcagcgaagccgccgccgccgccgattggtactacaagcagtgctagtgccaaaggaatggacccttgcgtctacgacatgatgaagaatctgcgggcggcaaaggccgcgcaggcgtcgggagtgacggtgaagactgagcccagcagcgatacgccgtcgtcctgcaaaaagaggaaggtggtggaggatgccacgaaacaggatccgccgcgccccgagccaccgcattattcccctccgggcttcttctccgcgcacaagtcaccgaaggttacccgtgagcctgacggcggcgccacctccgactgggagcgggcgcggcggatgctacagagcatcgtcacgccggcgctggagcagacgttctcggtggcgaagccctccgacgtcatcgcctcgagctacacgacagcgctacaggccgcgaactacgcgtcgttctcgctgggctacgcgctggagctcgaggataagctcgcggcaagggagcgcgaggcggacgcgctgcggcgggagctgtcgcaggccaaggccgagctcgccggcgcgaagaaggcggctgcggagggggtgaggggcgccagggaggctgccgtgcgcgacttccggggctccacggagcaggtggtccggttcgcggagcacgcgttggccgggtacgagaagggaatggatgatatgaagcgagccgtgctgcgcaggtacccgcacctcgacccggagcagctcgtcgtgccggcggacggcggcggagctcagtaattagctcgtggcagataagattttttggcgtgccggtcccctaactaacctcaggatcaggcagcgtttggttaaatggacctttgatgtatccagagccaagtagatagccatcagacgttaaacttgcatatatatttctgtacgtgcatgaccttggttttcagtggtctacttggctggatgcaaaatatgatcaacagacattatcagtggtctacttattggactatggaaaacagacattggcctattgttttacttcgaactcctttcttttcacttgtcaaacatgggcgctttgaagcatccggtctttgtcgtgcaaaacaaagaaa

SEQ ID NO: 79321 - DNA, 1055 bp, Zea Mays
cattattcagatttcataataccatatatcgtagtacccaacccccatggatcctaattatggagagtggaatttctctgagatcaagatagcgaaagctctcattgctagccacaatgccaagagtagctattctagtgacatgaacaataagcaaactgacattatagacatgctccaagcaaggtttcccacaaaagagaagcataaggtaaccaaactgtatgttgatctcatgttggagaagatgcagatgatattgagtggcaaccaacatgcaacaatgggtaagaagcttgtgaatgacaagtttgggatgtcgatagaggatccagccatagatttcatgggtggtgatttagtggagaaaaggacggccaaaaggaaggcaagggaggatatgaatacccacctagattctcagaaggagaggcggtaccgaaggttttggaccatagacgaacacagcgactggaagaacatctcaaagcactttgttaccactaggacgccaatgcaaatctctagccatgcccaaaagtatttccataggatggagaacattgctaggaggcagcggagcagcatcaatgacattgtcctccacgatgatgaacccagggtgcaaagtaatgattctagcctacagaggttcaccttcaccagtggaacctacaacccaaatcattatggctctagcagccaatttgtcgccatgagtaacattgccaagcatatgtggtttccatctgtatgttgtattgaccaagagagcaccagcaacaaccaaatcactaccttagatagaggtgggtctggtggttcttgtgtggctctagaggtgcagggggttgggagcaaggcaaaactaattagtgattaggagggagattttcttgttggtcaatggatgatgatgctgatgatgaaataggtgttacatctagccaagtaccctatgattcttggcgacctattagttcatcatatacatgtgaattaaatgttatatccaatagtagggagggcacaatttcgtcacaatgaaacctttt

SEQ ID NO: 79322 - DNA, 76 bp, Zea Mays
catcgccggcgccggcgacaagggttccggagttggagctgtcgacgagaagatgcgagttgcgggaacgagcgag

SEQ ID NO: 79323 - DNA, 5413 bp, Zea Mays
cgtagatcaaaaggtataccggtcgatgatagattctttactttacttatgtgcatctcgaccggacattatgctttccgtatgcatgtgtgcaagatccaagtcgatcctaaggaagctcaccttagggccgtaaaacaaatcttgagatatttagtttatactcctaagtttgggctttggtaccctcagggttccacatttgatttaattggttatttggatgccgattgggcagggtgtaaaattaatagaaagagcacatcggggacttgccagttcttgggtaaggactctgtctgtctcgggcttcaaagaagcaaaattctgtagctctttctaccgctgaagccgagtatattgtcgcaggtcattgttgcgcgcaattgctttggatgaggcaaaccctttagtgactatggttacaaattaaccaaagttcctcttctatgtgataatgagagtgcaatccgcatggcggataatcccgttgagcatagccgcactacacacatagtcattcggtatcattttctaagggatcaccaacaaaagggggatatcgagattgcatatattaactccaaagaacaattagctgatatctttaccaagccactagatgaacaaacatttaacaaacttaggcatgagctaaatattcttgattctcggaatttcttttaatgttttgcacacatagctcattaatatacctttgatcgtatctcttttatatgctatgactaatgtgttttcaagtgtatttcaaaccaagtcatagattgaaagggaattagagtcttcggcgaagacaaaggcttccactccactccatcaaattattcaacctttgccatcgctccacgcaactctccaactttggtataatcttcactcttatgctatttaccatagggagagaaaataaaaagggcttatatttcactcaagtatccgtttttggcgattcatgccaaagggggagaaagtattagcccaaagcaaaaggaccgcaccaccaccaattttcaaaaacttgagttaagaaaagatttttcaattgatgatttttcaatcggtatcttattcttgataaaatttcaaattggtacaacctcttcaaaactaatatctaaaaccctcttgaacactaagagtaggattttattgagggcgagttttgtttagtcaaaggaaaagcatttgaaacagggggagaaaatttcaaatcttgaaaatgcttctcacaatcttattcatttacctttgactatttgcaaaaggactttgaaaagaatttacaaaagaatttgcaaaaacaaaacatgtggtgcaagcgtggtccaaaatgttaaaaataaagaaatcaatccatgtgcatcttatgagaaattattggttcaattcttagtatcctttgcacttacattatgcaaactagttcaattatgcacttctatatttgctttggtttgtgttggcatcaatcaccaaaaagggggagattgaaagggaaataggcttacaccttttcctaattgattttggtggttgaattgcccaacacaaataattggactaactagtttgctctagattatgagttctacaggtgccaaaggttcacaactaaccaataaaaagaccgaaaaatgattcaaataaagagagcaaaagtcagccgaagtgtgccctggtctggcgcaccggacaatgtccggtgcaccagggactccaactccgaattgctcaccttcggaaattctggaggccgctccgctataattcaccggactgtctggtgtagcaccggacagtgtccagtgtagcaccggacagtgtctggtgacgcaccggactgttcggtgtgccagcagagcaacagctacttcgtgccaacagttgtctgcagaacgcattgaatgcgctacagtgcgcgccagagtcagagcagagactgatggcgcaccggacagtaaacagtgcctgtccggtgcaccaccggactgtccggtgcaccagaagacagaagctccaacggtcggaatccaacggccaggtgacgtggcaggcgcaccggatagtgtccggtggcgcaccggactgtccggtgcgccatgcgacagcagccttcaccaaacggctagtttggtggttggggttataaatacccccaaccacccaccattcagtgcatccaagttttccaacttctcacaccttacaagagctatagcattcaatacaagacacaccaaagagatcaaatcctctcccaagtccttagttcattccaaatcaaatagtgactagtgagagagtgacttgtgttcatttgagctcttgcgcttggattgcttctttttctcattctttcttgtgatcaacttaattgtaaccaaggcaagagacaccaattgtgtggtggtccttgcggggactttgtgtcccgtttgattgagaagagaagctcactcggtctaagtgaccgtttgagagagggaaagggttgaaagagacccggtctttgtgaccacctcaacggggagtaggtttgcaagaaccgaacctcggtaaaataaatccttgtgtctcactctttatttgctcacgatttgtttttcgccctctctctcggactcgtttatatttctaacgctaacccggcttgtagttgtgcttaagtttataaatttcagattcgccctattcaccccccccccctaggcgactttcaagtcccaacaaagtatgttacgctcatcaaggacatgtatgacaaggttatgactagcgtctgaacaactgatggtgatacaaatttttcccgattaacataggactacatcaaggttcagctttgagcccttatctatctgccttagtgatagatgaggtcatgagggatatacaaggagatatctcttagtgtatgcttttcgctgacgatgtagttctagtagatgaaagtcgggaaggagtaaatagaaagctagagttatggcatcagagtatcagaccctagagtcaaacggatttagaattagcaagactaaaacagagtatatgagatgtgactttggtactacaattagtgaggatggagatgtaagcttgagaggccaggtagtaccaaaggacaccttccgttatttgggatcgatgctacagagagatggtgatattaatgaagatgttagccataggatcaaagcagggtggatgaaatggcgtcaagcatcgggaattttatgggaaagagagtgccacagaagttgaaaagcaaattctataggacggcgattaggcctgctatgttatatggggctgagtgttggcctactaagagacgacatatccaacagctaagtttcgcagagatgtgtatgttgcgttggatatgtaggcacacaagattggatcgagtgagaaacgatgtcatatgcggtcggctaggagtagcgccaattgaagaaaagcttattcaacaccggttcagatggtttgagcatgtccaccagagaccccagaggcaccggtgcacagaggcatcataagacgggacaataatgtgaagagagttagaggacggccaaacttggcatgggaggaggcaatcaaaagggaattgaaggaatggaatatcccaatggagttgtgtttggatagaaatgcttggaaagaagctatccacgtgcccgaaccgtgattagttgtttttccttttagtgatttcaaaagcttttcctctcccctttctctctatttctctttttggtgtcatcttgttggattttaactctagcttaccctaactttcttgggactaaaaggttatgttaatgttgatgtgatatttattaggtggcctggtgtagtggtgagagttgtcttaccgagtcaccaggccacgggttcaaagcctctccatatttgcgagggaaagcttgcctcggcttatcccttccctagaccccatttaagtgtgaacctctagcacgtactatgtctatccttttttatatttattggacggatattaatcttctgaaccctatagtcaatggcgaatactttatgtgcaatagattagtatattaccttgcacaaagtacgaaccaattcctgaattcattttgcaggatttttgcaaagaccctataatattatgtgattcgcatgttcaaaagagttcttatttcgacaccagctctacttccaacttcccgagaggaaggtgtatgggacatgttattctcaattttttctactttggtccatctatagaagacacttattcatactattatggatattcaaaatggtgatgttaaggacatgtttggtttgaggaactaaagattagttcctctattttagtctcatttagtccctaaattgtcaggggactaaaacagagactaaaatgtttgtctctagtccctcaaggggtgactgaaagggactaaaccatattaatttcactttttatatttcctttatttcagttgcactaatgacgggagaatgctaagtatattttggtcctcttattattcatttaatgtgtcctgaatactcgtgacataacatactctagcttcatttgaatcattgggtgtaattacaagagtccttaaggctgcttgtcgtcaggcacaagtgccacggaacttcaacaattttctttgttccaatgtcaacaccaatcaagatagttctcaatttaaaaatattgaaggcataactgaggacgctcttatatgtacagagttagctttgaacctctttatggaatatctcattatatcgatagatggaagaattctcgttttacacgatgttgattgtattgattgtttatttgacttgttccatgaacagaacattcgaaaacatgtgctggagcaagttatttcctaagggtatacctatgcttttcaccatgtacatgcgtcgtgccccgatgccccacttggcgagtccaactagagagaaatgtgttgagatacaggatctgcacaagggagttccttttccttgaagttatttccgttgccaccactataaccaaacaattcctctaccatttcctcattcacattgcaatagttgacggctcttaagggacgatgaggaagaacacaagaatcttgctcagaggttaccaaaacacacaaaaaaaaaggggtaacagccaggagcccaggccaaagcatcaattacatacatgattagatcctgttgtttccatctccctatagtcaaacaatgtggctgtgtaaggaatgaaaatgacttgtaattttgaatggatttaattcttttgcaggggatcattgcactgaccttccgctttctatacgtatgtacacatttatgttctttaaacctaacattgagttcaaac

SEQ ID NO: 79324 - DNA, 2537 bp, Zea Mays
aggagggagcagcgaaaggtgaggaagaatgagagctggcggtgggttacccatggctgcgaagtggcggctgcggcgacggaagcgagtgcggggaggctgagagatgcgtcggtgtcggcggcggcgtcggcggcggctgtaaaaggaaaccctaggtggtgagggggatggcttaatacgcgtgagggttttttgcgtgcgggccgattgggcttcaggaagggtctgtcgtggcccgtgggggacaagattgacgggctttgtcacactggcctcatgttaccgttccaacctatctttacaacgctctcgctctcggtggatcacgagtgagaattgagattcacggattaatgaaagaaaacgatggagaacagaggccacggaaaccatgtttggcggagacttttgccattgtaaaacgcgacaagttcggcttcaacgaaatagaggcgtagacgaggtcttggatgatttagagattcacacaacgcacatacgccgatatggacttgagctctctcttagacgcgttcgacagtgattaatcctccaccgtgaggatcagtcagggcagccaccgttcccgtcttcagcgccgttactgctcgggtcgcagttccaccgctaccgccctgccccgccgacgccgacaccgagcaccccttccagccggacgaagaagaggacgcagtcaaacaacaccttctcgattctccgctcgaggccgccttcctgcacctcaccctcctccgtctcgacgccaacctttgcgacgaagtggtccgccgcggctcccacctcctcttcttccacgggggcggcgcgaacggtaccgccactccccctgtgcagacgctgctgctagcgacagcgggccgcagcaggagaacctgagcgtgccggattcgtccgtgccaaatgcgaagagagcgaggcggaggatgaccaaattggccgtcgcggtcgctgccgggtctgtcctcgccgcgcttcttgtctacgccatgattgcgatgaagaggctggacgccgccgagattggcccagcagcacgggaagcagaggcgttcgagcagaacatggatgttgttggccgactgcgccatccgaaccttgtaccactccgagcattcttccaggcaaaggaggagcggctgcttgtgtatgatggtcgccgaatgagcttctgctgcagctacgacagctgctcgcgcggcgtcgtacgagtcagctactcgcgcggcgctggagctccgggcgcgggctctcctcgcgcaaccgtgacgtcgccgacatgctctgcgactacatccccagctactgcgccaagtcgtgctcggccgacgacgccaccaccgcctcgtcctcctcatcctgctcgtctggctccgttcagctcacgcggcattgggcggccttctttcattacatccaccaccgattcaacgcggtgtccagatcgaatctagactccactaattttatgggcacggaagagccacgtggagtagagtcccgtcagaacttctcgaacaggcacaagaggtgttctgttccggaaattatcgaccgatggctcacgcactagcagcagcagctcggaaccgaaatctaaataaaagtcctgcccacgctcttcgccgacttcgacgctgcgccgcacttctcctgcgtcgtcacggagttctgccccggcggggacctccactcgctccgccaccacatgcccaaccgccgcttcttgcccccgtcgaacctgctggcgcccgccaatacaagggcggagtccgtgtcgcagctgctgccgcacgtgaagctcctccgccgccgccgcggtggcggcgctggacgccggcctccccggcgaggccgtgcgccatttcaacaaggtgctcgacacgcgccgcagcgtgctgtcgcaccccttcgccacggcctgcctcgacgagctgtccatcatgatgccattggagaggaagaagagagaaggagagagctcaccggagataggagtggcggctacagcactgacggccatgcagacggaaaccgtgcccctgcagactgattcggacggaggaggcttaatagttgtcctcagcgtctataagagattacgactagcgagcggctgctctgtctgtaaaccctgagtgtaccagtgtatttccggcgccaccaccgaagatccacttcctgagcccggggagcgggatgagaaccgattttcacctcgggttcccggtggaagtagcaatatatcctgggctcgtactgtcagactgatacagccgtcggacccaggccagccagaaccagaggccacgaccgacgttggaaacgaacggctctcgcctacttcttcatttgagtgcgaagctgccggcatctgatccttgcttttagaacaaagcggaacaaaccccctgaaaatggcaaaggtgcagggttcgttgttgttgtgtgtgggtgggggtgagtcagaaaatataaacggttccgcttacataacttttacttttctacatggt

SEQ ID NO: 79325 - DNA, 3521 bp, Zea Mays
cgagcccgcgcctgttcgcttcgctccgagccccctccaggcccaagcccgcccatctcccgaccacacacgcgcctattccttcccgccccgccgcgcgccgccacctctacggctccccggcggccatgctgaccgggcgggagagcctggtccgcctcatcggccggcgccgccgctcccctctccccgcttcgctcgtcgccgccctatccttaccctccccttccccctccacctccctcgcccaggcagacgatgggggtggctcgggagaagcggccgggggtgaggctggttcgacgtcgggaggaagccgcgtcgttggcatgggcgcggagtgggtggtctgccccgtctgcggcgattcgatccgagggtcggactactgcgtcaacactcacctcgatatgtgccttacaaggggaaccaaaaggaagttaacacagagcacccttcttaatttccaattcagtaaaaaggtttctgccgagcctacaataaacaatttgaacaatgagtccgagacagaaaatatgaaacagattgatgaaggtttgtcgagtgatcaagcattcttcgcattcgatagtgagattgggagttcaaaggctggcactactatttcatcgcctacctgtatgaatgactcacttggcacttctgagactattacttcctatgcaccttcaaatactgtcttatcagatgcaaaggatgctgtaaatgatggcgcaggggaacttccaacggtggcaacctcttgcagttttgatgaatgcgcagtcatggattctagcaccgttgtagtagttgacactgttatagttggccggaggttccatgagaacattgaattaagagaagatgcagacattacctttatgagagatcctcagaatgctaaggaccctgatgctataaagggtctgaatgtgaggagatgcttggatacttgcctcgagatcttgctaaagttttggctcctctagtggacaagcatcatgttgaatgcgagggatctgtggttggtctgcatgaacagcagtttggcaatgttcccatccagattactatccagaaatgtaaatctgacaatcaaagaaacaatgatccaaattgttgccaatccttatgggaaaatttcgttagcattgtcaaaagagaaaatttccggcgacctcacagtgcaagatatcagacaaattttaatttgatgatagctgatgttatggttaaccatgcacatgtttttagtgatatagaaaaatcatttttagcttcttttaagtcgttatcagatgatgggcaacggcttttcattaggatctacactcgaaaagcactactttgtcttacggaccttcttcagccctcctgcatatttaccgaagaccttcctccacttaaactgcccagatttgcttctggacatttttaagaacactcccattctatgctcattcaattgataaggttgccaccgatccataagattcaaagctttcatattcgagatgccacagtttatatgctgggcattgcaagatggcttttttacaagcttttgacagcagagatctataatcaagcatgggtgtcttacagggccatggttccggaagggcagcatctcatatcaagagatttcagatctggagcatgcagtcatggagttggagttggcaggttatattgacatgctttcttgcaccattgatccttttgaatatgatatgaaggagattcttgatgtgttaagtgttcctgaaatgaaggaaattctcaaggagcttcctaaggataacacaatctgcacacgtcgacatgagcttgttagcacccttctgtcttcataccgtaatggtacctgtgcatcactaccaaaacggatcctaaaatggactggaacctgtataagaatttcgaagatggcagatgaacttctgtggcgtatccagaggctcttttttctaaatggtgatcaagatctttcttcatttctattagtggaatttggtatagtgaagtttccagactatgtttgcagcatctcccatcgcatttttcaagaaagaaatgatctacttgagtacgaagacgtatgaagatgcagtcaggattctaaagacactacttagcacagttgcttgtgatagacggcgaggatattgggcattgaggctatccattgatttggagcatatgggtcgtccaaatgagagcctatccacagctgaaggaggggcaactgatccatgggtccgtgctggttcaaagttcgctctgcaaaggagagttctgcgtttaagcaaacctccacgacgctggaaagttcccagttacgctgattatgttaagagaaatataagagaggtaagcattgaaggaaggccattgaattgcgagacaggagcaaagaatgtattttacggttacgatggggaactttgtggggtagaacagttggctttacaatattatgctgatgaaggtggtggttggcaaggtacccattcggaaggtagcatttggatgactatctttggccttctaatgtgggatgtgatgttttcagacatacaagatgttttccagtctaaattccagacagccccccttgatctgggaacagacgatttttacaaatctagagagaacattgcagaatctcagttgaagaggatacgggacggaatggccgaagagatgctaatcagctcatgggagctacatcaggggacatcctgccagggtgttaactgggcccgttattcgttaactgatctacgggctgttgttgcatgcgttggtggccaccgtttggcatcgctcctccgccatctagccgttgattacaggagctggtcgagtggaatgcccgatctgctgctatggcgtttccttgatgaaagaggtggaggtgaggctaaacttgtggaggtcaaaggacccagggaccagctgtcagagcaacagcgtgcatggattcttgttctcatggattttggatttgacgtggaagtttgcaaagtaagcccggtcaccaagcggagatagttcgcttgctaaatttattctgattattacgatgcaaaatgtatttggttgattagatagaagggcaaatctgtaacgcataagcaatggcattgttgtcgtgttgcactgaagtaacagtcaagctctacttgacatgctatctataactttgagagggaaggatgcatttaattgtctgaatcggcacaagttagaagaggaaattctgataaaattaaatatcgtaggggcaatttctttttacgtttgaggtgaggctcgtaaagcgtacgcatgtccttatacaaaagaacgactgtcacgatgacctgagatgaacaagtacacaacgacgtgcattttctagcttggacagaaagcatgcttttgcaaccaaaggcacacaaagggtgcttcaccacaatttgtgagaattccatgtcccaaagataatcacgacacagatcatccaacgcttt

SEQ ID NO: 79326 - DNA, 3425 bp, Zea Mays
cgagcccgcgcctgttcgcttcgctccgagccccctccaggcccaagcccgcccatctcccgaccacacacgcgcctattccttcccgccccgccgcgcgccgccacctctacggctccccggcggccatgctgaccgggcgggagagcctggtccgcctcatcggccggcgccgccgctcccctctccccgcttcgctcgtcgccgccctatccttaccctccccttccccctccacctccctcgcccaggcagacgatgggggtggctcgggagaagcggccgggggtgaggctggttcgacgtcgggaggaagccgcgtcgttggcatgggcgcggagtgggtggtctgccccgtctgcggcgattcgatccgagggtcggactactgcgtcaacactcacctcgatatgtgccttacaaggggaaccaaaaggaagttaacacagagcacccttcttaatttccaattcagtaaaaaggtttctgccgagcctacaataaacaatttgaacaatgagtccgagacagaaaatatgaaacagattgatgaaggtttgtcgagtgatcaagcattcttcgcattcgatagtgagattgggagttcaaaggctggcactactatttcatcgcctacctgggaacttccaacggtggcaacctcttgcagttttgatgaatgcgcagtcatggattctagcaccgttgtagtagttgacactgttatagttggccggaggttccatgagaacattgaattaagagaagatgcagacattacctttatgagagatcctcagaatgctaaggaccctgatgctataaaggtgctacatgcagggtctgaatgtgaggagatgcttggatacttgcctcgagatcttgctaaagttttggctcctctagtggacaagcatcatgttgaatgcgagggatctgtggttggtctgcatgaacagcagtttggcaatgttcccatccagattactatccagaaatgtaaatctgacaatcaaagaaacaatgatccaaattgttgccaatccttatgggaaaatttcgttagcattgtcaaaagagaaaatttccggcgacctcacagtgcaagatatcagacaaattttaatttgatgatagctgatgttatggttaaccatgcacatgtttttagtgatatagaaaaatcatttttagcttcttttaagtcgttatcagatgatgggcaacggcttttcattaggatctacactcgaaaagcactactttgtcttacggaccttcttcagccctcctgcatatttaccgaagaccttcctccacttaaactgcccagatttgcttctggacatttttaagaacactcccattctatgctcattcaattgataaggttgccaccgatccataagattcaaagctttcatattcgagatgccacagtttatatgctgggcattgcaagatggcttttttacaagcttttgacagcagagatctataatcaagcatgggggccatggttccggaagggcagcatctcatatcaagagatttcagatctggagcatgcagtcatggagttggagttggcaggttatattgacatgctttcttgcaccattgatccttttgaatatgatatgaaggagattcttgatgtgttaagtgttcctgaaatgaaggaaattctcaaggagcttcctaaggataacacaatctgcacacgtcgacatgagcttgttagcacccttctgtcttcataccgtaatggtacctgtgcatcactaccaaaacggatcctaaaatggactggaacctgtataagaatttcgaagatggcagatgaacttctgtggcgtatccagaggctcttttttctaaatggtgatcaagatctttcttcatttctattagtggaatttggtatagtgaagtttccagactatgtttgcagcatctcccatcgcatttttcaagaaagaaatgatctacttgagtacgaagacgtatgaagatgcagtcaggattctaaagacactacttagcacagttgcttgtgatagacggcgaggatattgggcattgaggctatccattgatttggagcatatgggtcgtccaaatgagagcctatccacagctgaaggaggggcaactgatccatgggtccgtgctggttcaaagttcgctctgcaaaggagagttctgcgtttaagcaaacctccacgacgctggaaagttcccagttacgctgattatgttaagagaaatataagagaggtaagcattgaaggaaggccattgaattgcgagacaggagcaaagaatgtattttacggttacgatggggaactttgtggggtagaacagttggctttacaatattatgctgatgaaggtggtggttggcaaggtacccattcggaaggtagcatttggatgactatctttggccttctaatgtgggatgtgatgttttcagacatacaagatgttttccagtctaaattccagacagccccccttgatctgggaacagacgatttttacaaatctagagagaacattgcagaatctcagttgaagaggatacgggacggaatggccgaagagatgctaatcagctcatgggagctacatcaggggacatcctgccagggtgttaactgggcccgttattcgttaactgatctacgggctgttgttgcatgcgttggtggccaccgtttggcatcgctcctccgccatctagccgttgattacaggagctggtcgagtggaatgcccgatctgctgctatggcgtttccttgatgaaagaggtggaggtgaggctaaacttgtggaggtcaaaggacccagggaccagctgtcagagcaacagcgtgcatggattcttgttctcatggattttggatttgacgtggaagtttgcaaagtaagcccggtcaccaagcggagatagttcgcttgctaaatttattctgattattacgatgcaaaatgtatttggttgattagatagaagggcaaatctgtaacgcataagcaatggcattgttgtcgtgttgcactgaagtaacagtcaagctctacttgacatgctatctataactttgagagggaaggatgcatttaattgtctgaatcggcacaagttagaagaggaaattctgataaaattaaatatcgtaggggcaatttctttttacgtttgaggtgaggctcgtaaagcgtacgcatgtccttatacaaaagaacgactgtcacgatgacctgagatgaacaagtacacaacgacgtgcattttctagcttggacagaaagcatgcttttgcaaccaaaggcacacaaagggtgcttcaccacaatttgtgagaattccatgtcccaaagataatcacgacacagatcatccaacgcttt

SEQ ID NO: 79327 - DNA, 3269 bp, Zea Mays
cgagcccgcgcctgttcgcttcgctccgagccccctccaggcccaagcccgcccatctcccgaccacacacgcgcctattccttcccgccccgccgcgcgccgccacctctacggctccccggcggccatgctgaccgggcgggagagcctggtccgcctcatcggccggcgccgccgctcccctctccccgcttcgctcgtcgccgccctatccttaccctccccttccccctccacctccctcgcccaggcagacgatgggggtggctcgggagaagcggccgggggtgaggctggttcgacgtcgggaggaagccgcgtcgttggcatgggcgcggagtgggtggtctgccccgtctgcggcgattcgatccgagggtcggactactgcgtcaacactcacctcgatatgtgccttacaaggggaaccaaaaggaagttaacacagagcacccttcttaatttccaattcagtaaaaaggtttctgccgagcctacaataaacaatttgaacaatgagtccgagacagaaaatatgaaacagattgatgaaggtttgtcgagtgatcaagcattcttcgcattcgatagtgagattgggagttcaaaggctggcactactatttcatcgcctacctgtatgaatgactcacttggcacttctgagactattacttcctatgcaccttcaaatactgtcttatcagatgcaaaggatgctgtaaatgatggcgcaggggaacttccaacggtggcaacctcttgcagttttgatgaatgcgcagtcatggattctagcaccgttgtagtagttgacactgttatagttggccggaggttccatgagaacattgaattaagagaagatgcagacattacctttatgagagatcctcagaatgctaaggaccctgatgctataaaggtgctacatgcagggtctgaatgtgaggagatgcttggatacttgcctcgagatcttgctaaagttttggctcctctagtggacaagcatcatgttgaatgcgagggatctgtggttggtctgcatgaacagcagtttggcaatgttcccatccagattactatccagaaatgtaaatctgacaatcaaagaaacaatgatccaaattgttgccaatccttatgggaaaatttcgttagcattgtcaaaagagaaaatttccggcgacctcacagtgcaagatatcagacaaattttaatttgatgatagctgatgttatggttaaccatgcacatgtttttagtgatatagaaaaatcatttttagcttcttttaagtcgttatcagatgatgggcaacggcttttcattaggatctacactcgaaaagggccatggttccggaagggcagcatctcatatcaagagatttcagatctggagcatgcagtcatggagttggagttggcaggttatattgacatgctttcttgcaccattgatccttttgaatatgatatgaaggagattcttgatgtgttaagtgttcctgaaatgaaggaaattctcaaggagcttcctaaggataacacaatctgcacacgtcgacatgagcttgttagcacccttctgtcttcataccgtaatggtacctgtgcatcactaccaaaacggatcctaaaatggactggaacctgtataagaatttcgaagatggcagatgaacttctgtggcgtatccagaggctcttttttctaaatggtgatcaagatctttcttcatttctattagtggaatttggtatagtgaagtttccagactatgtttgcagcatctcccatcgcatttttcaagaaagaaatgatctacttgagtacgaagacgtatgaagatgcagtcaggattctaaagacactacttagcacagttgcttgtgatagacggcgaggatattgggcattgaggctatccattgatttggagcatatgggtcgtccaaatgagagcctatccacagctgaaggaggggcaactgatccatgggtccgtgctggttcaaagttcgctctgcaaaggagagttctgcgtttaagcaaacctccacgacgctggaaagttcccagttacgctgattatgttaagagaaatataagagaggtaagcattgaaggaaggccattgaattgcgagacaggagcaaagaatgtattttacggttacgatggggaactttgtggggtagaacagttggctttacaatattatgctgatgaaggtggtggttggcaaggtacccattcggaaggtagcatttggatgactatctttggccttctaatgtgggatgtgatgttttcagacatacaagatgttttccagtctaaattccagacagccccccttgatctgggaacagacgatttttacaaatctagagagaacattgcagaatctcagttgaagaggatacgggacggaatggccgaagagatgctaatcagctcatgggagctacatcaggggacatcctgccagggtgttaactgggcccgttattcgttaactgatctacgggctgttgttgcatgcgttggtggccaccgtttggcatcgctcctccgccatctagccgttgattacaggagctggtcgagtggaatgcccgatctgctgctatggcgtttccttgatgaaagaggtggaggtgaggctaaacttgtggaggtcaaaggacccagggaccagctgtcagagcaacagcgtgcatggattcttgttctcatggattttggatttgacgtggaagtttgcaaagtaagcccggtcaccaagcggagatagttcgcttgctaaatttattctgattattacgatgcaaaatgtatttggttgattagatagaagggcaaatctgtaacgcataagcaatggcattgttgtcgtgttgcactgaagtaacagtcaagctctacttgacatgctatctataactttgagagggaaggatgcatttaattgtctgaatcggcacaagttagaagaggaaattctgataaaattaaatatcgtaggggcaatttctttttacgtttgaggtgaggctcgtaaagcgtacgcatgtccttatacaaaagaacgactgtcacgatgacctgagatgaacaagtacacaacgacgtgcattttctagcttggacagaaagcatgcttttgcaaccaaaggcacacaaagggtgcttcaccacaatttgtgagaattccatgtcccaaagataatcacgacacagatcatccaacgcttt

SEQ ID NO: 79328 - DNA, 3115 bp, Zea Mays
cgagcccgcgcctgttcgcttcgctccgagccccctccaggcccaagcccgcccatctcccgaccacacacgcgcctattccttcccgccccgccgcgcgccgccacctctacggctccccggcggccatgctgaccgggcgggagagcctggtccgcctcatcggccggcgccgccgctcccctctccccgcttcgctcgtcgccgccctatccttaccctccccttccccctccacctccctcgcccaggcagacgatgggggtggctcgggagaagcggccgggggtgaggctggttcgacgtcgggaggaagccgcgtcgttggcatgggcgcggagtgggtggtctgccccgtctgcggcgattcgatccgagggtcggactactgcgtcaacactcacctcgatatgtgccttacaaggggaaccaaaaggaagttaacacagagcacccttcttaatttccaattcagtaaaaaggtttctgccgagcctacaataaacaatttgaacaatgagtccgagacagaaaatatgaaacagattgatgaaggtttgtcgagtgatcaagcattcttcgcattcgatagtgagattgggagttcaaaggctggcactactatttcatcgcctacctgtatgaatgactcacttggcacttctgagactattacttcctatgcaccttcaaatactgtcttatcagatgcaaaggatgctgtaaatgatggcgcaggggaacttccaacggtggcaacctcttgcagttttgatgaatgcgcagtcatggattctagcaccgttgtagtagttgacactgttatagttggccggaggttccatgagaacattgaattaagagaagatgcagacattacctttatgagagatcctcagaatgctaaggaccctgatgctataaagggtctgaatgtgaggagatgcttggatacttgcctcgagatcttgctaaagttttggctcctctagtggacaagcatcatgttgaatgcgagggatctgtggttggtctgcatgaacagcagtttggcaatgttcccatccagattactatccagaaatgtaaatctgacaatcaaagaaacaatgatccaaattgttgccaatccttatgggaaaatttcgttagcattgtcaaaagagaaaatttccggcgacctcacagtgcaagatatcagacaaattttaatttgatgatagctgatgttatggttaaccatgcacatgtttttagtgatatagaaaaatcatttttagcttcttttaagtcgttatcagatgatgggcaacggcttttcattaggatctacactcgaaaagggccatggttccggaagggcagcatctcatatcaagagatttcagatctggagcatgcagtcatggagttggagttggcaggttatattgacatgctttcttgcaccattgatccttttgaatatgatatgaaggagattcttgatgtgttaagtgttcctgaaatgaaggaaattctcaaggagcttcctaaggataacacaatctgcacacgtcgacatgagcttgttagcacccttctgtcttcataccgtaatggtacctgtgcatcactaccaaaacggatcctaaaatggactggaacctgtataagaatttcgaagatggcagatgaacttctgtggcgtatccaggtatgaagatgcagtcaggattctaaagacactacttagcacagttgcttgtgatagacggcgaggatattgggcattgaggctatccattgatttggagcatatgggtcgtccaaatgagagcctatccacagctgaaggaggggcaactgatccatgggtccgtgctggttcaaagttcgctctgcaaaggagagttctgcgtttaagcaaacctccacgacgctggaaagttcccagttacgctgattatgttaagagaaatataagagaggtaagcattgaaggaaggccattgaattgcgagacaggagcaaagaatgtattttacggttacgatggggaactttgtggggtagaacagttggctttacaatattatgctgatgaaggtggtggttggcaaggtacccattcggaaggtagcatttggatgactatctttggccttctaatgtgggatgtgatgttttcagacatacaagatgttttccagtctaaattccagacagccccccttgatctgggaacagacgatttttacaaatctagagagaacattgcagaatctcagttgaagaggatacgggacggaatggccgaagagatgctaatcagctcatgggagctacatcaggggacatcctgccagggtgttaactgggcccgttattcgttaactgatctacgggctgttgttgcatgcgttggtggccaccgtttggcatcgctcctccgccatctagccgttgattacaggagctggtcgagtggaatgcccgatctgctgctatggcgtttccttgatgaaagaggtggaggtgaggctaaacttgtggaggtcaaaggacccagggaccagctgtcagagcaacagcgtgcatggattcttgttctcatggattttggatttgacgtggaagtttgcaaagtaagcccggtcaccaagcggagatagttcgcttgctaaatttattctgattattacgatgcaaaatgtatttggttgattagatagaagggcaaatctgtaacgcataagcaatggcattgttgtcgtgttgcactgaagtaacagtcaagctctacttgacatgctatctataactttgagagggaaggatgcatttaattgtctgaatcggcacaagttagaagaggaaattctgataaaattaaatatcgtaggggcaatttctttttacgtttgaggtgaggctcgtaaagcgtacgcatgtccttatacaaaagaacgactgtcacgatgacctgagatgaacaagtacacaacgacgtgcattttctagcttggacagaaagcatgcttttgcaaccaaaggcacacaaagggtgcttcaccacaatttgtgagaattccatgtcccaaagataatcacgacacagatcatccaacgcttt

SEQ ID NO: 79329 - DNA, 3569 bp, Zea Mays
cgagcccgcgcctgttcgcttcgctccgagccccctccaggcccaagcccgcccatctcccgaccacacacgcgcctattccttcccgccccgccgcgcgccgccacctctacggctccccggcggccatgctgaccgggcgggagagcctggtccgcctcatcggccggcgccgccgctcccctctccccgcttcgctcgtcgccgccctatccttaccctccccttccccctccacctccctcgcccaggcagacgatgggggtggctcgggagaagcggccgggggtgaggctggttcgacgtcgggaggaagccgcgtcgttggcatgggcgcggagtgggtggtctgccccgtctgcggcgattcgatccgagggtcggactactgcgtcaacactcacctcgatatgtgccttacaaggggaaccaaaaggaagttaacacagagcacccttcttaatttccaattcagtaaaaaggtttctgccgagcctacaataaacaatttgaacaatgagtccgagacagaaaatatgaaacagattgatgaaggtttgtcgagtgatcaagcattcttcgcattcgatagtgagattgggagttcaaaggctggcactactatttcatcgcctacctgtatgaatgactcacttggcacttctgagactattacttcctatgcaccttcaaatactgtcttatcagatgcaaaggatgctgtaaatgatggcgcaggggaacttccaacggtggcaacctcttgcagttttgatgaatgcgcagtcatggattctagcaccgttgtagtagttgacactgttatagttggccggaggttccatgagaacattgaattaagagaagatgcagacattacctttatgagagatcctcagaatgctaaggaccctgatgctataaaggtgctacatgcagggtctgaatgtgaggagatgcttggatacttgcctcgagatcttgctaaagttttggctcctctagtggacaagcatcatgttgaatgcgagggatctgtggttggtctgcatgaacagcagtttggcaatgttcccatccagattactatccagaaatgtaaatctgacaatcaaagaaacaatgatccaaattgttgccaatccttatgggaaaatttcgttagcattgtcaaaagagaaaatttccggcgacctcacagtgcaagatatcagacaaattttaatttgatgatagctgatgttatggttaaccatgcacatgtttttagtgatatagaaaaatcatttttagcttcttttaagtcgttatcagatgatgggcaacggcttttcattaggatctacactcgaaaagggccatggttccggaagggcagcatctcatatcaagagatttcagatctggagcatgcagtcatggagttggagttggcaggttatattgacatgctttcttgcaccattgatccttttgaatatgatatgaaggagattcttgatgtgttaagtgttcctgaaatgaaggaaattctcaaggagcttcctaaggataacacaatctgcacacgtcgacatgagcttgttagcacccttctgtcttcataccgtaatggtacctgtgcatcactaccaaaacggatcctaaaatggactggaacctgtataagaatttcgaagatggcagatgaacttctgtggcgtatccagaggctcttttttctaaatggtgatcaagatctttcttcatttctattagtggaatttggtatagtgaagtttccagactatgtttgcagcatctcccatcgcatttttcaagaaagaaatgatctacttgagtacgaagacgtaagattttgaccccttttcaaaaagaacagtgagccactcattgatcatgtttaatatcttacattgcaaacaggctattcgagttgctcaggtgatggatgaatcccttgataataataaaatggacttggtgacaagatgcatcgatttatctgagaatcgattatgcattatgccaaaacgagaaaacacaattacacctgaacgtctccgatcattcttttctcgcttttcagcgtcctgggtctattcgaaaatactcacattaggtgtctctgtttatgaaagagaccgcaggtatgaagatgcagtcaggattctaaagacactacttagcacagttgcttgtgatagacggcgaggatattgggcattgaggctatccattgatttggagcatatgggtcgtccaaatgagagcctatccacagctgaaggaggggcaactgatccatgggtccgtgctggttcaaagttcgctctgcaaaggagagttctgcgtttaagcaaacctccacgacgctggaaagttcccagttacgctgattatgttaagagaaatataagagaggtaagcattgaaggaaggccattgaattgcgagacaggagcaaagaatgtattttacggttacgatggggaactttgtggggtagaacagttggctttacaatattatgctgatgaaggtggtggttggcaaggtacccattcggaaggtagcatttggatgactatctttggccttctaatgtgggatgtgatgttttcagacatacaagatgttttccagtctaaattccagacagccccccttgatctgggaacagacgatttttacaaatctagagagaacattgcagaatctcagttgaagaggatacgggacggaatggccgaagagatgctaatcagctcatgggagctacatcaggggacatcctgccagggtgttaactgggcccgttattcgttaactgatctacgggctgttgttgcatgcgttggtggccaccgtttggcatcgctcctccgccatctagccgttgattacaggagctggtcgagtggaatgcccgatctgctgctatggcgtttccttgatgaaagaggtggaggtgaggctaaacttgtggaggtcaaaggacccagggaccagctgtcagagcaacagcgtgcatggattcttgttctcatggattttggatttgacgtggaagtttgcaaagtaagcccggtcaccaagcggagatagttcgcttgctaaatttattctgattattacgatgcaaaatgtatttggttgattagatagaagggcaaatctgtaacgcataagcaatggcattgttgtcgtgttgcactgaagtaacagtcaagctctacttgacatgctatctataactttgagagggaaggatgcatttaattgtctgaatcggcacaagttagaagaggaaattctgataaaattaaatatcgtaggggcaatttctttttacgtttgaggtgaggctcgtaaagcgtacgcatgtccttatacaaaagaacgactgtcacgatgacctgagatgaacaagtacacaacgacgtgcattttctagcttggacagaaagcatgcttttgcaaccaaaggcacacaaagggtgcttcaccacaatttgtgagaattccatgtcccaaagataatcacgacacagatcatccaacgcttt

SEQ ID NO: 79330 - DNA, 3370 bp, Zea Mays
cgagcccgcgcctgttcgcttcgctccgagccccctccaggcccaagcccgcccatctcccgaccacacacgcgcctattccttcccgccccgccgcgcgccgccacctctacggctccccggcggccatgctgaccgggcgggagagcctggtccgcctcatcggccggcgccgccgctcccctctccccgcttcgctcgtcgccgccctatccttaccctccccttccccctccacctccctcgcccaggcagacgatgggggtggctcgggagaagcggccgggggtgaggctggttcgacgtcgggaggaagccgcgtcgttggcatgggcgcggagtgggtggtctgccccgtctgcggcgattcgatccgagggtcggactactgcgtcaacactcacctcgatatgtgccttacaaggggaaccaaaaggaagttaacacagagcacccttcttaatttccaattcagtaaaaaggtttctgccgagcctacaataaacaatttgaacaatgagtccgagacagaaaatatgaaacagattgatgaaggtttgtcgagtgatcaagcattcttcgcattcgatagtgagattgggagttcaaaggctggcactactatttcatcgcctacctgtatgaatgactcacttggcacttctgagactattacttcctatgcaccttcaaatactgtcttatcagatgcaaaggatgctgtaaatgatggcgcaggggaacttccaacggtggcaacctcttgcagttttgatgaatgcgcagtcatggattctagcaccgttgtagtagttgacactgttatagttggccggaggttccatgagaacattgaattaagagaagatgcagacattacctttatgagagatcctcagaatgctaaggaccctgatgctataaagggtctgaatgtgaggagatgcttggatacttgcctcgagatcttgctaaagttttggctcctctagtggacaagcatcatgttgaatgcgagggatctgtggttggtctgcatgaacagcagtttggcaatgttcccatccagattactatccagaaatgtaaatctgacaatcaaagaaacaatgatccaaattgttgccaatccttatgggaaaatttcgttagcattgtcaaaagagaaaatttccggcgacctcacagtgcaagatatcagacaaattttaatttgatgatagctgatgttatggttaaccatgcacatgtttttagtgatatagaaaaatcatttttagcttcttttaagtcgttatcagatgatgggcaacggcttttcattaggatctacactcgaaaagcactactttgtcttacggaccttcttcagccctcctgcatatttaccgaagaccttcctccacttaaactgcccagatttgcttctggacatttttaagaacactcccattctatgctcattcaattgataaggttgccaccgatccataagattcaaagctttcatattcgagatgccacagtttatatgctgggcattgcaagatggcttttttacaagcttttgacagcagagatctataatcaagcatgggggccatggttccggaagggcagcatctcatatcaagagatttcagatctggagcatgcagtcatggagttggagttggcaggttatattgacatgctttcttgcaccattgatccttttgaatatgatatgaaggagattcttgatgtgttaagtgttcctgaaatgaaggaaattctcaaggagcttcctaaggataacacaatctgcacacgtcgacatgagcttgttagcacccttctgtcttcataccgtaatggtacctgtgcatcactaccaaaacggatcctaaaatggactggaacctgtataagaatttcgaagatggcagatgaacttctgtggcgtatccaggtatgaagatgcagtcaggattctaaagacactacttagcacagttgcttgtgatagacggcgaggatattgggcattgaggctatccattgatttggagcatatgggtcgtccaaatgagagcctatccacagctgaaggaggggcaactgatccatgggtccgtgctggttcaaagttcgctctgcaaaggagagttctgcgtttaagcaaacctccacgacgctggaaagttcccagttacgctgattatgttaagagaaatataagagaggtaagcattgaaggaaggccattgaattgcgagacaggagcaaagaatgtattttacggttacgatggggaactttgtggggtagaacagttggctttacaatattatgctgatgaaggtggtggttggcaaggtacccattcggaaggtagcatttggatgactatctttggccttctaatgtgggatgtgatgttttcagacatacaagatgttttccagtctaaattccagacagccccccttgatctgggaacagacgatttttacaaatctagagagaacattgcagaatctcagttgaagaggatacgggacggaatggccgaagagatgctaatcagctcatgggagctacatcaggggacatcctgccagggtgttaactgggcccgttattcgttaactgatctacgggctgttgttgcatgcgttggtggccaccgtttggcatcgctcctccgccatctagccgttgattacaggagctggtcgagtggaatgcccgatctgctgctatggcgtttccttgatgaaagaggtggaggtgaggctaaacttgtggaggtcaaaggacccagggaccagctgtcagagcaacagcgtgcatggattcttgttctcatggattttggatttgacgtggaagtttgcaaagtaagcccggtcaccaagcggagatagttcgcttgctaaatttattctgattattacgatgcaaaatgtatttggttgattagatagaagggcaaatctgtaacgcataagcaatggcattgttgtcgtgttgcactgaagtaacagtcaagctctacttgacatgctatctataactttgagagggaaggatgcatttaattgtctgaatcggcacaagttagaagaggaaattctgataaaattaaatatcgtaggggcaatttctttttacgtttgaggtgaggctcgtaaagcgtacgcatgtccttatacaaaagaacgactgtcacgatgacctgagatgaacaagtacacaacgacgtgcattttctagcttggacagaaagcatgcttttgcaaccaaaggcacacaaagggtgcttcaccacaatttgtgagaattccatgtcccaaagataatcacgacacagatcatccaacgcttt

SEQ ID NO: 79331 - DNA, 3829 bp, Zea Mays
cgagcccgcgcctgttcgcttcgctccgagccccctccaggcccaagcccgcccatctcccgaccacacacgcgcctattccttcccgccccgccgcgcgccgccacctctacggctccccggcggccatgctgaccgggcgggagagcctggtccgcctcatcggccggcgccgccgctcccctctccccgcttcgctcgtcgccgccctatccttaccctccccttccccctccacctccctcgcccaggcagacgatgggggtggctcgggagaagcggccgggggtgaggctggttcgacgtcgggaggaagccgcgtcgttggcatgggcgcggagtgggtggtctgccccgtctgcggcgattcgatccgagggtcggactactgcgtcaacactcacctcgatatgtgccttacaaggggaaccaaaaggaagttaacacagagcacccttcttaatttccaattcagtaaaaaggtttctgccgagcctacaataaacaatttgaacaatgagtccgagacagaaaatatgaaacagattgatgaaggtttgtcgagtgatcaagcattcttcgcattcgatagtgagattgggagttcaaaggctggcactactatttcatcgcctacctatgcaaaggatgctgtaaatgatggcgcaggggaacttccaacggtggcaacctcttgcagttttgatgaatgcgcagtcatggattctagcaccgttgtagtagttgacactgttatagttggccggaggttccatgagaacattgaattaagagaagatgcagacattacctttatgagagatcctcagaatgctaaggaccctgatgctataaagggtctgaatgtgaggagatgcttggatacttgcctcgagatcttgctaaagttttggctcctctagtggacaagcatcatgttgaatgcgagggatctgtggttggtctgcatgaacagcagtttggcaatgttcccatccagattactatccagaaatgtaaatctgacaatcaaagaaacaatgatccaaattgttgccaatccttatgggaaaatttcgttagcattgtcaaaagagaaaatttccggcgacctcacagtgcaagatatcagacaaattttaatttgatgatagctgatgttatggttaaccatgcacatgtttttagtgatatagaaaaatcatttttagcttcttttaagtcgttatcagatgatgggcaacggcttttcattaggatctacactcgaaaagggccatggttccggaagggcagcatctcatatcaagagatttcagatctggagcatgcagtcatggagttggagttggcaggttatattgacatgctttcttgcaccattgatccttttgaatatgatatgaaggagattcttgatgtgttaagtgttcctgaaatgaaggaaattctcaaggagcttcctaaggataacacaatctgcacacgtcgacatgagcttgttagcacccttctgtcttcataccgtaatggtacctgtgcatcactaccaaaacggatcctaaaatggactggaacctgtataagaatttcgaagatggcagatgaacttctgtggcgtatccagaggctcttttttctaaatggtgatcaagatctttcttcatttctattagtggaatttggtatagtgaagtttccagactatgtttgcagcatctcccatcgcatttttcaagaaagaaatgatctacttgagtacgaagacgtaagattttgaccccttttcaaaaagaacagtgagccactcattgatcatgtttaatatcttacattgcaaacaggctattcgagttgctcaggtgatggatgaatcccttgataataataaaatggacttggtgacaagatgcatcgatttatctgagaatcgattatgcattatgccaaaacgagaaaacacaattacacctgaacgtctccgatcattcttttctcgcttttcagcgtcctgggtctattcgaaaatactcacattaggtgtctctgtttatgaaagagaccgcaggtaagttgcaataactgctataattacggatcagatcaaacactctcattagatgcatggttttcgtgtttcatagaattttggttgaaagtggaaaccttagccacacaagcattcttttctgatgtgtttcactttcacatgccttctggtttatagtacatattgggacgttttaagtgtgatatgtgatagatacttgaacatgtgatgcaatggtaatttgttgcacttttacaggcccttctgttaaagggctcataaattctttgctcagaaacaatcttataaatcttgttagtttctggggatccaaatttcatgccaaccaaatttatataggtatgaagatgcagtcaggattctaaagacactacttagcacagttgcttgtgatagacggcgaggatattgggcattgaggctatccattgatttggagcatatgggtcgtccaaatgagagcctatccacagctgaaggaggggcaactgatccatgggtccgtgctggttcaaagttcgctctgcaaaggagagttctgcgtttaagcaaacctccacgacgctggaaagttcccagttacgctgattatgttaagagaaatataagagaggtaagcattgaaggaaggccattgaattgcgagacaggagcaaagaatgtattttacggttacgatggggaactttgtggggtagaacagttggctttacaatattatgctgatgaaggtggtggttggcaaggtacccattcggaaggtagcatttggatgactatctttggccttctaatgtgggatgtgatgttttcagacatacaagatgttttccagtctaaattccagacagccccccttgatctgggaacagacgatttttacaaatctagagagaacattgcagaatctcagttgaagaggatacgggacggaatggccgaagagatgctaatcagctcatgggagctacatcaggggacatcctgccagggtgttaactgggcccgttattcgttaactgatctacgggctgttgttgcatgcgttggtggccaccgtttggcatcgctcctccgccatctagccgttgattacaggagctggtcgagtggaatgcccgatctgctgctatggcgtttccttgatgaaagaggtggaggtgaggctaaacttgtggaggtcaaaggacccagggaccagctgtcagagcaacagcgtgcatggattcttgttctcatggattttggatttgacgtggaagtttgcaaagtaagcccggtcaccaagcggagatagttcgcttgctaaatttattctgattattacgatgcaaaatgtatttggttgattagatagaagggcaaatctgtaacgcataagcaatggcattgttgtcgtgttgcactgaagtaacagtcaagctctacttgacatgctatctataactttgagagggaaggatgcatttaattgtctgaatcggcacaagttagaagaggaaattctgataaaattaaatatcgtaggggcaatttctttttacgtttgaggtgaggctcgtaaagcgtacgcatgtccttatacaaaagaacgactgtcacgatgacctgagatgaacaagtacacaacgacgtgcattttctagcttggacagaaagcatgcttttgcaaccaaaggcacacaaagggtgcttcaccacaatttgtgagaattccatgtcccaaagataatcacgacacagatcatccaacgcttt

SEQ ID NO: 79332 - DNA, 3383 bp, Zea Mays
cgagcccgcgcctgttcgcttcgctccgagccccctccaggcccaagcccgcccatctcccgaccacacacgcgcctattccttcccgccccgccgcgcgccgccacctctacggctccccggcggccatgctgaccgggcgggagagcctggtccgcctcatcggccggcgccgccgctcccctctccccgcttcgctcgtcgccgccctatccttaccctccccttccccctccacctccctcgcccaggcagacgatgggggtggctcgggagaagcggccgggggtgaggctggttcgacgtcgggaggaagccgcgtcgttggcatgggcgcggagtgggtggtctgccccgtctgcggcgattcgatccgagggtcggactactgcgtcaacactcacctcgatatgtgccttacaaggggaaccaaaaggaagttaacacagagcacccttcttaatttccaattcagtaaaaaggtttctgccgagcctacaataaacaatttgaacaatgagtccgagacagaaaatatgaaacagattgatgaaggtttgtcgagtgatcaagcattcttcgcattcgatagtgagattgggagttcaaaggctggcactactatttcatcgcctacctgggaacttccaacggtggcaacctcttgcagttttgatgaatgcgcagtcatggattctagcaccgttgtagtagttgacactgttatagttggccggaggttccatgagaacattgaattaagagaagatgcagacattacctttatgagagatcctcagaatgctaaggaccctgatgctataaagggtctgaatgtgaggagatgcttggatacttgcctcgagatcttgctaaagttttggctcctctagtggacaagcatcatgttgaatgcgagggatctgtggttggtctgcatgaacagcagtttggcaatgttcccatccagattactatccagaaatgtaaatctgacaatcaaagaaacaatgatccaaattgttgccaatccttatgggaaaatttcgttagcattgtcaaaagagaaaatttccggcgacctcacagtgcaagatatcagacaaattttaatttgatgatagctgatgttatggttaaccatgcacatgtttttagtgatatagaaaaatcatttttagcttcttttaagtcgttatcagatgatgggcaacggcttttcattaggatctacactcgaaaagccctcctgcatatttaccgaagaccttcctccacttaaactgcccagatttgcttctggacatttttaagaacactcccattctatgctcattcaattgataaggttgccaccgatccataagattcaaagctttcatattcgagatgccacagtttatatgctgggcattgcaagatggcttttttacaagcttttgacagcagagatctataatcaagcatgggggccatggttccggaagggcagcatctcatatcaagagatttcagatctggagcatgcagtcatggagttggagttggcaggttatattgacatgctttcttgcaccattgatccttttgaatatgatatgaaggagattcttgatgtgttaagtgttcctgaaatgaaggaaattctcaaggagcttcctaaggataacacaatctgcacacgtcgacatgagcttgttagcacccttctgtcttcataccgtaatggtacctgtgcatcactaccaaaacggatcctaaaatggactggaacctgtataagaatttcgaagatggcagatgaacttctgtggcgtatccagaggctcttttttctaaatggtgatcaagatctttcttcatttctattagtggaatttggtatagtgaagtttccagactatgtttgcagcatctcccatcgcatttttcaagaaagaaatgatctacttgagtacgaagacgtatgaagatgcagtcaggattctaaagacactacttagcacagttgcttgtgatagacggcgaggatattgggcattgaggctatccattgatttggagcatatgggtcgtccaaatgagagcctatccacagctgaaggaggggcaactgatccatgggtccgtgctggttcaaagttcgctctgcaaaggagagttctgcgtttaagcaaacctccacgacgctggaaagttcccagttacgctgattatgttaagagaaatataagagaggtaagcattgaaggaaggccattgaattgcgagacaggagcaaagaatgtattttacggttacgatggggaactttgtggggtagaacagttggctttacaatattatgctgatgaaggtggtggttggcaaggtacccattcggaaggtagcatttggatgactatctttggccttctaatgtgggatgtgatgttttcagacatacaagatgttttccagtctaaattccagacagccccccttgatctgggaacagacgatttttacaaatctagagagaacattgcagaatctcagttgaagaggatacgggacggaatggccgaagagatgctaatcagctcatgggagctacatcaggggacatcctgccagggtgttaactgggcccgttattcgttaactgatctacgggctgttgttgcatgcgttggtggccaccgtttggcatcgctcctccgccatctagccgttgattacaggagctggtcgagtggaatgcccgatctgctgctatggcgtttccttgatgaaagaggtggaggtgaggctaaacttgtggaggtcaaaggacccagggaccagctgtcagagcaacagcgtgcatggattcttgttctcatggattttggatttgacgtggaagtttgcaaagtaagcccggtcaccaagcggagatagttcgcttgctaaatttattctgattattacgatgcaaaatgtatttggttgattagatagaagggcaaatctgtaacgcataagcaatggcattgttgtcgtgttgcactgaagtaacagtcaagctctacttgacatgctatctataactttgagagggaaggatgcatttaattgtctgaatcggcacaagttagaagaggaaattctgataaaattaaatatcgtaggggcaatttctttttacgtttgaggtgaggctcgtaaagcgtacgcatgtccttatacaaaagaacgactgtcacgatgacctgagatgaacaagtacacaacgacgtgcattttctagcttggacagaaagcatgcttttgcaaccaaaggcacacaaagggtgcttcaccacaatttgtgagaattccatgtcccaaagataatcacgacacagatcatccaacgcttt

SEQ ID NO: 79333 - DNA, 2122 bp, Zea Mays
ggttcggagtggggagaggaatgggggagaaacgtatgcggtatgcctcaacggcaattaggagaaaaatgagaggtccttccgacaaattgctggttttagtcgatctgagccgtctgattaccgatccaacagctagtatcttgcacatgtcaagggtttacttgtcacttgcatgcacgtgacgaacgccatggcgcttgcggttcgtctcatcggccgccgccggttcctcccgccgccgctcgccgccgccgttgctcacctctctgccgcttcccagagcccgtgccaccaccaccacccacttccgacccccgcgctcccgttgccccctcgtgagctccatcctttcgctctccactggcgaagcttctcctggtactcccgctccggctccgggtctgatagcagtcccggcaccgctgccgcggacgctcgcggagaggacgtgtacatcgagaaggaaagcgtgcacttggatggcgtgacaatcgttgatgacgggggaggggtcgtcagtgaggcgggtgctgcggcggatgccgtgggagatgccgccggcgccacggccgacggcgtcgggggagtgccggaattggctgttagcacagttttggacctcatggacgggatccatagcctcaccggactgccgtggtggatgacaatctcctttttctactgtggccatgagattgtggatacttcccgtcctcatagtgcagttacagaagactgctgaaattggtgaagtgttccgaaaagtgtccacttcattaccccctcctcagcctggaagcaatttccgtgaacagtacactctgttccagaagaaaaagaaggagcttggttgcccctcatttatctggaattttgcctattttttggtacagttcccttgctttattctttggatgacgagtataaggagcatgtgcttgaataatcaccctggatttgataatggtgggattctgtggttccataacttgactgagtttccacatggtactttagctcccatctttcctatcttagttgctggtctgcattacctaaatgttcagatttcttttcaggggtcccagatcaaggatcacccaggaatttttggcttgctggctaagtactatagaatatacctcaatgtcctgactatccctttgtttcttgtcgcacatgtggttcctcagggatgcctggtctactggactacaaatggtttattttctgtagctcagcaattatccttgagaaatgatgctgtccgcaagctgttgggattgccagatactagagctcaggttggttacagagcacaaaagtcacctcttgaggtacctgagatgatgcagtggtcacagcttgaagatgctaacttgcaaacgaaatcgatgccatctgacaagggaacagccagtgagagtacaactcctaattttgcaatgggaagtatggatggaaatatatctgcgtccagctcacctgaggagctacttgaacaagcattacagtatctgggcacaggctgccgagatcaagccattccactgatcaggacagcagtagagagaaacccagatctgtacacagcgttgattgggatgggacaaaccctgttctcaaatagattgtttcccgaagccgcggtttgttttgaacatgctataccaaagattcaagaagatgaccctcttcttgtgcttgcgtattttggggcaggtctttcgaacaagcgtcagggggataatgagacggcaataaaactcctggagagattagcagagctcaaggaaccagaaaagcccatcaacaaaagccgctacttccaagggatgcttgctttggcaagtatattatatagagaaggccggaattcggaggctgccaaatatctgcggatggctattgcttatgatccttctgtagaaaggcttctcaaggaatgcgaggaaggaatggacgatcagccaaagccagaggagaagtgatgtgctggacctgaaaaagccacagtaacagagatagcacaccgcttttgtttttgaacactaaaaccgcccccagctttttaccctttacccatatgatcgtgcaaaacagagtgaagttgaataga

SEQ ID NO: 79334 - DNA, 2149 bp, Zea Mays
gtccttccgacaaattgctggttttagtcgatctgagccgtctgattaccgatccaacagctagtatcttgcacatgtcaagggtttacttgtcacttgcatgcacgtgacgaacgccatggcgcttgcggttcgtctcatcggccgccgccggttcctcccgccgccgctcgccgccgccgttgctcacctctctgccgcttcccagagcccgtgccaccaccaccacccacttccgacccccgcgctcccgttgccccctcgtgagctccatcctttcgctctccactggcgaagcttctcctggtactcccgctccggctccgggtctgatagcagtcccggcaccgctgccgcggacgctcgcggagaggacgtgtacatcgagaaggaaagcgtgcacttggatggcgtgacaatcgttgatgacgggggaggggtcgtcagtgaggcgggtgctgcggcggatgccgtgggagatgccgccggcgccacggccgacggcgtcgggggagtgccggaattggctgttagcacagttttggacctcatggacgggatccatagcctcaccggactgccgtggtggatgacaatctcctttttctactgtggccatgagattgtggatacttcccgtcctcatagtgcagttacagaagactgctgaaattggtgaagtgttccgaaaagtgtccacttcattaccccctcctcagcctggaagcaatttccgtgaacagtacactctgttccagaagaaaaagaaggagcttggttgcccctcatttatctggaattttgcctattttttggtacagttcccttgctttattctttggatgacgagtataaggagcatgtgcttgaataatcaccctggatttgataatggtgggattctgtggttccataacttgactgagtttccacatggtactttagctcccatctttcctatcttagttgctggtctgcattacctaaatgttcagatttcttttcaggggtcccagatcaaggatcacccaggaatttttggcttgctggctaagtactatagaatatacctcaatgtcctgactatccctttgtttcttgtcgcacatgtggttcctcagggatgcctggtctactggactacaaatggtttattttctgtagctcagatcagattccatgcatttaatttgaacaagcttgatgcggcaaagtaagcattgtgtactttatgttacattctattgttttttcaaatgattaaatcgcagcaattatccttgagaaatgatgctgtccgcaagctgttgggattgccagatactagagctcaggttggttacagagcacaaaagtcacctcttgaggtacctgagatgatgcagtggtcacagcttgaagatgctaacttgcaaacgaaatcgatgccatctgacaagggaacagccagtgagagtacaactcctaattttgcaatgggaagtatggatggaaatatatctgcgtccagctcacctgaggagctacttgaacaagcattacagtatctgggcacaggctgccgagatcaagccattccactgatcaggacagcagtagagagaaacccagatctgtacacagcgttgattgggatgggacaaaccctgttctcaaatagattgtttcccgaagccgcggtttgttttgaacatgctataccaaagattcaagaagatgaccctcttcttgtgcttgcgtattttggggcaggtctttcgaacaagcgtcagggggataatgagacggcaataaaactcctggagagattagcagagctcaaggaaccagaaaagcccatcaacaaaagccgctacttccaagggatgcttgctttggcaagtatattatatagagaaggccggaattcggaggctgccaaatatctgcggatggctattgcttatgatccttctgtagaaaggcttctcaaggaatgcgaggaaggaatggacgatcagccaaagccagaggagaagtgatgtgctggacctgaaaaagccacagtaacagagatagcacaccgcttttgtttttgaacactaaaaccgcccccagctttttaccctttacccatatgatcgtgcaaaacagagtgaagttgaataga

SEQ ID NO: 79335 - DNA, 2007 bp, Zea Mays
ctggttttagtcgatctgagccgtctgattaccgatccaacagctagtatcttgcacatgtcaagggtttacttgtcacttgcatgcacgtgacgaacgccatggcgcttgcggttcgtctcatcggccgccgccggttcctcccgccgccgctcgccgccgccgttgctcacctctctgccgcttcccagagcccgtgccaccaccaccacccacttccgacccccgcgctcccgttgccccctcgtgagctccatcctttcgctctccactggcgaagcttctcctggtactcccgctccggctccgggtctgatagcagtcccggcaccgctgccgcggacgctcgcggagaggacgtgtacatcgagaaggaaagcgtgcacttggatggcgtgacaatcgttgatgacgggggaggggtcgtcagtgaggcgggtgctgcggcggatgccgtgggagatgccgccggcgccacggccgacggcgtcgggggagtgccggaattggctgttagcacagttttggacctcatggacgggatccatagcctcaccggactgccgtggtggatgacaatctcctttttctactgtggccatgagattgtggatacttcccgtcctcatagtgcagttacagaagactgctgaaattggtgaagtgttccgaaaagtgtccacttcattaccccctcctcagcctggaagcaatttccgtgaacagtacactctgttccagaagaaaaagaaggagcttggttgcccctcatttatctggaattttgcctattttttggtacagttcccttgctttattctttggatgacgagtataaggagcatgtgcttgaataatcaccctggatttgataatggtgggattctgtggttccataacttgactgagtttccacatggtactttagctcccatctttcctatcttagttgctggtctgcattacctaaatgttcagatttcttttcaggggtcccagatcaaggatcacccaggaatttttggcttgctggctaagtactatagaatatacctcaatgtcctgactatccctttgtttcttgtcgcacatgtggttcctcagggatgcctggtctactggactacaaatggtttattttctgtagctcagcaattatccttgagaaatgatgctgtccgcaagctgttgggattgccagatactagagctcaggttggttacagagcacaaaagtcacctcttgagtggtcacagcttgaagatgctaacttgcaaacgaaatcgatgccatctgacaagggaacagccagtgagagtacaactcctaattttgcaatgggaagtatggatggaaatatatctgcgtccagctcacctgaggagctacttgaacaagcattacagtatctgggcacaggctgccgagatcaagccattccactgatcagcagtagagagaaacccagatctgtacacagcgttgattgggatgggacaaaccctgttctcaaatagattgtttcccgaagccgcggtttgttttgaacatgctataccaaagattcaagaagatgaccctcttcttgtgcttgcgtattttggggcaggtctttcgaacaagcgtcagggggataatgagacggcaataaaactcctggagagattagcagagctcaaggaaccagaaaagcccatcaacaaaagccgctacttccaagggatgcttgctttggcaagtatattatatagagaaggccggaattcggaggctgccaaatatctgcggatggctattgcttatgatccttctgtagaaaggcttctcaaggaatgcgaggaaggaatggacgatcagccaaagccagaggagaagtgatgtgctggacctgaaaaagccacagtaacagagatagcacaccgcttttgtttttgaacactaaaaccgcccccagctttttaccctttacccatatgatcgtgcaaaacagagtgaagttgaataga

SEQ ID NO: 79336 - DNA, 1932 bp, Zea Mays
gtcgatctgagccgtctgattaccgatccaacagctagtatcttgcacatgtcaagggtttacttgtcacttgcatgcacgtgacgaacgccatggcgcttgcggttcgtctcatcggccgccgccggttcctcccgccgccgctcgccgccgccgttgctcacctctctgccgcttcccagagcccgtgccaccaccaccacccacttccgacccccgcgctcccgttgccccctcgtgagctccatcctttcgctctccactggcgaagcttctcctggtactcccgctccggctccgggtctgatagcagtcccggcaccgctgccgcggacgctcgcggagaggacgtgtacatcgagaaggaaagcgtgcacttggatggcgtgacaatcgttgatgacgggggaggggtcgtcagtgaggcgggtgctgcggcggatgccgtgggagatgccgccggcgccacggccgacggcgtcgggggagtgccggaattggctgttagcacagttttggacctcatggacgggatccatagcctcaccggactgccgtggtggatgacaatctcctttttctactgtggccatgagattgtggatacttcccgtcctcatagtgcagttacagaagactgctgaaattggtgaagtgttccgaaaagtgtccacttcattaccccctcctcagcctggaagcaatttccgtgaacagtacactctgttccagaagaaaaagaaggagcttggttgcccctcatttatctggaattttgcctattttttggtacagttcccttgctttattctttggatgacgagtataaggagcatgtgcttgaataatcaccctggatttgataatggtgggattctgtggttccataacttgactgagtttccacatggtactttagctcccatctttcctatcttagttgctggtctgcattacctaaatgttcagatttcttttcaggggtcccagatcaaggatcacccaggaatttttggcttgctggctaagggatgcctggtctactggactacaaatggtttattttctgtagctcagcaattatccttgagaaatgatgctgtccgcaagctgttgggattgccagatactagagctcaggttggttacagagcacaaaagtcacctcttgagtggtcacagcttgaagatgctaacttgcaaacgaaatcgatgccatctgacaagggaacagccagtgagagtacaactcctaattttgcaatgggaagtatggatggaaatatatctgcgtccagctcacctgaggagctacttgaacaagcattacagtatctgggcacaggctgccgagatcaagccattccactgatcagcagtagagagaaacccagatctgtacacagcgttgattgggatgggacaaaccctgttctcaaatagattgtttcccgaagccgcggtttgttttgaacatgctataccaaagattcaagaagatgaccctcttcttgtgcttgcgtattttggggcaggtctttcgaacaagcgtcagggggataatgagacggcaataaaactcctggagagattagcagagctcaaggaaccagaaaagcccatcaacaaaagccgctacttccaagggatgcttgctttggcaagtatattatatagagaaggccggaattcggaggctgccaaatatctgcggatggctattgcttatgatccttctgtagaaaggcttctcaaggaatgcgaggaaggaatggacgatcagccaaagccagaggagaagtgatgtgctggacctgaaaaagccacagtaacagagatagcacaccgcttttgtttttgaacactaaaaccgcccccagctttttaccctttacccatatgatcgtgcaaaacagagtgaagttgaataga

SEQ ID NO: 79337 - DNA, 2012 bp, Zea Mays
ctagtatcttgcacatgtcaagggtttacttgtcacttgcatgcacgtgacgaacgccatggcgcttgcggttcgtctcatcggccgccgccggttcctcccgccgccgctcgccgccgccgttgctcacctctctgccgcttcccagagcccgtgccaccaccaccacccacttccgacccccgcgctcccgttgccccctcgtgagctccatcctttcgctctccactggcgaagcttctcctggtactcccgctccggctccgggtctgatagcagtcccggcaccgctgccgcggacgctcgcggagaggacgtgtacatcgagaaggaaagcgtgcacttggatggcgtgacaatcgttgatgacgggggaggggtcgtcagtgaggcgggtgctgcggcggatgccgtgggagatgccgccggcgccacggccgacggcgtcgggggagtgccggaattggctgttagcacagttttggacctcatggacgggatccatagcctcaccggactgccgtggtggatgacaatctcctttttctactgtggccatgagattgtggatacttcccgtcctcatagtgcagttacagaagactgctgaaattggtgaagtgttccgaaaagtgtccacttcattaccccctcctcagcctggaagcaatttccgtgaacagtacactctgttccagaagaaaaagaaggagcttggttgcccctcatttatctggaattttgcctattttttggtacagttcccttgctttattctttggatgacgagtataaggagcatgtgcttgaataatcaccctggatttgataatggtgggattctgtggttccataacttgactgagtttccacatggtactttagctcccatctttcctatcttagttgctggtctgcattacctaaatgttcagatttcttttcaggggtcccagatcaaggatcacccaggaatttttggcttgctggctaagtactatagaatatacctcaatgtcctgactatccctttgtttcttgtcgcacatgtggttcctcagggatgcctggtctactggactacaaatggtttattttctgtagctcagatcagattccatgcatttaatttgaacaagcttgatgcggcaaaaaatgatgctgtccgcaagctgttgggattgccagatactagagctcaggttggttacagagcacaaaagtcacctcttgaggtacctgagatgatgcagtggtcacagcttgaagatgctaacttgcaaacgaaatcgatgccatctgacaagggaacagccagtgagagtacaactcctaattttgcaatgggaagtatggatggaaatatatctgcgtccagctcacctgaggagctacttgaacaagcattacagtatctgggcacaggctgccgagatcaagccattccactgatcagcagtagagagaaacccagatctgtacacagcgttgattgggatgggacaaaccctgttctcaaatagattgtttcccgaagccgcggtttgttttgaacatgctataccaaagattcaagaagatgaccctcttcttgtgcttgcgtattttggggcaggtctttcgaacaagcgtcagggggataatgagacggcaataaaactcctggagagattagcagagctcaaggaaccagaaaagcccatcaacaaaagccgctacttccaagggatgcttgctttggcaagtatattatatagagaaggccggaattcggaggctgccaaatatctgcggatggctattgcttatgatccttctgtagaaaggcttctcaaggaatgcgaggaaggaatggacgatcagccaaagccagaggagaagtgatgtgctggacctgaaaaagccacagtaacagagatagcacaccgcttttgtttttgaacactaaaaccgcccccagctttttaccctttacccatatgatcgtgcaaaacagagtgaagttgaataga

SEQ ID NO: 79338 - DNA, 1968 bp, Zea Mays
cacatgtcaagggtttacttgtcacttgcatgcacgtgacgaacgccatggcgcttgcggttcgtctcatcggccgccgccggttcctcccgccgccgctcgccgccgccgttgctcacctctctgccgcttcccagagcccgtgccaccaccaccacccacttccgacccccgcgctcccgttgccccctcgtgagctccatcctttcgctctccactggcgaagcttctcctggtactcccgctccggctccgggtctgatagcagtcccggcaccgctgccgcggacgctcgcggagaggacgtgtacatcgagaaggaaagcgtgcacttggatggcgtgacaatcgttgatgacgggggaggggtcgtcagtgaggcgggtgctgcggcggatgccgtgggagatgccgccggcgccacggccgacggcgtcgggggagtgccggaattggctgttagcacagttttggacctcatggacgggatccatagcctcaccggactgccgtggtggatgacaatctcctttttctactgtggccatgagattgtggatacttcccgtcctcatagtgcagttacagaagactgctgaaattggtgaagtgttccgaaaagtgtccacttcattaccccctcctcagcctggaagcaatttccgtgaacagtacactctgttccagaagaaaaagaaggagcttggttgcccctcatttatctggaattttgcctattttttggtacagttcccttgctttattctttggatgacgagtataaggagcatgtgcttgaataatcaccctggatttgataatggtgggattctgtggttccataacttgactgagtttccacatggtactttagctcccatctttcctatcttagttgctggtctgcattacctaaatgttcagatttcttttcaggggtcccagatcaaggatcacccaggaatttttggcttgctggctaagtactatagaatatacctcaatgtcctgactatccctttgtttcttgtcgcacatgtggttcctcagggatgcctggtctactggactacaaatggtttattttctgtagctcagcaattatccttgagaaatgatgctgtccgcaagctgttgggattgccagatactagagctcaggttggttacagagcacaaaagtcacctcttgaggtacctgagatgatgcagtggtcacagcttgaagatgctaacttgcaaacgaaatcgatgccatctgacaagggaacagccagtgagagtacaactcctaattttgcaatgggaagtatggatggaaatatatctgcgtccagctcacctgaggagctacttgaacaagcattacagtatctgggcacaggctgccgagatcaagccattccactgatcagtagagagaaacccagatctgtacacagcgttgattgggatgggacaaaccctgttctcaaatagattgtttcccgaagccgcggtttgttttgaacatgctataccaaagattcaagaagatgaccctcttcttgtgcttgcgtattttggggcaggtctttcgaacaagcgtcagggggataatgagacggcaataaaactcctggagagattagcagagctcaaggaaccagaaaagcccatcaacaaaagccgctacttccaagggatgcttgctttggcaagtatattatatagagaaggccggaattcggaggctgccaaatatctgcggatggctattgcttatgatccttctgtagaaaggcttctcaaggaatgcgaggaaggaatggacgatcagccaaagccagaggagaagtgatgtgctggacctgaaaaagccacagtaacagagatagcacaccgcttttgtttttgaacactaaaaccgcccccagctttttaccctttacccatatgatcgtgcaaaacagagtgaagttgaataga

SEQ ID NO: 79339 - DNA, 2058 bp, Zea Mays
ggtttacttgtcacttgcatgcacgtgacgaacgccatggcgcttgcggttcgtctcatcggccgccgccggttcctcccgccgccgctcgccgccgccgttgctcacctctctgccgcttcccagagcccgtgccaccaccaccacccacttccgacccccgcgctcccgttgccccctcgtgagctccatcctttcgctctccactggcgaagcttctcctggtactcccgctccggctccgggtctgatagcagtcccggcaccgctgccgcggacgctcgcggagaggacgtgtacatcgagaaggaaagcgtgcacttggatggcgtgacaatcgttgatgacgggggaggggtcgtcagtgaggcgggtgctgcggcggatgccgtgggagatgccgccggcgccacggccgacggcgtcgggggagtgccggaattggctgttagcacagttttggacctcatggacgggatccatagcctcaccggactgccgtggtggatgacaatctcctttttctactgtggccatgagattgtggatacttcccgtcctcatagtgcagttacagaagactgctgaaattggtgaagtgttccgaaaagtgtccacttcattaccccctcctcagcctggaagcaatttccgtgaacagtacactctgttccagaagaaaaagaaggagcttggttgcccctcatttatctggaattttgcctattttttggtacagttcccttgctttattctttggatgacgagtataaggagcatgtgcttgaataatcaccctggatttgataatggtgggattctgtggttccataacttgactgagtttccacatggtactttagctcccatctttcctatcttagttgctggtctgcattacctaaatgttcagatttcttttcaggggtcccagatcaaggatcacccaggaatttttggcttgctggctaagtactatagaatatacctcaatgtcctgactatccctttgtttcttgtcgcacatgtggttcctcagggatgcctggtctactggactacaaatggtttattttctgtagctcagatcagattccatgcatttaatttgaacaagcttgatgcggcaaagtaagcattgtgtactttatgttacattctattgttttttcaaatgattaaatcgcagcaattatccttgagaaatgatgctgtccgcaagctgttgggattgccagatactagagctcaggttggttacagagcacaaaagtcacctcttgaggtacctgagatgatgcagcttgaagatgctaacttgcaaacgaaatcgatgccatctgacaagggaacagccagtgagagtacaactcctaattttgcaatgggaagtatggatggaaatatatctgcgtccagctcacctgaggagctacttgaacaagcattacagtatctgggcacaggctgccgagatcaagccattccactgatcaggacagcagtagagagaaacccagatctgtacacagcgttgattgggatgggacaaaccctgttctcaaatagattgtttcccgaagccgcggtttgttttgaacatgctataccaaagattcaagaagatgaccctcttcttgtgcttgcgtattttggggcaggtctttcgaacaagcgtcagggggataatgagacggcaataaaactcctggagagattagcagagctcaaggaaccagaaaagcccatcaacaaaagccgctacttccaagggatgcttgctttggcaagtatattatatagagaaggccggaattcggaggctgccaaatatctgcggatggctattgcttatgatccttctgtagaaaggcttctcaaggaatgcgaggaaggaatggacgatcagccaaagccagaggagaagtgatgtgctggacctgaaaaagccacagtaacagagatagcacaccgcttttgtttttgaacactaaaaccgcccccagctttttaccctttacccatatgatcgtgcaaaacagagtgaagttgaataga

SEQ ID NO: 79340 - DNA, 1951 bp, Zea Mays
ggtttacttgtcacttgcatgcacgtgacgaacgccatggcgcttgcggttcgtctcatcggccgccgccggttcctcccgccgccgctcgccgccgccgttgctcacctctctgccgcttcccagagcccgtgccaccaccaccacccacttccgacccccgcgctcccgttgccccctcgtgagctccatcctttcgctctccactggcgaagcttctcctggtactcccgctccggctccgggtctgatagcagtcccggcaccgctgccgcggacgctcgcggagaggacgtgtacatcgagaaggaaagcgtgcacttggatggcgtgacaatcgttgatgacgggggaggggtcgtcagtgaggcgggtgctgcggcggatgccgtgggagatgccgccggcgccacggccgacggcgtcgggggagtgccggaattggctgttagcacagttttggacctcatggacgggatccatagcctcaccggactgccgtggtggatgacaatctcctttttctactgtggccatgagattgtggatacttcccgtcctcatagtgcagttacagaagactgctgaaattggtgaagtgttccgaaaagtgtccacttcattaccccctcctcagcctggaagcaatttccgtgaacagtacactctgttccagaagaaaaagaaggagcttggttgcccctcatttatctggaattttgcctattttttggtacagttcccttgctttattctttggatgacgagtataaggagcatgtgcttgaataatcaccctggatttgataatggtgggattctgtggttccataacttgactgagtttccacatggtactttagctcccatctttcctatcttagttgctggtctgcattacctaaatgttcagatttcttttcaggggtcccagatcaaggatcacccaggaatttttggcttgctggctaagtactatagaatatacctcaatgtcctgactatccctttgtttcttgtcgcacatgtggttcctcagggatgcctggtctactggactacaaatggtttattttctgtagctcagcaattatccttgagaaatgatgctgtccgcaagctgttgggattgccagatactagagctcaggttggttacagagcacaaaagtcacctcttgaggtacctgagatgatgcagcttgaagatgctaacttgcaaacgaaatcgatgccatctgacaagggaacagccagtgagagtacaactcctaattttgcaatgggaagtatggatggaaatatatctgcgtccagctcacctgaggagctacttgaacaagcattacagtatctgggcacaggctgccgagatcaagccattccactgatcagcagtagagagaaacccagatctgtacacagcgttgattgggatgggacaaaccctgttctcaaatagattgtttcccgaagccgcggtttgttttgaacatgctataccaaagattcaagaagatgaccctcttcttgtgcttgcgtattttggggcaggtctttcgaacaagcgtcagggggataatgagacggcaataaaactcctggagagattagcagagctcaaggaaccagaaaagcccatcaacaaaagccgctacttccaagggatgcttgctttggcaagtatattatatagagaaggccggaattcggaggctgccaaatatctgcggatggctattgcttatgatccttctgtagaaaggcttctcaaggaatgcgaggaaggaatggacgatcagccaaagccagaggagaagtgatgtgctggacctgaaaaagccacagtaacagagatagcacaccgcttttgtttttgaacactaaaaccgcccccagctttttaccctttacccatatgatcgtgcaaaacagagtgaagttgaataga

SEQ ID NO: 79341 - DNA, 2032 bp, Zea Mays
ggtttacttgtcacttgcatgcacgtgacgaacgccatggcgcttgcggttcgtctcatcggccgccgccggttcctcccgccgccgctcgccgccgccgttgctcacctctctgccgcttcccagagcccgtgccaccaccaccacccacttccgacccccgcgctcccgttgccccctcgtgagctccatcctttcgctctccactggcgaagcttctcctggtactcccgctccggctccgggtctgatagcagtcccggcaccgctgccgcggacgctcgcggagaggacgtgtacatcgagaaggaaagcgtgcacttggatggcgtgacaatcgttgatgacgggggaggggtcgtcagtgaggcgggtgctgcggcggatgccgtgggagatgccgccggcgccacggccgacggcgtcgggggagtgccggaattggctgttagcacagttttggacctcatggacgggatccatagcctcaccggactgccgtggtggatgacaatctcctttttctactgtggccatgagattgtggatacttcccgtcctcatagtgcagttacagaagactgctgaaattggtgaagtgttccgaaaagtgtccacttcattaccccctcctcagcctggaagcaatttccgtgaacagtacactctgttccagaagaaaaagaaggagcttggttgcccctcatttatctggaattttgcctattttttggtacagttcccttgctttattctttggatgacgagtataaggagcatgtgcttgaataatcaccctggatttgataatggtgggattctgtggttccataacttgactgagtttccacatggtactttagctcccatctttcctatcttagttgctggtctgcattacctaaatgttcagtctctagtatcaggcgaacacaaagtgtaacaagttaaaaattcatggctgggcgactttccttctgatttcttttcaggggtcccagatcaaggatcacccaggaatttttggcttgctggctaagtactatagaatatacctcaatgtcctgactatccctttgtttcttgtcgcacatgtggttcctcagggatgcctggtctactggactacaaatggtttattttctgtagctcagcaattatccttgagaaatgatgctgtccgcaagctgttgggattgccagatactagagctcaggttggttacagagcacaaaagtcacctcttgaggtacctgagatgatgcagtggtcacagcttgaagatgctaacttgcaaacgaaatcgatgccatctgacaagggaacagccagtgagagtacaactcctaattttgcaatgggaagtatggatggaaatatatctgcgtccagctcacctgaggagctacttgaacaagcattacagtatctgggcacaggctgccgagatcaagccattccactgatcaggacagcagtagagagaaacccagatctgtacacagcgttgattgggatgggacaaaccctgttctcaaatagattgtttcccgaagccgcggtttgttttgaacatgctataccaaagattcaagaagatgaccctcttcttgtgcttgcgtattttggggcaggtctttcgaacaagcgtcagggggataatgagacggcaataaaactcctggagagattagcagagctcaaggaaccagaaaagcccatcaacaaaagccgctacttccaagggatgcttgctttggcaagtatattatatagagaaggccggaattcggaggctgccaaatatctgcggatggctattgcttatgatccttctgtagaaaggcttctcaaggaatgcgaggaaggaatggacgatcagccaaagccagaggagaagtgatgtgctggacctgaaaaagccacagtaacagagatagcacaccgcttttgtttttgaacactaaaaccgcccccagctttttaccctttacccatatgatcgtgcaaaacagagtgaagttgaataga

SEQ ID NO: 79342 - DNA, 1972 bp, Zea Mays
ggtttacttgtcacttgcatgcacgtgacgaacgccatggcgcttgcggttcgtctcatcggccgccgccggttcctcccgccgccgctcgccgccgccgttgctcacctctctgccgcttcccagagcccgtgccaccaccaccacccacttccgacccccgcgctcccgttgccccctcgtgagctccatcctttcgctctccactggcgaagcttctcctggtactcccgctccggctccgggtctgatagcagtcccggcaccgctgccgcggacgctcgcggagaggacgtgtacatcgagaaggaaagcgtgcacttggatggcgtgacaatcgttgatgacgggggaggggtcgtcagtgaggcgggtgctgcggcggatgccgtgggagatgccgccggcgccacggccgacggcgtcgggggagtgccggaattggctgttagcacagttttggacctcatggacgggatccatagcctcaccggactgccgtggtggatgacaatctcctttttctactgtggccatgagattgtggatacttcccgtcctcatagtgcagttacagaagactgctgaaattggtgaagtgttccgaaaagtgtccacttcattaccccctcctcagcctggaagcaatttccgtgaacagtacactctgttccagaagaaaaagaaggagcttggttgcccctcatttatctggaattttgcctattttttggtacagttcccttgctttattctttggatgacgagtataaggagcatgtgcttgaataatcaccctggatttgataatggtgggattctgtggttccataacttgactgagtttccacatggtactttagctcccatctttcctatcttagttgctggtctgcattacctaaatgttcagatttcttttcaggggtcccagatcaaggatcacccaggaatttttggcttgctggctaagtactatagaatatacctcaatgtcctgactatccctttgtttcttgtcgcacatgtggttcctcagggatgcctggtctactggactacaaatggtttattttctgtagctcagatcagattccatgcatttaatttgaacaagcttgatgcggcaaaaaatgatgctgtccgcaagctgttgggattgccagatactagagctcaggttggttacagagcacaaaagtcacctcttgagtggtcacagcttgaagatgctaacttgcaaacgaaatcgatgccatctgacaagggaacagccagtgagagtacaactcctaattttgcaatgggaagtatggatggaaatatatctgcgtccagctcacctgaggagctacttgaacaagcattacagtatctgggcacaggctgccgagatcaagccattccactgatcagcagtagagagaaacccagatctgtacacagcgttgattgggatgggacaaaccctgttctcaaatagattgtttcccgaagccgcggtttgttttgaacatgctataccaaagattcaagaagatgaccctcttcttgtgcttgcgtattttggggcaggtctttcgaacaagcgtcagggggataatgagacggcaataaaactcctggagagattagcagagctcaaggaaccagaaaagcccatcaacaaaagccgctacttccaagggatgcttgctttggcaagtatattatatagagaaggccggaattcggaggctgccaaatatctgcggatggctattgcttatgatccttctgtagaaaggcttctcaaggaatgcgaggaaggaatggacgatcagccaaagccagaggagaagtgatgtgctggacctgaaaaagccacagtaacagagatagcacaccgcttttgtttttgaacactaaaaccgcccccagctttttaccctttacccatatgatcgtgcaaaacagagtgaagttgaataga

SEQ ID NO: 79343 - DNA, 2110 bp, Zea Mays
ggtttacttgtcacttgcatgcacgtgacgaacgccatggcgcttgcggttcgtctcatcggccgccgccggttcctcccgccgccgctcgccgccgccgttgctcacctctctgccgcttcccagagcccgtgccaccaccaccacccacttccgacccccgcgctcccgttgccccctcgtgagctccatcctttcgctctccactggcgaagcttctcctggtactcccgctccggctccgggtctgatagcagtcccggcaccgctgccgcggacgctcgcggagaggacgtgtacatcgagaaggaaagcgtgcacttggatggcgtgacaatcgttgatgacgggggaggggtcgtcagtgaggcgggtgctgcggcggatgccgtgggagatgccgccggcgccacggccgacggcgtcgggggagtgccggaattggctgttagcacagttttggacctcatggacgggatccatagcctcaccggactgccgtggtggatgacaatctcctttttctactgtggccatgagattgtggatacttcccgtcctcatagtgcagttacagaagactgctgaaattggtgaagtgttccgaaaagtgtccacttcattaccccctcctcagcctggaagcaatttccgtgaacagtacactctgttccagaagaaaaagaaggagcttggttgcccctcatttatctggaattttgcctattttttggtacagttcccttgctttattctttggatgacgagtataaggagcatgtgcttgaataatcaccctggatttgataatggtgggattctgtggttccataacttgactgagtttccacatggtactttagctcccatctttcctatcttagttgctggtctgcattacctaaatgttcagatttcttttcaggggtcccagatcaaggatcacccaggaatttttggcttgctggctaagtactatagaatatacctcaatgtcctgactatccctttgtttcttgtcgcacatgtggttcctcagggatgcctggtctactggactacaaatgcaattatccttgagaaatgatgctgtccgcaagctgttgggattgccagatactagagctcaggttggttacagagcacaaaagtcacctcttgaggtacctgagatgatgcaggcatgcccatctactttatgtgctgtagttattttcatcatacgcaactgaatcatgacactgaagttatcatgaattcagtggtcacagcttgaagatgctaacttgcaaacgaaatcgatgccatctgacaagggaacagccagtgagagtacaactcctaattttgcaatgggaagtatggatggaaatatatctgcgtccagctcacctgaggagctacttgaagtatgaatgcttacacattttttttgtcttggaatactgttccggtatgaattctgatgcacatacctatatgcttatcatcagcaagcattacagtatctgggcacaggctgccgagatcaagccattccactgatcaggacagcagtagagagaaacccagatctgtacacagcgttgattgggatgggacaaaccctgttctcaaatagattgtttcccgaagccgcggtttgttttgaacatgctataccaaagattcaagaagatgaccctcttcttgtgcttgcgtattttggggcaggtctttcgaacaagcgtcagggggataatgagacggcaataaaactcctggagagattagcagagctcaaggaaccagaaaagcccatcaacaaaagccgctacttccaagggatgcttgctttggcaagtatattatatagagaaggccggaattcggaggctgccaaatatctgcggatggctattgcttatgatccttctgtagaaaggcttctcaaggaatgcgaggaaggaatggacgatcagccaaagccagaggagaagtgatgtgctggacctgaaaaagccacagtaacagagatagcacaccgcttttgtttttgaacactaaaaccgcccccagctttttaccctttacccatatgatcgtgcaaaacagagtgaagttgaataga

SEQ ID NO: 79344 - DNA, 1924 bp, Zea Mays
ggtttacttgtcacttgcatgcacgtgacgaacgccatggcgcttgcggttcgtctcatcggccgccgccggttcctcccgccgccgctcgccgccgccgttgctcacctctctgccgcttcccagagcccgtgccaccaccaccacccacttccgacccccgcgctcccgttgccccctcgtgagctccatcctttcgctctccactggcgaagcttctcctggtactcccgctccggctccgggtctgatagcagtcccggcaccgctgccgcggacgctcgcggagaggacgtgtacatcgagaaggaaagcgtgcacttggatggcgtgacaatcgttgatgacgggggaggggtcgtcagtgaggcgggtgctgcggcggatgccgtgggagatgccgccggcgccacggccgacggcgtcgggggagtgccggaattggctgttagcacagttttggacctcatggacgggatccatagcctcaccggactgccgtggtggatgacaatctcctttttctactgtggccatgagattgtggatacttcccgtcctcatagtgcagttacagaagactgctgaaattggtgaagtgttccgaaaagtgtccacttcattaccccctcctcagcctggaagcaatttccgtgaacagtacactctgttccagaagaaaaagaaggagcttggttgcccctcatttatctggaattttgcctattttttggtacagttcccttgctttattctttggatgacgagtataaggagcatgtgcttgaataatcaccctggatttgataatggtgggattctgtggttccataacttgactgagtttccacatggggtcccagatcaaggatcacccaggaatttttggcttgctggctaagtactatagaatatacctcaatgtcctgactatccctttgtttcttgtcgcacatgtggttcctcagggatgcctggtctactggactacaaatggtttattttctgtagctcagatcagattccatgcatttaatttgaacaagcttgatgcggcaaaaaatgatgctgtccgcaagctgttgggattgccagatactagagctcaggttggttacagagcacaaaagtcacctcttgaggtacctgagatgatgcagtggtcacagcttgaagatgctaacttgcaaacgaaatcgatgccatctgacaagggaacagccagtgagagtacaactcctaattttgcaatgggaagtatggatggaaatatatctgcgtccagctcacctgaggagctacttgaacaagcattacagtatctgggcacaggctgccgagatcaagccattccactgatcaggacagcagtagagagaaacccagatctgtacacagcgttgattgggatgggacaaaccctgttctcaaatagattgtttcccgaagccgcggtttgttttgaacatgctataccaaagattcaagaagatgaccctcttcttgtgcttgcgtattttggggcaggtctttcgaacaagcgtcagggggataatgagacggcaataaaactcctggagagattagcagagctcaaggaaccagaaaagcccatcaacaaaagccgctacttccaagggatgcttgctttggcaagtatattatatagagaaggccggaattcggaggctgccaaatatctgcggatggctattgcttatgatccttctgtagaaaggcttctcaaggaatgcgaggaaggaatggacgatcagccaaagccagaggagaagtgatgtgctggacctgaaaaagccacagtaacagagatagcacaccgcttttgtttttgaacactaaaaccgcccccagctttttaccctttacccatatgatcgtgcaaaacagagtgaagttgaataga

SEQ ID NO: 79345 - DNA, 1960 bp, Zea Mays
ggtttacttgtcacttgcatgcacgtgacgaacgccatggcgcttgcggttcgtctcatcggccgccgccggttcctcccgccgccgctcgccgccgccgttgctcacctctctgccgcttcccagagcccgtgccaccaccaccacccacttccgacccccgcgctcccgttgccccctcgtgagctccatcctttcgctctccactggcgaagcttctcctggtactcccgctccggctccgggtctgatagcagtcccggcaccgctgccgcggacgctcgcggagaggacgtgtacatcgagaaggaaagcgtgcacttggatggcgtgacaatcgttgatgacgggggaggggtcgtcagtgaggcgggtgctgcggcggatgccgtgggagatgccgccggcgccacggccgacggcgtcgggggagtgccggaattggctgttagcacagttttggacctcatggacgggatccatagcctcaccggactgccgtggtggatgacaatctcctttttctactgtggccatgagattgtggatacttcccgtcctcatagtgcagttacagaagactgctgaaattggtgaagtgttccgaaaagtgtccacttcattaccccctcctcagcctggaagcaatttccgtgaacagtacactctgttccagaagaaaaagaaggagcttggttgcccctcatttatctggaattttgcctattttttggtacagttcccttgctttattctttggatgacgagtataaggagcatgtgcttgaataatcaccctggatttgataatggtgggattctgtggttccataacttgactgagtttccacatggtactttagctcccatctttcctatcttagttgctggtctgcattacctaaatgttcagatttcttttcaggggtcccagatcaaggatcacccaggaatttttggcttgctggctaagtactatagaatatacctcaatgtcctgactatccctttgtttcttgtcgcacatgtggttcctcagggatgcctggtctactggactacaaatggtttattttctgtagctcagcaattatccttgagaaatgatgctgtccgcaagctgttgggattgccagatactagagctcaggttggttacagagcacaaaagtcacctcttgaggtacctgagatgatgcagtggtcacagcttgaagatgctaacttgcaaacgaaatcgatgccatctgacaagggaacagccagtgagagtacaactcctaattttgcaatgggaagtatggatggaaatatatctgcgtccagctcacctgaggagctacttgaacaagcattacagtatctgggcacaggctgccgagatcaagccattccactgatcagcagtagagagaaacccagatctgtacacagcgttgattgggatgggacaaaccctgttctcaaatagattgtttcccgaagccgcggtttgttttgaacatgctataccaaagattcaagaagatgaccctcttcttgtgcttgcgtattttggggcaggtctttcgaacaagcgtcagggggataatgagacggcaataaaactcctggagagattagcagagctcaaggaaccagaaaagcccatcaacaaaagccgctacttccaagggatgcttgctttggcaagtatattatatagagaaggccggaattcggaggctgccaaatatctgcggatggctattgcttatgatccttctgtagaaaggcttctcaaggaatgcgaggaaggaatggacgatcagccaaagccagaggagaagtgatgtgctggacctgaaaaagccacagtaacagagatagcacaccgcttttgtttttgaacactaaaaccgcccccagctttttaccctttacccatatgatcgtgcaaaacagagtgaagttgaataga

SEQ ID NO: 79346 - DNA, 2014 bp, Zea Mays
ggtttacttgtcacttgcatgcacgtgacgaacgccatggcgcttgcggttcgtctcatcggccgccgccggttcctcccgccgccgctcgccgccgccgttgctcacctctctgccgcttcccagagcccgtgccaccaccaccacccacttccgacccccgcgctcccgttgccccctcgtgagctccatcctttcgctctccactggcgaagcttctcctggtactcccgctccggctccgggtctgatagcagtcccggcaccgctgccgcggacgctcgcggagaggacgtgtacatcgagaaggaaagcgtgcacttggatggcgtgacaatcgttgatgacgggggaggggtcgtcagtgaggcgggtgctgcggcggatgccgtgggagatgccgccggcgccacggccgacggcgtcgggggagtgccggaattggctgttagcacagttttggacctcatggacgggatccatagcctcaccggactgccgtggtggatgacaatctcctttttctactgtggccatgagattgtggatacttcccgtcctcatagtgcagttacagaagactgctgaaattggtgaagtgttccgaaaagtgtccacttcattaccccctcctcagcctggaagcaatttccgtgaacagtacactctgttccagaagaaaaagaaggagcttggttgcccctcatttatctggaattttgcctattttttggtacagttcccttgctttattctttggatgacgagtataaggagcatgtgcttgaataatcaccctggatttgataatggtgggattctgtggttccataacttgactgagtttccacatggtactttagctcccatctttcctatcttagttgctggtctgcattacctaaatgttcagtctctagtatcaggcgaacacaaagtgtaacaagttaaaaattcatggctgggcgactttccttctgatttcttttcaggggtcccagatcaaggatcacccaggaatttttggcttgctggctaagtactatagaatatacctcaatgtcctgactatccctttgtttcttgtcgcacatgtggttcctcagggatgcctggtctactggactacaaatggtttattttctgtagctcagcaattatccttgagaaatgatgctgtccgcaagctgttgggattgccagatactagagctcaggttggttacagagcacaaaagtcacctcttgagtggtcacagcttgaagatgctaacttgcaaacgaaatcgatgccatctgacaagggaacagccagtgagagtacaactcctaattttgcaatgggaagtatggatggaaatatatctgcgtccagctcacctgaggagctacttgaacaagcattacagtatctgggcacaggctgccgagatcaagccattccactgatcaggacagcagtagagagaaacccagatctgtacacagcgttgattgggatgggacaaaccctgttctcaaatagattgtttcccgaagccgcggtttgttttgaacatgctataccaaagattcaagaagatgaccctcttcttgtgcttgcgtattttggggcaggtctttcgaacaagcgtcagggggataatgagacggcaataaaactcctggagagattagcagagctcaaggaaccagaaaagcccatcaacaaaagccgctacttccaagggatgcttgctttggcaagtatattatatagagaaggccggaattcggaggctgccaaatatctgcggatggctattgcttatgatccttctgtagaaaggcttctcaaggaatgcgaggaaggaatggacgatcagccaaagccagaggagaagtgatgtgctggacctgaaaaagccacagtaacagagatagcacaccgcttttgtttttgaacactaaaaccgcccccagctttttaccctttacccatatgatcgtgcaaaacagagtgaagttgaataga

SEQ ID NO: 79347 - DNA, 1914 bp, Zea Mays
ggtttacttgtcacttgcatgcacgtgacgaacgccatggcgcttgcggttcgtctcatcggccgccgccggttcctcccgccgccgctcgccgccgccgttgctcacctctctgccgcttcccagagcccgtgccaccaccaccacccacttccgacccccgcgctcccgttgccccctcgtgagctccatcctttcgctctccactggcgaagcttctcctggtactcccgctccggctccgggtctgatagcagtcccggcaccgctgccgcggacgctcgcggagaggacgtgtacatcgagaaggaaagcgtgcacttggatggcgtgacaatcgttgatgacgggggaggggtcgtcagtgaggcgggtgctgcggcggatgccgtgggagatgccgccggcgccacggccgacggcgtcgggggagtgccggaattggctgttagcacagttttggacctcatggacgggatccatagcctcaccggactgccgtggtggatgacaatctcctttttctactgtggccatgagattgtggatacttcccgtcctcatagtgcagttacagaagactgctgaaattggtgaagtgttccgaaaagtgtccacttcattaccccctcctcagcctggaagcaatttccgtgaacagtacactctgttccagaagaaaaagaaggagcttggttgcccctcatttatctggaattttgcctattttttggtacagttcccttgctttattctttggatgacgagtataaggagcatgtgcttgaataatcaccctggatttgataatggtgggattctgtggttccataacttgactgagtttccacatggtactttagctcccatctttcctatcttagttgctggtctgcattacctaaatgttcagatttcttttcaggggtcccagatcaaggatcacccaggaatttttggcttgctggctaagtactatagaatatacctcaatgtcctgactatccctttgtttcttgtcgcacatgtggttcctcagggatgcctggtctactggactacaaatggtttattttctgtagctcagcaattatccttgagaaatgatgctgtccgcaagctgttgggattgccagatactagagctcagtggtcacagcttgaagatgctaacttgcaaacgaaatcgatgccatctgacaagggaacagccagtgagagtacaactcctaattttgcaatgggaagtatggatggaaatatatctgcgtccagctcacctgaggagctacttgaacaagcattacagtatctgggcacaggctgccgagatcaagccattccactgatcaggacagcagtagagagaaacccagatctgtacacagcgttgattgggatgggacaaaccctgttctcaaatagattgtttcccgaagccgcggtttgttttgaacatgctataccaaagattcaagaagatgaccctcttcttgtgcttgcgtattttggggcaggtctttcgaacaagcgtcagggggataatgagacggcaataaaactcctggagagattagcagagctcaaggaaccagaaaagcccatcaacaaaagccgctacttccaagggatgcttgctttggcaagtatattatatagagaaggccggaattcggaggctgccaaatatctgcggatggctattgcttatgatccttctgtagaaaggcttctcaaggaatgcgaggaaggaatggacgatcagccaaagccagaggagaagtgatgtgctggacctgaaaaagccacagtaacagagatagcacaccgcttttgtttttgaacactaaaaccgcccccagctttttaccctttacccatatgatcgtgcaaaacagagtgaagttgaataga

SEQ ID NO: 79348 - DNA, 2276 bp, Zea Mays
ggtttacttgtcacttgcatgcacgtgacgaacgccatggcgcttgcggttcgtctcatcggccgccgccggttcctcccgccgccgctcgccgccgccgttgctcacctctctgccgcttcccagagcccgtgccaccaccaccacccacttccgacccccgcgctcccgttgccccctcgtgagctccatcctttcgctctccactggcgaagcttctcctggtactcccgctccggctccgggtctgatagcagtcccggcaccgctgccgcggacgctcgcggagaggacgtgtacatcgagaaggaaagcgtgcacttggatggcgtgacaatcgttgatgacgggggaggggtcgtcagtgaggcgggtgctgcggcggatgccgtgggagatgccgccggcgccacggccgacggcgtcgggggagtgccggaattggctgttagcacagttttggacctcatggacgggatccatagcctcaccggactgccgtggtggatgacaatctcctttttctactgtggccatgagattgtggatacttcccgtcctcatagtgcagttacagaagactgctgaaattggtgaagtgttccgaaaagagaaattgagcagaagtatattctaaattccaacggatttccttatgcaatttaatacgttccattgacaattaaggatcaatacccctgtgcctcaattcaaacaaaaaagaggtcaatatcccctcctgaagtaattgtacgatactacgataacacctattgcctagtattgtttaactcaaaatacttacgtaacaggagcctgatttcagagatacatctgtggtattggctttaatagattgtgcattttcctcatgtttctgattgcattctcatatatcgtttttgaagtgtccacttcattaccccctcctcagcctggaagcaatttccgtgaacagtacactctgttccagaagaaaaagaaggagcttggttgcccctcatttatctggaattttgcctattttttggtacagttcccttgctttattctttggatgacgagtataaggagcatgtgcttgaataatcaccctggatttgataatggtgggattctgtggttccataacttgactgagtttccacatggtactttagctcccatctttcctatcttagttgctggtctgcattacctaaatgttcagagatttcttttcaggggtcccagatcaaggatcacccaggaatttttggcttgctggctaagtactatagaatatacctcaatgtcctgactatccctttgtttcttgtcgcacatgtggttcctcagggatgcctggtctactggactacaaatggtttattttctgtagctcagatcagattccatgcatttaatttgaacaagcttgatgcggcaaaaaatgatgctgtccgcaagctgttgggattgccagatactagagctcaggttggttacagagcacaaaagtcacctcttgagtggtcacagcttgaagatgctaacttgcaaacgaaatcgatgccatctgacaagggaacagccagtgagagtacaactcctaattttgcaatgggaagtatggatggaaatatatctgcgtccagctcacctgaggagctacttgaacaagcattacagtatctgggcacaggctgccgagatcaagccattccactgatcaggacagcagtagagagaaacccagatctgtacacagcgttgattgggatgggacaaaccctgttctcaaatagattgtttcccgaagccgcggtttgttttgaacatgctataccaaagattcaagaagatgaccctcttcttgtgcttgcgtattttggggcaggtctttcgaacaagcgtcagggggataatgagacggcaataaaactcctggagagattagcagagctcaaggaaccagaaaagcccatcaacaaaagccgctacttccaagggatgcttgctttggcaagtatattatatagagaaggccggaattcggaggctgccaaatatctgcggatggctattgcttatgatccttctgtagaaaggcttctcaaggaatgcgaggaaggaatggacgatcagccaaagccagaggagaagtgatgtgctggacctgaaaaagccacagtaacagagatagcacaccgcttttgtttttgaacactaaaaccgcccccagctttttaccctttacccatatgatcgtgcaaaacagagtgaagttgaataga

SEQ ID NO: 79349 - DNA, 1953 bp, Zea Mays
ggtttacttgtcacttgcatgcacgtgacgaacgccatggcgcttgcggttcgtctcatcggccgccgccggttcctcccgccgccgctcgccgccgccgttgctcacctctctgccgcttcccagagcccgtgccaccaccaccacccacttccgacccccgcgctcccgttgccccctcgtgagctccatcctttcgctctccactggcgaagcttctcctggtactcccgctccggctccgggtctgatagcagtcccggcaccgctgccgcggacgctcgcggagaggacgtgtacatcgagaaggaaagcgtgcacttggatggcgtgacaatcgttgatgacgggggaggggtcgtcagtgaggcgggtgctgcggcggatgccgtgggagatgccgccggcgccacggccgacggcgtcgggggagtgccggaattggctgttagcacagttttggacctcatggacgggatccatagcctcaccggactgccgtggtggatgacaatctcctttttctactgtggccatgagattgtggatacttcccgtcctcatagtgcagttacagaagactgctgaaattggtgaagtgttccgaaaagtgtccacttcattaccccctcctcagcctggaagcaatttccgtgaacagtacactctgttccagaagaaaaagaaggagcttggttgcccctcatttatctggaattttgcctattttttggtacagttcccttgctttattctttggatgacgagtataaggagcatgtgcttgaataatcaccctggatttgataatggtgggattctgtggttccataacttgactgagtttccacatggtactttagctcccatctttcctatcttagttgctggtctgcattacctaaatgttcagatttcttttcaggggtcccagatcaaggatcacccaggaatttttggcttgctggctaagtactatagaatatacctcaatgtcctgactatccctttgtttcttgtcgcacatgtggttcctcagggatgcctggtctactggactacaaatggtttattttctgtagctcagcaattatccttgagaaatgatgctgtccgcaagctgttgggattgccagatactagagctcaggttggttacagagcacaaaagtcacctcttgaggtacctgagatgatgcagtggtcacagcttgaagatgctaacttgcaaacgaaatcgatgccatctgacaagggaacagccagtgagagtacaactcctaattttgcaatgggaagtatggatggaaatatatctgcgtccagctcacctgaggagctacttgaatatctgggcacaggctgccgagatcaagccattccactgatcaggacagcagtagagagaaacccagatctgtacacagcgttgattgggatgggacaaaccctgttctcaaatagattgtttcccgaagccgcggtttgttttgaacatgctataccaaagattcaagaagatgaccctcttcttgtgcttgcgtattttggggcaggtctttcgaacaagcgtcagggggataatgagacggcaataaaactcctggagagattagcagagctcaaggaaccagaaaagcccatcaacaaaagccgctacttccaagggatgcttgctttggcaagtatattatatagagaaggccggaattcggaggctgccaaatatctgcggatggctattgcttatgatccttctgtagaaaggcttctcaaggaatgcgaggaaggaatggacgatcagccaaagccagaggagaagtgatgtgctggacctgaaaaagccacagtaacagagatagcacaccgcttttgtttttgaacactaaaaccgcccccagctttttaccctttacccatatgatcgtgcaaaacagagtgaagttgaataga

SEQ ID NO: 79350 - DNA, 1440 bp, Zea Mays
gaagtatattctaaattccaacggatttccttatgcaatttaatacgttccattgacaattaaggatcaatacccctgtgcctcaattcaaacaaaaaagagtgtccacttcattaccccctcctcagcctggaagcaatttccgtgaacagtacactctgttccagaagaaaaagaaggagcttggttgcccctcatttatctggaattttgcctattttttggtacagttcccttgctttattctttggatgacgagtataaggagcatgtgcttgaataatcaccctggatttgataatggtgggattctgtggttccataacttgactgagtttccacatggtactttagctcccatctttcctatcttagttgctggtctgcattacctaaatgttcagatttcttttcaggggtcccagatcaaggatcacccaggaatttttggcttgctggctaagtactatagaatatacctcaatgtcctgactatccctttgtttcttgtcgcacatgtggttcctcagggatgcctggtctactggactacaaatggtttattttctgtagctcagagcaattatccttgagaaatgatgctgtccgcaagctgttgggattgccagatactagagctcaggttggttacagagcacaaaagtcacctcttgagtggtcacagcttgaagatgctaacttgcaaacgaaatcgatgccatctgacaagggaacagccagtgagagtacaactcctaattttgcaatgggaagtatggatggaaatatatctgcgtccagctcacctgaggagctacttgaacaagcattacagtatctgggcacaggctgccgagatcaagccattccactgatcaggacagcagtagagagaaacccagatctgtacacagcgttgattgggatgggacaaaccctgttctcaaatagattgtttcccgaagccgcggtttgttttgaacatgctataccaaagattcaagaagatgaccctcttcttgtgcttgcgtattttggggcaggtctttcgaacaagcgtcagggggataatgagacggcaataaaactcctggagagattagcagagctcaaggaaccagaaaagcccatcaacaaaagccgctacttccaagggatgcttgctttggcaagtatattatatagagaaggccggaattcggaggctgccaaatatctgcggatggctattgcttatgatccttctgtagaaaggcttctcaaggaatgcgaggaaggaatggacgatcagccaaagccagaggagaagtgatgtgctggacctgaaaaagccacagtaacagagatagcacaccgcttttgtttttgaacactaaaaccgcccccagctttttaccctttacccatatgatcgtgcaaaacagagtgaagttgaataga

SEQ ID NO: 79351 - DNA, 1401 bp, Zea Mays
ggatttccttatgcaatttaatacgttccattgacaattaaggatcaatacccctgtgcctcaattcaaacaaaaaagagcctggaagcaatttccgtgaacagtacactctgttccagaagaaaaagaaggagcttggttgcccctcatttatctggaattttgcctattttttggtacagttcccttgctttattctttggatgacgagtataaggagcatgtgcttgaataatcaccctggatttgataatgtatgtttaagggtgggattctgtggttccataacttgactgagtttccacatggtactttagctcccatctttcctatcttagttgctggtctgcattacctaaatgttcagatttcttttcaggggtcccagatcaaggatcacccaggaatttttggcttgctggctaagtactatagaatatacctcaatgtcctgactatccctttgtttcttgtcgcacatgtggttcctcagggatgcctggtctactggactacaaatggtttattttctgtagctcagcaattatccttgagaaatgatgctgtccgcaagctgttgggattgccagatactagagctcaggttggttacagagcacaaaagtcacctcttgagtggtcacagcttgaagatgctaacttgcaaacgaaatcgatgccatctgacaagggaacagccagtgagagtacaactcctaattttgcaatgggaagtatggatggaaatatatctgcgtccagctcacctgaggagctacttgaacaagcattacagtatctgggcacaggctgccgagatcaagccattccactgatcaggacagcagtagagagaaacccagatctgtacacagcgttgattgggatgggacaaaccctgttctcaaatagattgtttcccgaagccgcggtttgttttgaacatgctataccaaagattcaagaagatgaccctcttcttgtgcttgcgtattttggggcaggtctttcgaacaagcgtcagggggataatgagacggcaataaaactcctggagagattagcagagctcaaggaaccagaaaagcccatcaacaaaagccgctacttccaagggatgcttgctttggcaagtatattatatagagaaggccggaattcggaggctgccaaatatctgcggatggctattgcttatgatccttctgtagaaaggcttctcaaggaatgcgaggaaggaatggacgatcagccaaagccagaggagaagtgatgtgctggacctgaaaaagccacagtaacagagatagcacaccgcttttgtttttgaacactaaaaccgcccccagctttttaccctttacccatatgatcgtgcaaaacagagtgaagttgaataga

SEQ ID NO: 79352 - DNA, 1414 bp, Zea Mays
atttccttatgcaatttaatacgttccattgacaattaaggatcaatacccctgtgcctcaattcaaacaaaaaagagtgtccacttcattaccccctcctcagcctggaagcaatttccgtgaacagtacactctgttccagaagaaaaagaaggagcttggttgcccctcatttatctggaattttgcctattttttggtacagttcccttgctttattctttggatgacgagtataaggagcatgtgcttgaataatcaccctggatttgataatggtgggattctgtggttccataacttgactgagtttccacatggtactttagctcccatctttcctatcttagttgctggtctgcattacctaaatgttcagatttcttttcaggggtcccagatcaaggatcacccaggaatttttggcttgctggctaagtactatagaatatacctcaatgtcctgactatccctttgtttcttgtcgcacatgtggttcctcagggatgcctggtctactggactacaaatggtttattttctgtagctcagcaattatccttgagaaatgatgctgtccgcaagctgttgggattgccagatactagagctcaggttggttacagagcacaaaagtcacctcttgagtggtcacagcttgaagatgctaacttgcaaacgaaatcgatgccatctgacaagggaacagccagtgagagtacaactcctaattttgcaatgggaagtatggatggaaatatatctgcgtccagctcacctgaggagctacttgaacaagcattacagtatctgggcacaggctgccgagatcaagccattccactgatcaggacagcagtagagagaaacccagatctgtacacagcgttgattgggatgggacaaaccctgttctcaaatagattgtttcccgaagccgcggtttgttttgaacatgctataccaaagattcaagaagatgaccctcttcttgtgcttgcgtattttggggcaggtctttcgaacaagcgtcagggggataatgagacggcaataaaactcctggagagattagcagagctcaaggaaccagaaaagcccatcaacaaaagccgctacttccaagggatgcttgctttggcaagtatattatatagagaaggccggaattcggaggctgccaaatatctgcggatggctattgcttatgatccttctgtagaaaggcttctcaaggaatgcgaggaaggaatggacgatcagccaaagccagaggagaagtgatgtgctggacctgaaaaagccacagtaacagagatagcacaccgcttttgtttttgaacactaaaaccgcccccagctttttaccctttacccatatgatcgtgcaaaacagagtgaagttgaataga

SEQ ID NO: 79353 - DNA, 1455 bp, Zea Mays
ctcaattcaaacaaaaaagagtgtccacttcattaccccctcctcagcctggaagcaatttccgtgaacagtacactctgttccagaagaaaaagaaggagcttggttgcccctcatttatctggaattttgcctattttttggtacagttcccttgctttattctttggatgacgagtataaggagcatgtgcttgaataatcaccctggatttgataatggtgggattctgtggttccataacttgactgagtttccacatggtactttagctcccatctttcctatcttagttgctggtctgcattacctaaatgttcaggatttcttttcaggggtcccagatcaaggatcacccaggaatttttggcttgctggctaagtactatagaatatacctcaatgtcctgactatccctttgtttcttgtcgcacatgtggttcctcagggatgcctggtctactggactacaaatggtttattttctgtagctcagatcagattccatgcatttaatttgaacaagcttgatgcggcaaagtaagcattgtgtactttatgttacattctattgttttttcaaatgattaaatcgcagcaattatccttgagaaatgatgctgtccgcaagctgttgggattgccagatactagagctcaggttggttacagagcacaaaagtcacctcttgagtggtcacagcttgaagatgctaacttgcaaacgaaatcgatgccatctgacaagggaacagccagtgagagtacaactcctaattttgcaatgggaagtatggatggaaatatatctgcgtccagctcacctgaggagctacttgaacaagcattacagtatctgggcacaggctgccgagatcaagccattccactgatcagcagtagagagaaacccagatctgtacacagcgttgattgggatgggacaaaccctgttctcaaatagattgtttcccgaagccgcggtttgttttgaacatgctataccaaagattcaagaagatgaccctcttcttgtgcttgcgtattttggggcaggtctttcgaacaagcgtcagggggataatgagacggcaataaaactcctggagagattagcagagctcaaggaaccagaaaagcccatcaacaaaagccgctacttccaagggatgcttgctttggcaagtatattatatagagaaggccggaattcggaggctgccaaatatctgcggatggctattgcttatgatccttctgtagaaaggcttctcaaggaatgcgaggaaggaatggacgatcagccaaagccagaggagaagtgatgtgctggacctgaaaaagccacagtaacagagatagcacaccgcttttgtttttgaacactaaaaccgcccccagctttttaccctttacccatatgatcgtgcaaaacagagtgaagttgaataga

SEQ ID NO: 79354 - DNA, 1176 bp, Zea Mays
gtcccaggtgttttaaggaactactgtgtcaattgagggtgggattctgtggttccataacttgactgagtttccacatggtactttagctcccatctttcctatcttagttgctggtctgcattacctaaatgttcagatttcttttcaggggtcccagatcaaggatcacccaggaatttttggcttgctggctaagtactatagaatatacctcaatgtcctgactatccctttgtttcttgtcgcacatgtggttcctcagggatgcctggtctactggactacaaatggtttattttctgtagctcagatcagattccatgcatttaatttgaacaagcttgatgcggcaaaatactagagctcaggttggttacagagcacaaaagtcacctcttgaggtacctgagatgatgcagtggtcacagcttgaagatgctaacttgcaaacgaaatcgatgccatctgacaagggaacagccagtgagagtacaactcctaattttgcaatgggaagtatggatggaaatatatctgcgtccagctcacctgaggagctacttgaacaagcattacagtatctgggcacaggctgccgagatcaagccattccactgcagtagagagaaacccagatctgtacacagcgttgattgggatgggacaaaccctgttctcaaatagattgtttcccgaagccgcggtttgttttgaacatgctataccaaagattcaagaagatgaccctcttcttgtgcttgcgtattttggggcaggtctttcgaacaagcgtcagggggataatgagacggcaataaaactcctggagagattagcagagctcaaggaaccagaaaagcccatcaacaaaagccgctacttccaagggatgcttgctttggcaagtatattatatagagaaggccggaattcggaggctgccaaatatctgcggatggctattgcttatgatccttctgtagaaaggcttctcaaggaatgcgaggaaggaatggacgatcagccaaagccagaggagaagtgatgtgctggacctgaaaaagccacagtaacagagatagcacaccgcttttgtttttgaacactaaaaccgcccccagctttttaccctttacccatatgatcgtgcaaaacagagtgaagttgaataga

SEQ ID NO: 79355 - DNA, 1130 bp, Zea Mays
tgatttcttttcaggggtcccagatcaaggatcacccaggaatttttggcttgctggctaagtactatagaatatacctcaatgtcctgactatccctttgtttcttgtcgcacatgtggttcctcagggatgcctggtctactggactacaaatggtttattttctgtagctcagatcagattccatgcatttaatttgaacaagcttgatgcggcaaagtaagcattgtgtactttatgttacattctattgttttttcaaatgattaaatcgcagcaattatccttgagaaatgatgctgtccgcaagctgttgggattgccagatactagagctcaggttggttacagagcacaaaagtcacctcttgagtggtcacagcttgaagatgctaacttgcaaacgaaatcgatgccatctgacaagggaacagccagtgagagtacaactcctaattttgcaatgggaagtatggatggaaatatatctgcgtccagctcacctgaggagctacttgaacaagcattacagtatctgggcacaggctgccgagatcaagccattccactgatcagtagagagaaacccagatctgtacacagcgttgattgggatgggacaaaccctgttctcaaatagattgtttcccgaagccgcggtttgttttgaacatgctataccaaagattcaagaagatgaccctcttcttgtgcttgcgtattttggggcaggtctttcgaacaagcgtcagggggataatgagacggcaataaaactcctggagagattagcagagctcaaggaaccagaaaagcccatcaacaaaagccgctacttccaagggatgcttgctttggcaagtatattatatagagaaggccggaattcggaggctgccaaatatctgcggatggctattgcttatgatccttctgtagaaaggcttctcaaggaatgcgaggaaggaatggacgatcagccaaagccagaggagaagtgatgtgctggacctgaaaaagccacagtaacagagatagcacaccgcttttgtttttgaacactaaaaccgcccccagctttttaccctttacccatatgatcgtgcaaaacagagtgaagttgaataga

SEQ ID NO: 79356 - DNA, 1636 bp, Zea Mays
ggcgaggtattcggtcaacgatcggtcgggactccggactcgggagtcggcactcgggtctcgacgtctcgtctcgtctcgtctcgcctgcccgcagccccttggcttcgttccatccggcttctcggcggcggcggagaggagggggatggcgcaccggctgctgcgggacgcgcaggcggacgggtgggagcggtcggacttccccatcatctgcgagtcatgcctcggcgacaacccctacgtccggatgttaagagctgaatatgacaaagaatgcaaaatttgtgcacgtccttttactgtattccggtggcgtcctgggcgagatgcaagcaggtccgagatacagcactctctatcaattccaatgatgcaattccaaggagtgatgtcaatcgcgaatattttgcagaagagcatgataggagggccagagctggcatagactatgattcatcctatgggaaggctcgcccaaatgataccattctgaagcttcaaaggacagcaccatattacaagaggaacagagctcatgtttgcagtttctttgtgcgaggtgaatgtacaagaggagctgagtgcccttatcgtcatgagatgcctgaaactggggagttatctcagcagaacattaaagatcgctactatggagttaatgatccagttgcactgaaacttttgagcaaggcaggtgagatgccatccctgacaccaccagatgatgagactataaggaccctctacattggcggactcgatagcagaataaccgagcaggatttgagggatcagttttatgcccatggtgagatcgagtccataaggatggtacttcaacgtgcaatcgcatttgtgacgtatactacaagagaaggcgcagagaaggctgcagaagagcttgctaataagctagtcatcaagggcgtgcgcctgaagctgatgtggggcaagcctcaggccccaaagcctgaggaggatgagtctgggaggctggggcaggtttcccacggagggctgctccctagggctgtcatatctcagcagcagagcggtgaccagcctcagccccccgggatggagggccaacagcaacaggctgcaccagcatcgtactacttcaacattccagcaccaccagcaacggagcggactgtgtatccatccatggatccacagaggatgggtgctatagtaaaaccacatgacagtgaaggcaaaccagggccgcagcaagccgggcaagctcaggcatcaagcaacccagcacaagggggcggctatcctgcaccaccgccatactaccatggtggagggcagcagcagccgcctgatggccctccagctcagcagcagccacagcagccaattcagaactgaagtcctgtcaagatgttgggtattggtactgctctaactgctcggcaggagaatgcaacccccgtgggtcaccagctttcgtaatttcttaatttgtggttaacagtaaaaactttgttgtattgcttatcaacgtttgaagaaaaaccgtgagatataccggatgtatccagcttctggattttgtggtacctgctgagtttcatcatctttttcaggtcgacctaacgactagtaaaaatactgacgcaag

SEQ ID NO: 79357 - DNA, 1546 bp, Zea Mays
cttggggcttgtgctgccaagaaaatatcatgctaccattggagagctgattcggctgtttccaaccacgagttaagagctgaatatgacaaagaatgcaaaatttgtgcacgtccttttactgtattccggtggcgtcctgggcgagatgcaaggtacaagaagactgagatctgccagacatgttgcaagctaaagaatgtctgccaggtctgcctgctggatcttgaatatggtctgcctgttcaggtccgagatacagcactctctatcaattccaatgatgcaattccaaggagtgatgtcaatcgcgaatattttgcagaagagcatgataggagggccagagctggcatagactatgattcatcctatgggaaggctcgcccaaatgataccattctgaagcttcaaaggacagcaccatattacaagaggaacagagctcatgtttgcagtttctttgtgcgaggtgaatgtacaagaggagctgagtgcccttatcgtcatgagatgcctgaaactggggagttatctcagcagaacattaaagatcgctactatggagttaatgatccagttgcactgaaacttttgagcaaggcaggtgagatgccatccctgacaccaccagatgatgagactataaggaccctctacattggcggactcgatagcagaataaccgagcaggatttgagggatcagttttatgcccatggtgagatcgagtccataaggatggtacttcaacgtgcaatcgcatttgtgacgtatactacaagagaaggcgcagagaaggctgcagaagagcttgctaataagctagtcatcaagggcgtgcgcctgaagctgatgtggggcaagcctcaggccccaaagcctgaggaggatgagtctgggaggctggggcaggtttcccacggagggctgctccctagggctgtcatatctcagcagcagagcggtgaccagcctcagccccccgggatggagggccaacagcaacaggctgcaccagcatcgtactacttcaacattccagcaccaccagcaacggagcggactgtgtatccatccatggatccacagaggatgggtgctatagtaaaaccacatgacagtgaaggcaaaccagggccgcagcaagccgggcaagctcaggcatcaagcaacccagcacaagggggcggctatcctgcaccaccgccatactaccatggtggagggcagcagcagccgcctgatggccctccagctcagcagcagccacagcagccaattcagaactgaagtcctgtcaagatgttgggtattggtactgctctaactgctcggcaggagaatgcaacccccgtgggtcaccagctttcgtaatttcttaatttgtggttaacagtaaaaactttgttgtattgcttatcaacgtttgaagaaaaaccgtgagatataccggatgtatccagcttctggattttgtggtacctgctgagtttcatcatctttttcaggtcgacctaacgactagtaaaaatactgacgcaag

SEQ ID NO: 79358 - DNA, 1608 bp, Zea Mays
cgcaaagataaacaactttgattaggttcaagcatcggtgtggctgttgtggcctcggccgtcgtctgtacgtacttgacccatgagaggaagaagctgaccaaaatcaagcggaagtatttccaacagcacggcgggatgcttctgctgcacgagataagcctaaagcaaggaactgccttcaccgtcttcacagaagcagagctcatcgaggcgaccggcaacttcgctgacaagaacatccttggccgcggtggcttcggcaccgtctacaggggcctgctcaaggacggcggtgtcgtcgcggttaaacggtgcgtctcgtcgatggccagcgagcagcagcagaaggagttcggcaaggagatgctcatcctctcccagatcaaccacaagaacatcgtcaagctcctgggctgctgcctcgaagtggaggtcccgatgctagtctacgagttcatccccaatggcacgctgttccagttcatccatggtgacggtggctctcgcagcgcccccttctcggttcggatacgcatcgccctcgagtccgcgctggcgctgtcctacctccactcgtgggcgtcgccaccgatcctccacggcgacgtcaagtcgtccaacatactcctggaccagaactacgaggcgaaggtgtcggacttcggggcctcgatcctggcgccggcggacaagagccagttcatgaccctggtgcaggggacctgcgggtacctggaccccgagtacatgcagacctgccagctgacggacaagagcgacgtgtacagcttcggcgtcgtcctcctggagctgctcaccggcagcacggcgttcaacctggaaggccccgagagcgagcggagcctctcgctgcgcttcctgaacgccatgaaggagcgcaggctcggggatatcatcgacggccgcatcaaggccgacagcgacgccgcgctgctcgaggaggtcgcggagctcgcgctgcagtgcctggacatggtcggcgagaggcggccgaccatgagagatgtcgccgagaggctggacgtgctggccaaggccatgcagcagcagcacccgtgggtgccagcgcagcatagaccggaggagatggagagccttcttggggagtcgccggtggccagcgcggagatgaccagcaccggaaacttcagcatggaggagaggatcgtgcatgggctgctggattctgggcgttagaataggccatgctacaatagtaccacgtattttcggagatggtccgattctcatgtgtttctttgtaatggaatgccaaaattcgttagaacttgtcatacacacgccgaagaacacctccagtgcaaagccacgcatatttagacgagagtataatatggatactgggttagctgtgtctgataaggtaagaatatatatcgacattttatatagtcgtctgctctctcctgcggtggcgcacggcagcccgcagcctagagatgtaaaatgtacatggtatcgatccaattcatatctgagtccgagtatttagtattcgattcgtatctgatctttatttgtatatgtatgctcaaagttatatttttaagtattcatttaaat

SEQ ID NO: 79359 - DNA, 6399 bp, Zea Mays
gtgagccccccggccgttggcgccttgcgcgcgcgtcctcgccaggtgccgcgcgccccgtgcatgccgcgggcggccagcacgtggctcgtaatggacccgcccatgacgaatggaattgggaggacgcggccatgaatccacccatggtttgtgttgataaatcgtgcatgcaggttgccatcgcgtgcaccagagagtcagagtgcggagggacctcgtcgcaaacctcacttgcccggcccaaccgtacgtgacgctcctcctctataaaaggagacgcgtgcgctgcagtgtgcacagaacagcccgtcgcgcgccgctgcgttgagccaaggcgcaatggcaacctccacctcagttcccgtcctcctgctcctcgccgccgccgccggcctcctcctgctccccggctcgctggcgtggcagagcagcaactgtgcaccgggcgcgcccggcagtggctcgccgacgtggccttcacccggctccggctccggcggcggccacagcaagccgcccaagcaccaccatggcaagccgcccaagtgcccgccgtgcaaccctccgtacgtgcctccgacgcctcggccgtcaccgccgtacgtgccaccgtatgtcccgccgacgcctcggccgtcaccgccctacgtgccaccatacgtccccgtcccgccgacgcctcggccctcaccgccgtacgtgccaccatacgtccccgtccccccgacgcctcggccctcaccgccctacgtgccaccatacgtccccgtcccgccgacgcctcggccgtcaccgccgtacgtacccccgacgccacggccgccgactccgccctacgttccaccgacgccgccctacgtcccaccgacgcctcggccatcaccaccaccgtacgtgccaccctacgtccccccgacgcctcggccatcaccaccctacgtgccaccgtacgttccgccgacgccgccggcggtgcggacgtgcccgatcgacacgctgaagctgaacgcgtgcgtggacgtgctgagcgggctgatccacctggtgatcgggcaggaggccaggtccaagtgctgcccgctggtgcagggggtggcggacctggacgcggcgctgtgcctctgcaccaccatccgcgcgcgcctgctcaacatcaacatctacctccccatcgcgctcaacctgctcatcacctgcggcaagcacgcgccgtcgggcttccagtgcccgccgctctacgactgatgaacaccaccaccagccaacacttctatacgcgccgccatgcatgcatgatgtgatggcatcctgtgcaagctagcgctagctagtagtagcatgtctaccatttgctccgtgatttctctagttcttgctctcgcgagtatgcgtacgtaatgcgttgcttctcgtcaggactcgggaacttttccaactccgatgctaagcgtgtagcttgcttaatcagtcgatgtaccatgttaatcaagtgctagccctttctctgctctgtcgtcgaagttcttcggtcttcacttcttgatctgcagatgatatatgaaaacgttatacgaaatggaatataatattctatcttgttgacaacgactgactctggcactgcgaagtgttgcatgcagaacttttatatgaataccaaagttttttttttgcctatgtttttggcagtgtaatatggaggcatgtgttctaatatttgcagggaagcacctctttgttgacgtacgattctgatgtgatgtagaactaaggaacattttttttggacatttcgattgttttgtcggtgtactcttaactattttgttttccgtatgtggttgttagacagtttacaggttcctaggaggtgcaggtgcttaaatggaggtgcttaaacggctaaaactaaagggatgattcaagtaacggattaacggtgacaaagcagaaggaaaaaatgacagctctagtctaacccacttattcgatgcaatcacgttcagcagcttctgttgcttctacttcttgattcagatatattataagttagatcataacaatgattattggtcagacaattacagttttaatgcccccctctatcgatggtattcaatctcgattttcaaatgatgagcatgaagattaaggattgtctagttctaacttctaagtattagtagtgttcgagggatacttggactagtgatagaatcttagttttatttctttagccgtactataaggggtatgaatggaaagcttgacctatagttgagtatatatagtagttccctctatcttcactagatttcgtctagtgcagcaccattgagtccgttgtgcaccagacatcacaacatcggacagaagtcgtcatagcggcagctgcagcctccactcatcggacgtgtacagtagtgtatcgtacatagcctccatcaaattggtatgaagagatgtccacccaagctgtcccgttccatagacgttttctcgaggaacaattttcctagtatggcaattggcaaaattagctctgcaccaaaagtggcatatgaatgggcctacaacttgggctttaggagttgtctgggtagacgggctaaaaatgtctgttcgcaacgcccgcgcacacagagcaggcaagcaagggcgtctcagtcagagccccaccaggctgcccactcggcccagcagacaaacaggcccaccaggctggccgactaagaattcacaccacgtccttggtccggtggtaaccgcagacccgtacctcattccggctcccttctcccgtacgaattcaaggcgcacgcggacgcacggcaatacggcacggcgctcagatctcaacggctgccgttgccggacagcgagcaccctcgaccgtcgtgtcacctgacaacgcagccgcagcagcttccttcccctgcaaggaagaacgagaatcgaatgcctcgcactgacgtggcagtccggaccaaccaatcatacagcgcccccgaaaaacccacgccctcccaaagaccgcaaccgcaaaaggcttgcacagcacgctcctcctcgattcccgcctgccgcgcacgcgccgccgtcgcactgacatcaaggacccacgtgccggctcgcagcgcagacggcagaattcttgtgcattctatggccgactgacatctgggccagcgcgtcggtttcttgggctccggcgccgcgggagtgccgcccaccaaccccacccgcgctccacgacgccaaatccgcgcgggaaacgcctccgcgcccgcgcgccaaacccaatccaaacccaaacattttcttctccagcgagcacccaaaaaaaataaatagatcctccagctccagctccgcttcattactcctcgcctcttccgcgcccaaacactaccgcctccctcccacccctagtccccctacccccccatccaatcctctgctcgccttgtctcgacccggcagcggcggcggcttgggcgcgcacacacaccaggtgttcgattggagtcctcgccgaagcggaagatgtacgtggtcaagagggacggccgccaggagacggtgcacttcgacaagatcacggcgcgcctcaagaagctcagctacggcctcagccaggaccactgcgacccggtgctcgtcgcgcagaaggtctgtgcgggggtctacaagggcgtcaccaccagccagctcgacgagctcgccgccgagaccgccgcggccatgaccgcgtcccaccccgactacgcctcgctggcggcgaggattgctgtgtcgaacctgcacaagaacacaaagaagtccttctcggagacgattaaggacatgtacatgcacttcaacaagagatccgggctgatggcccctcttgtcgctgaagatgtttatgaaatcatcatgaagaatgctgctcgcttggacagtgagataatttatgatagggatttcgactacgactactttggcttcaaaactctggagaggtcttacctgttgaagcttgatggtaaggtcgttgaaaggccgcagcacatgttaatgagggtttcactggggatacacaaggaagacatcgagtctgccatcaggacgtaccatctgatgtcccagcgctggtttactcatgcttcaccgacgcttttcaatgctggcacgccgaggccccaattaagcagctgttttcttatatgcatgaaagatgacagcattgagggaatctatgaaaccctgaaagagtgtgctgtaataagcaaatctgctggaggaattggtgtctcagttcataatatccgtgctactgggagttatattcgaggaacaaatggatcatcaaatggaattgttcctatgttacgtgtctttaatgatactgctcgctatgttgatcagggtggtggcaaaagaaagggtgcatttgctgtatacttggagccttggcatgctgatatttttgagttccttgatctgagaaagaaccatgggaaggaggaaaatcgtgcaagggatcttttctatgcgctatgggttcctgatttattcatgcaaagagtccagaataatggagaatggtcattattttgccctaatgaagctccagggttggctgattcctggggtgaggagtttgataatttgtacaagaaatatgagagccaaggcaaggcaaagaaagttgttccggcacagaccctttggtttgacattttgaaggcacagatagagactggtacaccatatatgctttataaggatacttgcaataggaaaagtaaccagcagaatctgggcacaattaaatcgtcaaacctgtgcactgaaataattgagtttacaagccctactgagaccgctgtctgcaacctagcatctattgctttacctcgttttgttcgggaaaaggatgttccgttggagtcccatccatctaagcttgtgggtagcagtgattcaaaaaatagatattttgattttgagaagctagctgaggttacctcaactgttacttacaatcttaacaaaattatcgatattaattactatcctgttgagacagcaaagaggtcaaacatgcgtcacaggccaattggcataggtgttcaaggcctggcagatactttcatattactgggcatgccgtttgattcaccagaggctcaacagttgaataaggatatattcgaaactatctactatcatgctctgaaagcttctgctgaacttgctgctaaagaaggtccctatgaaacatatgaagggagccctgtcagcaagtgccatctaacagatggaactggccatctctaagggagaccatttcaaaagttgggataagaaattctcttcttgttgctccaatgcccactgcttccactagtcagattcttggcaacaatgagtgttttgaaccctacacgtctaatatatacagtcgacgtgttctaagtggggaatttgttgtggtcaacaagcatcttcttcatgatctgactgaaatgggcatttggactcctactttgaaaaaccagataatatacgacgacggttctgtccagaagatagcagaaatcccggacgatcttaaagcaatctacaaaactgtttgggagatcaagcagaaaactttagttgacatggcggtcgaccgcggatgctacatcgaccaaagccagagcctcaatgtccacatggagcaagcaaactttgggaagctgacgtctcttcacttccatgcttggtccaagggcctgaaaactggaatgtactatctacgcacacgagctgctgctgatgcgatcaagttcacagtggataccacgcttctgaaggagaatgggaacggggttagcgatggaaagcccgcggaggaagacgtagacgctaaaatggcacagatggtctgttctttgaacaaccgggaagagtgcctggcgtgtggaagctagattggagattccatctggacactgcacttcgtgatctgtgaacacaacattacatacagccggctgatgattggagctcagtaaccagaacgaagtctgtgatgtaggtcgagttggaagttcccataatgggaatagcttgtacctgaatactgctacggcgctacctctggtctgtattgctctaaggtgtttgtgctgctgccaatgtactgtaaatatctaccagcgtcaatgttgtcgatgtgctctaagatacagtatgttttaaccgtgctacactctttgcattggatcgaacatgatgtaatgcatcgtcttccataatgatacgagtgctggaaaacagaacaatgtaaactaattagtctgtatcctcgatcgcgatatgcacttggtcctttcggcagtgtctgtctgcacagtatttcct

SEQ ID NO: 79360 - DNA, 6416 bp, Zea Mays
gtgagccccccggccgttggcgccttgcgcgcgcgtcctcgccaggtgccgcgcgccccgtgcatgccgcgggcggccagcacgtggctcgtaatggacccgcccatgacgaatggaattgggaggacgcggccatgaatccacccatggtttgtgttgataaatcgtgcatgcaggttgccatcgcgtgcaccagagagtcagagtgcggagggacctcgtcgcaaacctcacttgcccggcccaaccgtacgtgacgctcctcctctataaaaggagacgcgtgcgctgcagtgtgcacagaacagcccgtcgcgcgccgctgcgttgagccaaggcgcaatggcaacctccacctcagttcccgtcctcctgctcctcgccgccgccgccggcctcctcctgctccccggctcgctggcgtggcagagcagcaactgtgcaccgggcgcgcccggcagtggctcgccgacgtggccttcacccggctccggctccggcggcggccacagcaagccgcccaagcaccaccatggcaagccgcccaagtgcccgccgtgcaaccctccgtacgtgcctccgacgcctcggccgtcaccgccgtacgtgccaccgtatgtcccgccgacgcctcggccgtcaccgccctacgtgccaccatacgtccccgtcccgccgacgcctcggccctcaccgccgtacgtgccaccatacgtccccgtccccccgacgcctcggccctcaccgccctacgtgccaccatacgtccccgtcccgccgacgcctcggccgtcaccgccgtacgtacccccgacgccacggccgccgactccgccctacgttccaccgacgccgccctacgtcccaccgacgcctcggccatcaccaccaccgtacgtgccaccctacgtccccccgacgcctcggccatcaccaccctacgtgccaccgtacgttccgccgacgccgccggcggtgcggacgtgcccgatcgacacgctgaagctgaacgcgtgcgtggacgtgctgagcgggctgatccacctggtgatcgggcaggaggccaggtccaagtgctgcccgctggtgcagggggtggcggacctggacgcggcgctgtgcctctgcaccaccatccgcgcgcgcctgctcaacatcaacatctacctccccatcgcgctcaacctgctcatcacctgcggcaagcacgcgccgtcgggcttccagtgcccgccgctctacgactgatgaacaccaccaccagccaacacttctatacgcgccgccatgcatgcatgatgtgatggcatcctgtgcaagctagcgctagctagtagtagcatgtctaccatttgctccgtgatttctctagttcttgctctcgcgagtatgcgtacgtaatgcgttgcttctcgtcaggactcgggaacttttccaactccgatgctaagcgtgtagcttgcttaatcagtcgatgtaccatgttaatcaagtgctagccctttctctgctctgtcgtcgaagttcttcggtcttcacttcttgatctgcagatgatatatgaaaacgttatacgaaatggaatataatattctatcttgttgacaacgactgactctggcactgcgaagtgttgcatgcagaacttttatatgaataccaaagttttttttttgcctatgtttttggcagtgtaatatggaggcatgtgttctaatatttgcagggaagcacctctttgttgacgtacgattctgatgtgatgtagaactaaggaacattttttttggacatttcgattgttttgtcggtgtactcttaactattttgttttccgtatgtggttgttagacagtttacaggttcctaggaggtgcaggtgcttaaatggaggtgcttaaacggctaaaactaaagggatgattcaagtaacggattaacggtgacaaagcagaaggaaaaaatgacagctctagtctaacccacttattcgatgcaatcacgttcagcagcttctgttgcttctacttcttgattcagatatattataagttagatcataacaatgattattggtcagacaattacagttttaatgcccccctctatcgatggtattcaatctcgattttcaaatgatgagcatgaagattaaggattgtctagttctaacttctaagtattagtagtgttcgagggatacttggactagtgatagaatcttagttttatttctttagccgtactataaggggtatgaatggaaagcttgacctatagttgagtatatatagtagttccctctatcttcactagatttcgtctagtgcagcaccattgagtccgttgtgcaccagacatcacaacatcggacagaagtcgtcatagcggcagctgcagcctccactcatcggacgtgtacagtagtgtatcgtacatagcctccatcaaattggtatgaagagatgtccacccaagctgtcccgttccatagacgttttctcgaggaacaattttcctagtatggcaattggcaaaattagctctgcaccaaaagtggcatatgaatgggcctacaacttgggctttaggagttgtctgggtagacgggctaaaaatgtctgttcgcaacgcccgcgcacacagagcaggcaagcaagggcgtctcagtcagagccccaccaggctgcccactcggcccagcagacaaacaggcccaccaggctggccgactaagaattcacaccacgtccttggtccggtggtaaccgcagacccgtacctcattccggctcccttctcccgtacgaattcaaggcgcacgcggacgcacggcaatacggcacggcgctcagatctcaacggctgccgttgccggacagcgagcaccctcgaccgtcgtgtcacctgacaacgcagccgcagcagcttccttcccctgcaaggaagaacgagaatcgaatgcctcgcactgacgtggcagtccggaccaaccaatcatacagcgcccccgaaaaacccacgccctcccaaagaccgcaaccgcaaaaggcttgcacagcacgctcctcctcgattcccgcctgccgcgcacgcgccgccgtcgcactgacatcaaggacccacgtgccggctcgcagcgcagacggcagaattcttgtgcattctatggccgactgacatctgggccagcgcgtcggtttcttgggctccggcgccgcgggagtgccgcccaccaaccccacccgcgctccacgacgccaaatccgcgcgggaaacgcctccgcgcccgcgcgccaaacccaatccaaacccaaacattttcttctccagcgagcacccaaaaaaaataaatagatcctccagctccagctccgcttcattactcctcgcctcttccgcgcccaaacactaccgcctccctcccacccctagtccccctacccccccatccaatcctctgctcgccttgtctcgacccggcagcggcggcggcttgggcgcgcacacacaccaggtgttcgattggagtcctcgccgaagcggaagatgtacgtggtcaagagggacggccgccaggagacggtgcacttcgacaagatcacggcgcgcctcaagaagctcagctacggcctcagccaggaccactgcgacccggtgctcgtcgcgcagaaggtctgtgcgggggtctacaagggcgtcaccaccagccagctcgacgagctcgccgccgagaccgccgcggccatgaccgcgtcccaccccgactacgcctcgctggcggcgaggattgctgtgtcgaacctgcacaagaacacaaagaagtccttctcggagacgattaaggacatgtacatgcacttcaacaagagatccgggctgatggcccctcttgtcgctgaagatgtttatgaaatcatcatgaagaatgctgctcgcttggacagtgagataatttatgatagggatttcgactacgactactttggcttcaaaactctggagaggtcttacctgttgaagcttgatggtaaggtcgttgaaaggccgcagcacatgttaatgagggtttcactggggatacacaaggaagacatcgagtctgccatcaggacgtaccatctgatgtcccagcgctggtttactcatgcttcaccgacgcttttcaatgctggcacgccgaggccccaattaagcagctgttttcttatatgcatgaaagatgacagcattgagggaatctatgaaaccctgaaagagtgtgctgtaataagcaaatctgctggaggaattggtgtctcagttcataatatccgtgctactgggagttatattcgaggaacaaatggatcatcaaatggaattgttcctatgttacgtgtctttaatgatactgctcgctatgttgatcagggtggtggcaaaagaaagggtgcatttgctgtatacttggagccttggcatgctgatatttttgagttccttgatctgagaaagaaccatgggaaggaggaaaatcgtgcaagggatcttttctatgcgctatgggttcctgatttattcatgcaaagagtccagaataatggagaatggtcattattttgccctaatgaagctccagggttggctgattcctggggtgaggagtttgataatttgtacaagaaatatgagagccaaggcaaggcaaagaaagttgttccggcacagaccctttggtttgacattttgaaggcacagatagagactggtacaccatatatgctttataaggaaaagtaaccagcagaatctgggcacaattaaatcgtcaaacctgtgcactgaaataattgagtttacaagccctactgagaccgctgtctgcaacctagcatctattgctttacctcgttttgttcgggaaaaggatgttccgttggagtcccatccatctaagcttgtgggtagcagtgattcaaaaaatagatattttgattttgagaagctagctgaggttacctcaactgttacttacaatcttaacaaaattatcgatattaattactatcctgttgagacagcaaagaggtcaaacatgcgtcacaggccaattggcataggtgttcaaggcctggcagatactttcatattactgggcatgccgtttgattcaccagaggctcaacagttgaataaggatatattcgaaactatctactatcatgctctgaaagcttctgctgaacttgctgctaaagaaggtccctatgaaacatatgaagggagccctgtcagcaagggcattctccaacctgacatgtgggatgtagtgccatctaacagatggaactggccatctctaagggagaccatttcaaaagttgggataagaaattctcttcttgttgctccaatgcccactgcttccactagtcagattcttggcaacaatgagtgttttgaaccctacacgtctaatatatacagtcgacgtgttctaagtggggaatttgttgtggtcaacaagcatcttcttcatgatctgactgaaatgggcatttggactcctactttgaaaaaccagataatatacgacgacggttctgtccagaagatagcagaaatcccggacgatcttaaagcaatctacaaaactgtttgggagatcaagcagaaaactttagttgacatggcggtcgaccgcggatgctacatcgaccaaagccagagcctcaatgtccacatggagcaagcaaactttgggaagctgacgtctcttcacttccatgcttggtccaagggcctgaaaactggaatgtactatctacgcacacgagctgctgctgatgcgatcaagttcacagtggataccacgcttctgaaggagaatgggaacggggttagcgatggaaagcccgcggaggaagacgtagacgctaaaatggcacagatggtctgttctttgaacaaccgggaagagtgcctggcgtgtggaagctagattggagattccatctggacactgcacttcgtgatctgtgaacacaacattacatacagccggctgatgattggagctcagtaaccagaacgaagtctgtgatgtaggtcgagttggaagttcccataatgggaatagcttgtacctgaatactgctacggcgctacctctggtctgtattgctctaaggtgtttgtgctgctgccaatgtactgtaaatatctaccagcgtcaatgttgtcgatgtgctctaagatacagtatgttttaaccgtgctacactctttgcattggatcgaacatgatgtaatgcatcgtcttccataatgatacgagtgctggaaaacagaacaatgtaaactaattagtctgtatcctcgatcgcgatatgcacttggtcctttcggcagtgtctgtctgcacagtatttcct

SEQ ID NO: 79361 - DNA, 7249 bp, Zea Mays
tccatttccccttcccttttcactccgaagtccgacctctctcgaacacacaccacaccaccccgcttgacgacgcttaaaccctagcggcagttgcgggaggccgccgcgccgcgccgcgccgccccgtcgccgatgtggaacggcgcgccgcctccgccgccgccgcagatggcggcggccccgcctccccctggcacgacggtgcccggggcaggccaacctccgcccccgccgccgccggccggggcgccgttgggcggcaagccgctgacgccggccgagctcgaggctcagctggtggagaaggcccgcaagtggcaccagctcaactccaaacgctacggcgacaagcgcaagttcgggttcgtcgaggcacagaaggaggacatgcctcctgagcacgtccgcaaaatcatcagagaccacggagacatgtcttccaagaagtacaggcatgacaagcgtgtttatcttggtgcactcaaatttgtgccccacgctgtgtacaaacttctagagaacatgccgatgccttgggagcaggttcgccatgtgaaaatcttgtatcacatcactggggctatcacttttataaatgaaatcccatgggttgttgaaccaatatacctcgcacagtggggtacaatgtggattatgatgcggcgagagaaaagggataggcggcattttaaacgaatgcgctttcctccatttgatgatgaggagcccccactggactatgctgataatttgttggatgttgaaccacttgaagctatacagttggagttggatgaggaggaagatgcagctgtctatgaatggttctatgatcacaaacctctaatgaagacaaaacttataaatggtcccagttacaggaaatggcatctatctcttcccataatggcaacactatatcgccttgctggccagctgctgtcagatctgatcgataggaattatttctacttatttgatatggagtccttctttacagccaaggcccttaatatgtgcattccagggggtccaaagtttgagccattgtaccgtgatatggagaagggtgatgaggactggaatgagtttaatgacataaataagctcatcatacgtcagccacttcgaactgagtacaggattgctttccctcacctgtacaacaacaggccaaggaaagtgaaacttggtatctatcatacccccatgataatgtacatcaagactgaagatccagacttgccagcgttctactatgatcctctgataaatcctatcacttcaaccaacaaggttgatcgtcgggagaggaaagcagctgaagaggaagatgatgaagatttttgtctcccagaagatgtagagcctctcttgaaacagactgaactctacactgatacaacagctgctggtatatcgttactttttgctccaaagccttttaacatgagatctggtcggacacgtcgtgcagaggatattcctcttgtatctgagtggttcaaggaacattgccctccagcttatcctgtgaaagttcgtgtgagttatcagaagctattgaagtgttatgtgctcaatgagctacatcataggcctcccaaggcccagaagaagaagcatctgttccgttcactccaagcaactaagttcttccaaactactgagcttgactgggcagaagcaggcttgcaagtttgcaagcaggggtacaacatgctaaatttgttgattcacaggaaaaatcttaactatcttcatttagattacaatttcaatttgaagcctgtaaagactcttacaacaaaggaaaggaagaaatctcgttttggaaatgcattccatttgtgtcgtgagattttacgacttacaaagttggttgttgatgctaacatccagttccgtctgggaaatgttgatgccttccagttggcagatggtctgcaatacatattttctcatgttgggcagttaactggtatgtataggtacaagtaccgattgatgagacagattaggatgtgcaaagatctgaagcacttgatatattatcgtttcaacactggccctgttggtaaagggcctggttgtgggttttgggctccaatgtggagagtgtggctcttcttccttcgaggtattgtcccactattggagcgctggttgggcaatcttctggcacgtcagtttgagggccgtcattccaagggtgtggccaaaactgtaacaaagcaacgtgttgagtctcactttgatttagaacttcgtgctgcagttatgcacgacgtcctagatgctatgccagaaggcatcaaacaaaacaaggctcgaactatattacaacatcttagcgaggcatggcgatgctggaaggcaaatatcccatggaaagtccctggtctacctgtgcctattgaaaacatgattcttcgttatgtgaaatccaaggcagattggtggacaaatgttgctcactacaatcgtgagcgtatcaggcgtggtgctacagttgacaaaactgtttgtcggaaaaatctaggaaggttaactcgtctgtggctgaaggcagagcaagagaggcaacacaattacctgaaagatgggccatatgttactcctgaagaagctgttgctatttatacaacaactgttcattggctggaatcaagaaagttctccccaattcctttcccgccattgtcatacaagcatgacactaaacttcttatacttgctctagaaaggctgaaggagtcatacagcgtagcagttagattgaaccaattgcaacgagaggagcttgggttgattgaacaagcttatgataatccacatgaagcactgtcaaggataaaaaggcatctccttactcagcgtgcttttaaagaagttggtatagaattcatggacttgtacagctacttgattccggtatatgaaattgaacctcttgaaaagatcactgatgcataccttgaccagtacctgtggtacgagggggacaaacggcacctcttcccaaattgggttaagcctgctgattcagaaccaccacctcttcttgtttataaatggtgccagggtataaataatttactggatatatgggacacaagtgatggacagtgtgttgtgatgctccagacaaaatttgagaagttctttgagaaaattgatctgactctgttgaacaggcttctgcgcttggtcttggatcataacatagctgactatgtcactgcaaagaacaatgtagtgttgtcttacaaggacatgagtcacacaaattcttatggtctcattcgagggcttcaatttgcatcttttgttgttcagtattatggccttgtgctggatctcctgattcttggtctaactcgtgcaagtgagattgctgggccacctcaaatgccaaatgagttccttacatatgctgacacaaaagttgagacaaggcatcccataagattatattctcggtatattgacaaggtgcatatattgttccggttcacccatgaggaagcacgagatctaattcagcgttacttgacagaacatcctgatcctaacaatgagaacatggttggttacaataacaagaaatgttggcccagagatgcaagaatgaggcttatgaaacatgacgtgaatcttggaagaagtgtgttctgggatatgaagaaccgccttccaaggagcattacaactttagaatgggagaatagctttgtctctgtttacagcaaggacaatccaaacctgctttttagcatgtctggctttgaagtccggatactgccaaagatacggatgacccaggaggcattcagcaacacaaaagatggagtatggaatttgcagaatgaacagacaaaagaaagaacggcaattgccttcctgagggttgacgatgaacatatgaaagtgttcgagaaccgtgtccggcagattctaatgtcatcagggtcaacaacattcaccaagatagtcaataagtggaatacagctctcattggccttatgacatatttccgcgaagcaactgtccatacccaggagcttttggatttactggtcaaatgtgaaaacaagatccagactcgtataaagattggcctgaattcaaagatgcctagtaggtttcctccagttatcttctatactcccaaggagattggaggtcttggaatgttatcaatgggccatattcttataccgcagagtgatcttaggtatagcaaacagacagatgttggtgtaacacattttagaagtggtatgagccatgaagaggatcagcttattccaaacttgtatcgctacatccagccatgggagagcgagtttattgattcacagcgtgtttgggctgagtatgctttgaagaggcaggaagcacaatcacagaacagacgattaactcttgaggatcttgaagattcatgggatagaggtatacctcgtatcaacactcttttccaaaaagaccgtcatacactagcctatgacaaaggatggagagtgagaacagattttaagcaatatcaagtgctgaaacagaacccattctggtggacacatcagcggcatgatgggaagctttggaatctaaataactacagaacagatgtcatccaagcacttggtggtgtagaaggcatcttggagcatactttatttaaagggacttacttccccacttgggagggtctgttttgggagaaggcatcaggtttcgaagagtcaatgaaatacaagaaactgacaaatgcacagcggtctggtctcaatcaaatccccaatcgaagatttaccctgtggtggtcaccaaccatcaatcgtgcaaatgtctatgttggtttccaggtccagctagatcttacgggcatattcatgcatggtaaaatcccgacattgaagatttctctgatccagatcttccgtgcacatctgtggcagaagatccatgaaagtgttgttatggatctttgccaagttttagaccaggagttggatgcacttgagattgagactgtgcagaaggagacaatacatcccaggaagagttacaagatgaacagttcctgtgctgatatccttctctttgctgctcatagatggcagatgtccaaaccaagcttagtttctgagtcgaaggatgtatttgatcagaaagcaagtaacaagtattggattgatgtgcaactgcgttggggagactatgattcacatgacatagaacgttatacaagagccaagttcatggattacacaacagacaatatgtccatatacccatcgccaactggtgtgatgattggaatcgatctagcgtataatttgcactctgcttttggcaactggtttcctggatcaaagccactacttcagcaggcaatgaacaagatcatgaaggttatccacacaagtgtatgggcggggcagaagcgtcttgggcagctggccaagtggaaaaccgctgaggaggttgctgcattggttcgatctcttcctgtagaagagcagccaaagcaaattattgtgacaaggaagggcatgttggatcccttggaggtccatctacttgacttccctaacattgttattaagggcagcgagctgcagcttcctttccaggcttgcttgaagattgagaagtttggtgatcttatactgaaggcaactgaaccacagatggttctttataatatatatgatgattggttgaaaagtatatcatcatacacagcattctcccgcattgtgcttattctacgtgcacttcatgtgaataatgagaaggcaaagatgttgctcaaacctgacaaaacaattgttactgaaccacatcatatatggccatctctgaatgatgaacagtggttgaaggttgagtgtgcactaagggacctcatcctttctgattatgcaaagaaaaacaatgttaatacttctgcactgacacaatctgaaatgcgagatatcattcttggagctgaaattgctccaccatcacagcagaggcaacagattgctgaaattgagaaacagtcaagagagactactcagttaactgctgtaaccacaaggacgacgaatgtgcacggagatgaactcattatcacaaccacaagtccatatgagcaacaagcattcgcatcgaagactgattggcgtgtcagagccatctctgccacaaacttgtatctacgtgtaaatcacatttatgtcaattctgatgatataaaggaaactggctacacttacattatgccaaagaacatattgaagaaattcatatgcgtagcagatctgcgtacacaaatcgctggattcttatatgggctgagtccacaggacaatcctcaagtcaaagagattaggtgtatagccatccctccgcagcatggaacacaccagatggtgactctgccatcaaatcttcctgaacatgagttccttaatgatcttgaacccttgggatggatgcatacacagccaaatgaagctccacagctatcaccacaggacctgacatcacatgccaagattctggagaacaacaaacaatgggatggtgagaagtgcatcattctgacatgcagcttcaccccaggatcttgctcgttgactgcttacaagctgacaccaagtggttatgagtggggacgcagcaacaaggacaacggaagcaacccacatggatacctcccaactcattacgagaaggtccagatgcttctgagcgaccgcttccttggtttctacatgattccggataacaccccttggaacttcaacttcatgggagtgaagcacgacccacagatgaagtacaacatgaagctgggcatgccccgggacttctatcacgaggaccacaggccgacacacttccttgagttcagcaacatcgaggagggagaggtcgctgaaggtgatagggaggacacattcacgtagggcgctgggcgcctgttttagaaactcagtatctcaaacgcactttagctctgttttgaatggcaatgtgtgaaaggctgaaagctgtaacctgactcgacgggtgtcatctgtttttttggcttaatcctgtatcataccttgttgtaagacagccctggagaggggtaaaaattgtacaagtgcacgccatggcaacagtaaagattttacttagtagctatgctattctaagatggctcctcccaagctttaattttctcataatccctgctgg

SEQ ID NO: 79362 - DNA, 450 bp, Zea Mays
tccctacaggtttcgagggcttattctctgcagcacctcaatatcggtggaacgttcatcacagatgaatccctctacgcagtcgcaaacagctgcgcaaatcttaagagcatcatcctgtggagctgccgccacgtgacggagggcgggctggtggcgctggtgaacaagtgccggcggctggagtgcatcaacgtgggcgggatgcgggtcccgccggagagcttggtgggcctgctctccatcagccccgccctggagatcaggtccaccgcacgcatcctcaacctcaacctcaacgccggggtgcaggtctcctgatctgtcacaaggcccagaagacagtgccactggagatcgacgaccaggctgcagccaaagcgcagagaagcaaacgcaccaagaagcccaatgccaagtacgttggagatcgacgaccaggctgcagcc

SEQ ID NO: 79363 - DNA, 1382 bp, Zea Mays
tgacgtcggcccagcccaaacccaactcgaccgaagtatccaagcgctacgctagtccaaattaaacgcaacaatcccataaaccaccgacttccaggagtacttccagcgacccagcaccccaccacaaaggcacaaatccacaatcccctcttcggtacctttctccgagtcgtcttcccgttgatcggcaaagagactttagggttttagcggcttctatttctgagcgagggtttatccgccaggggcggcgcgacgcggcggcagttgagctgggatttccttcccatcccgttcccttccaggcgaggcgatggacgaggcggcggtcgacgacctcatccggcggctcctcgaggcccgcggcgggcgcacccccgcgcaacgcgcaggtgaccgacgctgagatccggcgcctctgcgccgccgccaaggatgtgttcctctcccagcccaacctcctggagctcgaggcccccatcaagatatgcggggatgtccatggtcagtattcagaccttcttcgattatttgagtatggtggctatccaccagatgcaaattatctgttcctcggtgactatgttgatagggggaaacagagcatagaaacaatatgccttctcttggcatacaagataaagtacccagaaaacttctttcttctcaggggaaaccatgaatgcgcctcaatcaaccgaatatatgggttttttgatgagtgtaagaggagattcaatgttcgtatctggaagatattcaccgagtgttttaactgcctcccagtggctgcgcttattgatgacaagatcttttgcatgcatggagggttgtctcctgagctaaagagcatggaccaaatacgtggggtgagaatgacaggggtgtttcctacacctttggagctgacgtagttgccgagtttcttcagaaacatgatctagatttgatctgcagggcccaccaggtcgtagaggatggttatgaatttttcgcaaaacgccagcttgtaacaatattctcagcaccgaactactgtggagagttcgacaatgctggtgcactgatgagcattgacaactccctagtatgctcgttccagatactcaagccttctgagaagaaaggaaaagcaggaaatgggaacatgccaaagcccggtacacctcccaggaagataaaaataagtgttacccatatttagccaggttctcgctatcaatctgcatttgcgaagttgtgattaagtgctcccccaaacttgtgggagcgcgggcctcgacgtctccgggcgcacgagcctcgacggctcacgggcgggcgcgcgaccccgaccatgccggctgcgggcgctgcccggttgcggccggcgcacggcg

SEQ ID NO: 79364 - DNA, 2043 bp, Zea Mays
ccataaaccaccgacttccaggagtacttccagcgacccagcaccccaccacaaaggcacaaatccacaatcccctcttcggtacctttctccgagtcgtcttcccgttgatcggcaaagagactttagggttttagcggcttctatttctgagcgagggtttatccgccaggggcggcgcgacgcggcggcagttgagctgggatttccttcccatcccgttcccttccaggcgaggcgatggacgaggcggcggtcgacgacctcatccggcggctcctcgaggcccgcggcgggcgcacccccgcgcaacgcgcaggtgaccgacgctgagatccggcgcctctgcgccgccgccaaggatgtgttcctctcccagcccaacctcctggagctcgaggcccccatcaagatatgcggggatgtccatggtcagtattcagaccttcttcgattatttgagtatggtggctatccaccagatgcaaattatctgttcctcggtgactatgttgatagggggaaacagagcatagaaacaatatgccttctcttggcatacaagataaagtacccagaaaacttctttcttctcaggggaaaccatgaatgcgcctcaatcaaccgaatatatgggttttttgatgagtgtaagaggagattcaatgttcgtatctggaagatattcaccgagtgttttaactgcctcccagtggctgcgcttattgatgacaagatcttttgcatgcatggagggttgtctcctgagctaaagagcatggaccaaatacgtggggtgagaatgacaggggtgtttcctacacctttggagctgacgtagttgccgagtttcttcagaaacatgatctagatttgatctgcagggcccaccaggtcgtagaggatggttatgaatttttcgcaaaacgccagcttgtaacaatattctcagcaccgaactactgtggagagttcgacaatgctggtgcactgatgagcattgacaactccctagtatgctcgttccagatactcaagccttctgagaagaaaggaaaagcaggaaatgggaacatgccaaagcccggtacacctcccaggaagataaaaataagtgttacccatatttagccaggttctcgctatcaatctgcatttgcgaagttgtgattaagtgctcccccaaacttgtgtctgatgcaaatgtatcctgacattttgccaaccaagagagatcatgctgacagaaacttcaggatttttttttattgtggacttatgttcttactccccgacaaatgcaacatgtttatgaatgggtaggggaaatgctaacaagcaactaatgctctttacttattttgatgcacgactgaaatcactggaagtatcccattttctaagaacaaaggacattctctttgctggatgatggttttttgtcattattgtggtctacatatactccggctgaaacacagcgccaatcgaccgcccattgcaatgtcgcaagataaactgtattgtcttaacgagtccctagcaaaatgctctgccactgcggattcagtttgggaaggaacaggcagtggagtatgtaatgcggtccacacagccacgttggcaagtggtatgctggatctaggtggcactgaatcatgattcaaatgctaattcataaaatagtaggacactaaataaatgttagtttaaaaataaatagagatatagttcgattcaattcttaaattttatagtggaaaatttagagctcattataatgcccagttttgcttgcacggaacagtaaaagttcgagcactcattgctggtttctgagagttgtgtgatttgttacaaaataacatattacaaagttatatgtgatatagtgaacaatgacatattacaaagttatatgtgataaaagggagcgcgggcctcgacgtctccgggcgcacgagcctcgacggctcacgggcgggcgcgcgaccccgaccatgccggctgcgggcgctgcccggttgcggccggcgcacggcg

SEQ ID NO: 79365 - DNA, 912 bp, Zea Mays
ctcctcttctacttgttttaattgggggatgtccatggtcagtattcagaccttcttcgattatttgagtatggtggctatccaccagatgcaaattatctgttcctcggtgactatgttgatagggggaaacagagcatagaaacaatatgccttctcttggcatacaagataaagtacccagaaaacttctttcttctcaggggaaaccatgaatgcgcctcaatcaaccgaatatatgggttttttgatgagtgtaagaggagattcaatgttcgtatctggaagatattcaccgagtgttttaactgcctcccagtggctgcgcttattgatgacaagatcttttgcatgcatggagggttgtctcctgagctaaagagcatggaccaaatacgtggggtgagaatgacaggggtgtttcctacacctttggagctgacgtagttgccgagtttcttcagaaacatgatctagatttgatctgcagggcccaccaggtcgtagaggatggttatgaatttttcgcaaaacgccagcttgtaacaatattctcagcaccgaactactgtggagagttcgacaatgctggtgcactgatgagcattgacaactccctagtatgctcgttccagatactcaagccttctgagaagaaaggaaaagcaggaaatgggaacatgccaaagcccggtacacctcccaggaagataaaaataagtgttacccatatttagccaggttctcgctatcaatctgcatttgcgaagttgtgattaagtgctcccccaaacttgtgggagcgcgggcctcgacgtctccgggcgcacgagcctcgacggctcacgggcgggcgcgcgaccccgaccatgccggctgcgggcgctgcccggttgcggccggcgcacggcg

SEQ ID NO: 79366 - DNA, 5194 bp, Zea Mays
gttcgttttggtaacagtcgctagcgaaaaagcatccgcccacctcccctcgtctctctcgcgctccgccgccgcgcaaaactgtctggtgatgacgaacgccgccggtacggcccctcacccgactccgccgacgccgctccaacaacaacagcatcagccacccaaggaccagcagcagaaggcgctggccttgaacgcattccgcctgaaggggatcggcgaccgcatcaggttccacctgaagggcatgagcgtgcccccagtcgccgagttggcccacctcatctacgcgttcgccagagggattgacttcgcggtctcagctggtgatattcctctgacagccggtgacatacccgagattctgagaaaggtatatgagctgaggaaagaaacaattatacaatcttcgcttatgatactagcgatctcttgcaagaatgcttgctccaataaatggtttcaacctgcagattccagagacattcttagaatggtcaatgagctctctggcaacttctgcacgtccacaggccaggcagctagtgacagcactgtgcttgaaattatatcacaaataatgccaaggtattaccctcggttgaagtttgagcgcctaatcacttctattgaagcaaaggttggctatgatatattaatggctgacttctttattgagaggagcctatctcgagatgaaaagattagactaattgtcgtacaaaaggaaaatttagatgcctcatcatgtgtctcaagtccaccacatgtgagctttttggtcaatgggaagggtgtggacaagaggactaatgtttcaatggaacaaggaccccagttacctactgatatcaccaaaatgctcaaatatggggctaacattatccaaggtgttggatattttaatgctaattatatcatagctgtagcagttgtgaacgatttgacatccttcagtgctccaaaactggatgactatgcacaacctatcactgtttatcctgcagagaggctgcgttgaacccaggacctttggctttggctcagtgggaaggcttctcaccactgaaagttcagtatattttatgctatgcgtccagtttgttgttgttgttgttgttgtcgtcgagtttcttgactgggactgaagtgtgttttaaatgacattttgtaatctctcgattgaaatatccatgtaggttcatttaaatttgtgtctgattcttcatacccactgacattatagttttttatgttattttttgtttttttagaaatggactatcagttttactcgtaattattcaattcaattcttgctacaccttttgagttttttcaccatcgtcaatctgctcttgtctctgtttggccttatgttggaaaatggaaataactgattgctacctccatccccaaaaactttatgttcgtaaatcaaactatcttaagtttgactaaatttatagataaagttgtcaacttatgatacaaatagttatgctatgaaaacatgttcagatctaatgatacttatatttggtaatatatacattaatattctattgtataaaattggtcaaactttagatagtttgacttagaataaaatagaaagagtaaaatgcatcaacggtcctcgaacttggcatactgtgtcaattgggtccccctgggtccccgtacactcttgaaactaggaaaacaggtgttataactttgccagcccattcaaaatcaggtttgctcaaaccgtttgccgacgtggagtgccacgttagagtcacttggatccccgaactttcattagtgcgctccaacgtggctcgctatgtcagcatccggtttgaacaaacccggttttgaatggtgcagacaagttatagcacctgtttttctggttctgagagttcggagacccaattgacacaatatatcaagttcgaggactgctgatgcattttaatcaaacggaaacatcaagcttttggggatagaagtagtaccgaagattgattgtggtgttatgcatgatcatggacatggagcatgtaaagtgaacctgttgtctggaactggattcagtttctctgtaaagtgataggagctgggactcagtatgtaggtggacagttacttgtatagtttccctcttttaaactgactatatatatttttggctgtaaacatgaattcctgtctgtttgtgataacatgcagctttttaaagacttggtttttttttgctctgcacaaaatagacttgtgttttcccctagttcttcccatgggcaaatgaaacctgtaagttcagttttattgatccataaaagtgaaatacctagctgtacttgaacaatcagtttatattggaagagaccatacttgtaagcaaatgaacctatgaacaacatagaaaggtgacacaaatgccggatcatctgctagcagcccatgcggggcttatttgcatagttattgaagctggatgggcaattgacctgctcaggcaggttcaacagttttcctctccaacaactagtcctcttagtagcaactaccgagtatatttgccttggtgatgtgatcagcgtggttgtatctaagtacctaaaccccaattgtatgctgatcgtttcagttggttcgtgcaaagtcagatggctcagtgataatttgcatctatctgatgacttgaatcatgctgaaccaggctttagttctgctagcagtctgtccagtttcaataactacgtttatttgttgatagcatttccattcatttttcggtatcatgccttggtttcttgttcaaaataatatggtttgcttgcatgaagtacatgtagtgacagtaactagtaagagttaaaccatgtgagtatttttttattgtagttctaattgccagattagcaaaagttgattgccctctttggttcccctgcattcattgtctttatgtagtgtggccataatttgagttttaaggctgtccgcagcagatcgtgtaaaataggggatttacactgtagattacattgtttacagagtgaagtttgaaataggggatgcaatagaatagttgctggagacagcctaagtaatacagtatatgcattttcttagtgatggcttattttttaataatttcttccattacagttaacgatgtgtactggtctcttgtagattctgatgtacttgagggaccatcaagagtttccctaaattgtcctataagttttaggcgcataaaaactcctatcaaaggccgtctttgcaaacactatcagtgttttgattatgataattacatggagatgaactcaagaaaaccaaactggcgctgtccatattgtaacacctcctcaagcttcactgacctacgtattgaccaaaagatgatgaagatactagaagagactggagatgatgtcactgatgtccttgtatttgctgatggatcttggaaagttgttccagctcaggatgaaaaatctgatagacatagaggtgacacaattcagcaggctggagatgctgtagaaactggttcaccttctcgagatgtcatagatctgataaatggcaatgatgatggtgatatgcaaatggattgggcatcggctccagaagattcaaagcctgtgttgaatagtcaagatttgtctgtatcagactatcttacagatttccctatgacagctcagacagaagatctgaatcgaggggatggaaataatgggggaagcaacatggcttccacttcacgtcaaaatttgttactacctcctactagtgggctgggctcaagttcattagggaccttggaatctattctacctcaaaatgttctgcaccctgttatcacagatgcagtctctccttctcttgaaacctcttcagcatctggcatgcaacatgtttcacaggaaacacattgtggaactgtacagctgcagccacaaataggtccagtacatgggtccgaagtgagaaggcttcctatacctagaaatcccaggagagagccaataggagtacaggggttgacggttccaccacagaatcctgggtcatcaacaaggttgcagccaaatattctcaattgtccacctcctatcccgctatctagtccatcctcttcaacttaccaagcacatcaagtgaagaatccagacagtgtcattgcttcaaggaacagtggtagtgggccattaccaaggactcctagcgtcgctgctgcatcattgcacctacagtcgacagcacgggatattcgcaacacatcgagccatctacccagtcgagttgttggtctgcctgcgccacacctcatgggtgcacgaccaccaccaggaatttcagtgcaggctggaggagcgaacgcctacagaactatgcaacagactccaactatggatccactgaggcacacacggatgagcatgaaccaaacagcactggctgctgccggccaaaccaccgctgccgcgtatgtccgaccaacccaagcagacatccaaaaccatctctttcctgtgcagcaaagccaggcaccacgatcgcaacaagtgccacgaacaacaaccccgcctctacagcgggcgccaccgcacctgcaacctcccagtgtaccaccgactgttccaagcacacctcaggctggaccttcgcatggtcttccaccggagctccctgtggatgatagctggcgccccacgggacagatgagagggagtctgacaggcaatgcttacagttctgcaattaggcactatcggggccattctgagcagcagcagggcgagcctcggcctcccaacacttcaggtgcgcgaaggcctcagtaactgccagacattgcggcgttgccctgattatcaagcagggcttgggcagctaatttaccaagagattttaatttattatcatagctaatttggcgctatgatgatctatgttagtgtaggtaggggagcctagtgagtagtgatagtgctctgcttgtctacaacgcactctgatgttaaattagtagtatcaggtgaaccatttgtgtacccaatatggaacgtggattttttatgctaatgttttgcctgtgtaattggaccgattttcatgtgaaattcctgaacgattcccatgaaaatgaacaggtaacttgcatatgaacaatgtagtg

SEQ ID NO: 79367 - DNA, 4306 bp, Zea Mays
gttcgttttggtaacagtcgctagcgaaaaagcatccgcccacctcccctcgtctctctcgcgctccgccgccgcgcaaaactgtctggtgatgacgaacgccgccggtacggcccctcacccgactccgccgacgccgctccaacaacaacagcatcagccacccaaggaccagcagcagaaggcgctggccttgaacgcattccgcctgaaggggatcggcgaccgcatcaggttccacctgaagggcatgagcgtgcccccagtcgccgagttggcccacctcatctacgcgttcgccagagggattgacttcgcggtctcagctggtgatattcctctgacagccggtgacatacccgagattctgagaaaggtatatgagctgaggaaagaaacaattatacaatcttcgcttatgatactagcgatctcttgcaagaatgcttgctccaataaatggtttcaacctgcagattccagagacattcttagaatggtcaatgagctctctggcaacttctgcacgtccacaggccaggcagctagtgacagcactgtgcttgaaattatatcacaaataatgccaaggtattaccctcggttgaagtttgagcgcctaatcacttctattgaagcaaaggttggctatgatatattaatggctgacttctttattgagaggagcctatctcgagatgaaaagattagactaattgtcgtacaaaaggaaaatttagatgcctcatcatgtgtctcaagtccaccacatgtgagctttttggtcaatgggaagggtgtggacaagaggactaatgtttcaatggaacaaggaccccagttacctactgatatcaccaaaatgctcaaatatggggctaacattatccaaggtgttggatattttaatgctaattatatcatagctgtagcagttgtgaacgatttgacatccttcagtgctccaaaactggatgactatgcacaacctatcactgtttatcctgcagagaggctgcgttgaacccaggacctttggctttggctcagtgggaaggcttctcaccactgaaagttcagtatattttatgctatgcgtccagtttgttgttgttgttgttgttgtcgtcgagtttcttgactgggactgaagtgtgttttaaatgacattttgtaatctctcgattgaaatatccatgtaggttcatttaaatttgtgtctgattcttcatacccactgacattatagttttttatgttattttttgtttttttagaaatggactatcagttttactcgtaattattcaattcaattcttgctacaccttttgagttttttcaccatcgtcaatctgctcttgtctctgtttggccttatgttggaaaatggaaataactgattgctacctccatccccaaaaactttatgttcgtaaatcaaactatcttaagtttgactaaatttatagataaagttgtcaacttatgatacaaatagttatgctatgaaaacatgttcagatctaatgatacttatatttggtaatatatacattaatattctattgtataaaattggtcaaactttagatagtttgacttagaataaaatagaaagagtaaaatgcatcaacggtcctcgaacttggcatactgtgtcaattgggtccccctgggtccccgtacactcttgaaactaggaaaacaggtgttataactttgccagcccattcaaaatcaggtttgctcaaaccgtttgccgacgtggagtgccacgttagagtcacttggatccccgaactttcattagtgcgctccaacgtggctcgctatgtcagcatccggtttgaacaaacccggttttgaatggtgcagacaagttatagcacctgtttttctggttctgagagttcggagacccaattgacacaatatatcaagttcgaggactgctgatgcattttaatcaaacggaaacatcaagcttttggggatagaagtagtaccgaagattgattgtggtgttatgcatgatcatggacatggagcatgtaaagtgaacctgttgtctggaactggattcagtttctctgtaaagtgataggagctgggactcagtatgtaggtggacagttacttgtatagtttccctcttttaaactgactatatatatttttggctgtaaacatgaattcctgtctgtttgtgataacatgcagctttttaaagacttggtttttttttgctctgcacaaaatagacttgtgttttcccctagttcttcccatgggcaaatgaaacctattctgatgtacttgagggaccatcaagagtttccctaaattgtcctataagttttaggcgcataaaaactcctatcaaaggccgtctttgcaaacactatcagtgttttgattatgataattacatggagatgaactcaagaaaaccaaactggcgctgtccatattgtaacacctcctcaagcttcactgacctacgtattgaccaaaagatgatgaagatactagaagagactggagatgatgtcactgatgtccttgtatttgctgatggatcttggaaagttgttccagctcaggatgaaaaatctgatagacatagaggtgacacaattcagcaggctggagatgctgtagaaactggttcaccttctcgagatgtcatagatctgataaatggcaatgatgatggtgatatgcaaatggattgggcatcggctccagaagattcaaagcctgtgttgaatagtcaagatttgtctgtatcagactatcttacagatttccctatgacagctcagacagaagatctgaatcgaggggatggaaataatgggggaagcaacatggcttccacttcacgtcaaaatttgttactacctcctactagtgggctgggctcaagttcattagggaccttggaatctattctacctcaaaatgttctgcaccctgttatcacagatgcagtctctccttctcttgaaacctcttcagcatctggcatgcaacatgtttcacaggaaacacattgtggaactgtacagctgcagccacaaataggtccagtacatgggtccgaagtgagaaggcttcctatacctagaaatcccaggagagagccaataggagtacaggggttgacggttccaccacagaatcctgggtcatcaacaaggttgcagccaaatattctcaattgtccacctcctatcccgctatctagtccatcctcttcaacttaccaagcacatcaagtgaagaatccagacagtgtcattgcttcaaggaacagtggtagtgggccattaccaaggactcctagcgtcgctgctgcatcattgcacctacagtcgacagcacgggatattcgcaacacatcgagccatctacccagtcgagttgttggtctgcctgcgccacacctcatgggtgcacgaccaccaccaggaatttcagtgcaggctggaggagcgaacgcctacagaactatgcaacagactccaactatggatccactgaggcacacacggatgagcatgaaccaaacagcactggctgctgccggccaaaccaccgctgccgcgtatgtccgaccaacccaagcagacatccaaaaccatctctttcctgtgcagcaaagccaggcaccacgatcgcaacaagtgccacgaacaacaaccccgcctctacagcgggcgccaccgcacctgcaacctcccagtgtaccaccgactgttccaagcacacctcaggctggaccttcgcatggtcttccaccggagctccctgtggatgatagctggcgccccacgggacagatgagagggagtctgacaggcaatgcttacagttctgcaattaggcactatcggggccattctgagcagcagcagggcgagcctcggcctcccaacacttcaggtgcgcgaaggcctcagtaactgccagacattgcggcgttgccctgattatcaagcagggcttgggcagctaatttaccaagagattttaatttattatcatagctaatttggcgctatgatgatctatgttagtgtaggtaggggagcctagtgagtagtgatagtgctctgcttgtctacaacgcactctgatgttaaattagtagtatcaggtgaaccatttgtgtacccaatatggaacgtggattttttatgctaatgttttgcctgtgtaattggaccgattttcatgtgaaattcctgaacgattcccatgaaaatgaacaggtaacttgcatatgaacaatgtagtg

SEQ ID NO: 79368 - DNA, 3003 bp, Zea Mays
gttcgttttggtaacagtcgctagcgaaaaagcatccgcccacctcccctcgtctctctcgcgctccgccgccgcgcaaaactgtctggtgatgacgaacgccgccggtacggcccctcacccgactccgccgacgccgctccaacaacaacagcatcagccacccaaggaccagcagcagaaggcgctggccttgaacgcattccgcctgaaggggatcggcgaccgcatcaggttccacctgaagggcatgagcgtgcccccagtcgccgagttggcccacctcatctacgcgttcgccagagggattgacttcgcggtctcagctggtgatattcctctgacagccggtgacatacccgagattctgagaaaggtatatgagctgaggaaagaaacaattatacaatcttcgcttatgatactagcgatctcttgcaagaatgcttgctccaataaatggtttcaacctgcagattccagagacattcttagaatggtcaatgagctctctggcaacttctgcacgtccacaggccaggcagctagtgacagcactgtgcttgaaattatatcacaaataatgccaaggtattaccctcggttgaagtttgagcgcctaatcacttctattgaagcaaaggttggctatgatatattaatggctgacttctttattgagaggagcctatctcgagatgaaaagattagactaattgtcgtacaaaaggaaaatttagatgcctcatcatgtgtctcaagtccaccacatgtgagctttttggtcaatgggaagggtgtggacaagaggactaatgtttcaatggaacaaggaccccagttacctactgatatcaccaaaatgctcaaatatggggctaacattatccaaggtgttggatattttaatgctaattatatcatagctgtagcagttgtgaacgatttgacatccttcagtgctccaaaactggatgactatgcacaacctatcactgtttatcctgcagattctgatgtacttgagggaccatcaagagtttccctaaattgtcctataaggcgcataaaaactcctatcaaaggccgtctttgcaaacactatcagtgttttgattatgataattacatggagatgaactcaagaaaaccaaactggcgctgtccatattgtaacacctcctcaagcttcactgacctacgtattgaccaaaagatgatgaagatactagaagagactggagatgatgtcactgatgtccttgtatttgctgatggatcttggaaagttgttccagctcaggatgaaaaatctgatagacatagaggtgacacaattcagcaggctggagatgctgtagaaactggttcaccttctcgagatgtcatagatctgataaatggcaatgatgatggtgatatgcaaatggattgggcatcggctccagaagattcaaagcctgtgttgaatagtcaagatttgtctgtatcagactatcttacagatttccctatgacagctcagacagaagatctgaatcgaggggatggaaataatgggggaagcaacatggcttccacttcacgtcaaaatttgttactacctcctactagtgggctgggctcaagttcattagggaccttggaatctattctacctcaaaatgttctgcaccctgttatcacagatgcagtctctccttctcttgaaacctcttcagcatctggcatgcaacatgtttcacaggaaacacattgtggaactgtacagctgcagccacaaataggtccagtacatgggtccgaagtgagaaggcttcctatacctagaaatcccaggagagagccaataggagtacaggggttgacggttccaccacagaatcctgggtcatcaacaaggttgcagccaaatattctcaattgtccacctcctatcccgctatctagtccatcctcttcaacttaccaagcacatcaagtgaagaatccagacagtgtcattgcttcaaggaacagtggtagtgggccattaccaaggactcctagcgtcgctgctgcatcattgcacctacagtcgacagcacgggatattcgcaacacatcgagccatctacccagtcgagttgttggtctgcctgcgccacacctcatgggtgcacgaccaccaccaggaatttcagtgcaggctggaggagcgaacgcctacagaactatgcaacagactccaactatggatccactgaggcacacacggatgagcatgaaccaaacagcactggctgctgccggccaaaccaccgctgccgcgtatgtccgaccaacccaagcagacatccaaaaccatctctttcctgtgcagcaaagccaggcaccacgatcgcaacaagtgccacgaacaacaaccccgcctctacagcgggcgccaccgcacctgcaacctcccagtgtaccaccgactgttccaagcacacctcaggctggaccttcgcatggtcttccaccggagctccctgtggatgatagctggcgccccacgggacagatgagagggagtctgacaggcaatgcttacagttctgcaattaggcactatcggggccattctgagcagcagcagggcgagcctcggcctcccaacacttcaggtgcgcgaaggcctcagtaactgccagacattgcggcgttgccctgattatcaagcagggcttgggcagctaatttaccaagagattttaatttattatcatagctaatttggcgctatgatgatctatgttagtgtaggtaggggagcctagtgagtagtgatagtgctctgcttgtctacaacgcactctgatgttaaattagtagtatcaggtgaaccatttgtgtacccaatatggaacgtggattttttatgctaatgttttgcctgtgtaattggaccgattttcatgtgaaattcctgaacgattcccatgaaaatgaacaggtaacttgcatatgaacaatgtagtg

SEQ ID NO: 79369 - DNA, 4240 bp, Zea Mays
gttcgttttggtaacagtcgctagcgaaaaagcatccgcccacctcccctcgtctctctcgcgctccgccgccgcgcaaaactgtctggtgatgacgaacgccgccggtacggcccctcacccgactccgccgacgccgctccaacaacaacagcatcagccacccaaggaccagcagcagaaggcgctggccttgaacgcattccgcctgaaggggatcggcgaccgcatcaggttccacctgaagggcatgagcgtgcccccagtcgccgagttggcccacctcatctacgcgttcgccagagggattgacttcgcggtctcagctggtgatattcctctgacagccggtgacatacccgagattctgagaaaggtatatgagctgaggaaagaaacaattatacaatcttcgcttatgatactagcgatctcttgcaagaatgcttgctccaataaatggtttcaacctgcagattccagagacattcttagaatggtcaatgagctctctggcaacttctgcacgtccacaggccaggcagctagtgacagcactgtgcttgaaattatatcacaaataatgccaaggtattaccctcggttgaagtttgagcgcctaatcacttctattgaagcaaagagactaattgtcgtacaaaaggaaaatttagatgcctcatcatgtgtctcaagtccaccacatgtgagctttttggtcaatgggaagggtgtggacaagaggactaatgtttcaatggaacaaggaccccagttacctactgatatcaccaaaatgctcaaatatggggctaacattatccaaggtgttggatattttaatgctaattatatcatagctgtagcagttgtgaacgatttgacatccttcagtgctccaaaactggatgactatgcacaacctatcactgtttatcctgcagagaggctgcgttgaacccaggacctttggctttggctcagtgggaaggcttctcaccactgaaagttcagtatattttatgctatgcgtccagtttgttgttgttgttgttgttgtcgtcgagtttcttgactgggactgaagtgtgttttaaatgacattttgtaatctctcgattgaaatatccatgtaggttcatttaaatttgtgtctgattcttcatacccactgacattatagttttttatgttattttttgtttttttagaaatggactatcagttttactcgtaattattcaattcaattcttgctacaccttttgagttttttcaccatcgtcaatctgctcttgtctctgtttggccttatgttggaaaatggaaataactgattgctacctccatccccaaaaactttatgttcgtaaatcaaactatcttaagtttgactaaatttatagataaagttgtcaacttatgatacaaatagttatgctatgaaaacatgttcagatctaatgatacttatatttggtaatatatacattaatattctattgtataaaattggtcaaactttagatagtttgacttagaataaaatagaaagagtaaaatgcatcaacggtcctcgaacttggcatactgtgtcaattgggtccccctgggtccccgtacactcttgaaactaggaaaacaggtgttataactttgccagcccattcaaaatcaggtttgctcaaaccgtttgccgacgtggagtgccacgttagagtcacttggatccccgaactttcattagtgcgctccaacgtggctcgctatgtcagcatccggtttgaacaaacccggttttgaatggtgcagacaagttatagcacctgtttttctggttctgagagttcggagacccaattgacacaatatatcaagttcgaggactgctgatgcattttaatcaaacggaaacatcaagcttttggggatagaagtagtaccgaagattgattgtggtgttatgcatgatcatggacatggagcatgtaaagtgaacctgttgtctggaactggattcagtttctctgtaaagtgataggagctgggactcagtatgtaggtggacagttacttgtatagtttccctcttttaaactgactatatatatttttggctgtaaacatgaattcctgtctgtttgtgataacatgcagctttttaaagacttggtttttttttgctctgcacaaaatagacttgtgttttcccctagttcttcccatgggcaaatgaaacctattctgatgtacttgagggaccatcaagagtttccctaaattgtcctataagttttaggcgcataaaaactcctatcaaaggccgtctttgcaaacactatcagtgttttgattatgataattacatggagatgaactcaagaaaaccaaactggcgctgtccatattgtaacacctcctcaagcttcactgacctacgtattgaccaaaagatgatgaagatactagaagagactggagatgatgtcactgatgtccttgtatttgctgatggatcttggaaagttgttccagctcaggatgaaaaatctgatagacatagaggtgacacaattcagcaggctggagatgctgtagaaactggttcaccttctcgagatgtcatagatctgataaatggcaatgatgatggtgatatgcaaatggattgggcatcggctccagaagattcaaagcctgtgttgaatagtcaagatttgtctgtatcagactatcttacagatttccctatgacagctcagacagaagatctgaatcgaggggatggaaataatgggggaagcaacatggcttccacttcacgtcaaaatttgttactacctcctactagtgggctgggctcaagttcattagggaccttggaatctattctacctcaaaatgttctgcaccctgttatcacagatgcagtctctccttctcttgaaacctcttcagcatctggcatgcaacatgtttcacaggaaacacattgtggaactgtacagctgcagccacaaataggtccagtacatgggtccgaagtgagaaggcttcctatacctagaaatcccaggagagagccaataggagtacaggggttgacggttccaccacagaatcctgggtcatcaacaaggttgcagccaaatattctcaattgtccacctcctatcccgctatctagtccatcctcttcaacttaccaagcacatcaagtgaagaatccagacagtgtcattgcttcaaggaacagtggtagtgggccattaccaaggactcctagcgtcgctgctgcatcattgcacctacagtcgacagcacgggatattcgcaacacatcgagccatctacccagtcgagttgttggtctgcctgcgccacacctcatgggtgcacgaccaccaccaggaatttcagtgcaggctggaggagcgaacgcctacagaactatgcaacagactccaactatggatccactgaggcacacacggatgagcatgaaccaaacagcactggctgctgccggccaaaccaccgctgccgcgtatgtccgaccaacccaagcagacatccaaaaccatctctttcctgtgcagcaaagccaggcaccacgatcgcaacaagtgccacgaacaacaaccccgcctctacagcgggcgccaccgcacctgcaacctcccagtgtaccaccgactgttccaagcacacctcaggctggaccttcgcatggtcttccaccggagctccctgtggatgatagctggcgccccacgggacagatgagagggagtctgacaggcaatgcttacagttctgcaattaggcactatcggggccattctgagcagcagcagggcgagcctcggcctcccaacacttcaggtgcgcgaaggcctcagtaactgccagacattgcggcgttgccctgattatcaagcagggcttgggcagctaatttaccaagagattttaatttattatcatagctaatttggcgctatgatgatctatgttagtgtaggtaggggagcctagtgagtagtgatagtgctctgcttgtctacaacgcactctgatgttaaattagtagtatcaggtgaaccatttgtgtacccaatatggaacgtggattttttatgctaatgttttgcctgtgtaattggaccgattttcatgtgaaattcctgaacgattcccatgaaaatgaacaggtaacttgcatatgaacaatgtagtg

SEQ ID NO: 79370 - DNA, 5162 bp, Zea Mays
gttcgttttggtaacagtcgctagcgaaaaagcatccgcccacctcccctcgtctctctcgcgctccgccgccgcgcaaaactgtctggtgatgacgaacgccgccggtacggcccctcacccgactccgccgacgccgctccaacaacaacagcatcagccacccaaggaccagcagcagaaggcgctggccttgaacgcattccgcctgaaggggatcggcgaccgcatcaggttccacctgaagggcatgagcgtgcccccagtcgccgagttggcccacctcatctacgcgttcgccagagggattgacttcgcggtctcagctggtgatattcctctgacagccggtgacatacccgagattctgagaaaggtatatgagctgaggaaagaaacaattatacaatcttcgcttatgatactagcgatctcttgcaagaatgcttgctccaataaatggtttcaacctgcagattccagagacattcttagaatggtcaatgagctctctggcaacttctgcacgtccacaggccaggcagctagtgacagcactgtgcttgaaattatatcacaaataatgccaaggtattaccctcggttgaagtttgagcgcctaatcacttctattgaagcaaaggttggctatgatatattaatggctgacttctttattgagaggagcctatctcgagatgaaaagattagactaattgtcgtacaaaaggaaaatttagatgcctcatcatgtgtctcaagtccaccacatctttttggtcaatgggaagggtgtggacaagaggactaatgtttcaatggaacaaggaccccagttacctactgatatcaccaaaatgctcaaatatggggctaacattatccaaggtgttggatattttaatgctaattatatcatagctgtagcagttgtgaacgatttgacatccttcagtgctccaaaactggatgactatgcacaacctatcactgtttatcctgcagagaggctgcgttgaacccaggacctttggctttggctcagtgggaaggcttctcaccactgaaagttcagtatattttatgctatgcgtccagtttgttgttgttgttgttgttgtcgtcgagtttcttgactgggactgaagtgtgttttaaatgacattttgtaatctctcgattgaaatatccatgtaggttcatttaaatttgtgtctgattcttcatacccactgacattatagttttttatgttattttttgtttttttagaaatggactatcagttttactcgtaattattcaattcaattcttgctacaccttttgagttttttcaccatcgtcaatctgctcttgtctctgtttggccttatgttggaaaatggaaataactgattgctacctccatccccaaaaactttatgttcgtaaatcaaactatcttaagtttgactaaatttatagataaagttgtcaacttatgatacaaatagttatgctatgaaaacatgttcagatctaatgatacttatatttggtaatatatacattaatattctattgtataaaattggtcaaactttagatagtttgacttagaataaaatagaaagagtaaaatgcatcaacggtcctcgaacttggcatactgtgtcaattgggtccccctgggtccccgtacactcttgaaactaggaaaacaggtgttataactttgccagcccattcaaaatcaggtttgctcaaaccgtttgccgacgtggagtgccacgttagagtcacttggatccccgaactttcattagtgcgctccaacgtggctcgctatgtcagcatccggtttgaacaaacccggttttgaatggtgcagacaagttatagcacctgtttttctggttctgagagttcggagacccaattgacacaatatatcaagttcgaggactgctgatgcattttaatcaaacggaaacatcaagcttttggggatagaagtagtaccgaagattgattgtggtgttatgcatgatcatggacatggagcatgtaaagtgaacctgttgtctggaactggattcagtttctctgtaaagtgataggagctgggactcagtatgtaggtggacagttacttgtatagtttccctcttttaaactgactatatatatttttggctgtaaacatgaattcctgtctgtttgtgataacatgcagctttttaaagacttggtttttttttgctctgcacaaaatagacttgtgttttcccctagttcttcccatgggcaaatgaaacctgtaagttcagttttattgatccataaaagtgaaatacctagctgtacttgaacaatcagtttatattggaagagaccatacttgtaagcaaatgaacctatgaacaacatagaaaggtgacacaaatgccggatcatctgctagcagcccatgcggggcttatttgcatagttattgaagctggatgggcaattgacctgctcaggcaggttcaacagttttcctctccaacaactagtcctcttagtagcaactaccgagtatatttgccttggtgatgtgatcagcgtggttgtatctaagtacctaaaccccaattgtatgctgatcgtttcagttggttcgtgcaaagtcagatggctcagtgataatttgcatctatctgatgacttgaatcatgctgaaccaggctttagttctgctagcagtctgtccagtttcaataactacgtttatttgttgatagcatttccattcatttttcggtatcatgccttggtttcttgttcaaaataatatggtttgcttgcatgaagtacatgtagtgacagtaactagtaagagttaaaccatgtgagtatttttttattgtagttctaattgccagattagcaaaagttgattgccctctttggttcccctgcattcattgtctttatgtagtgtggccataatttgagttttaaggctgtccgcagcagatcgtgtaaaataggggatttacactgtagattacattgtttacagagtgaagtttgaaataggggatgcaatagaatagttgctggagacagcctaagtaatacagtatatgcattttcttagtgatggcttattttttaataatttcttccattacagttaacgatgtgtactggtctcttgtagattctgatgtacttgagggaccatcaagagtttccctaaattgtcctataagttttaggcgcataaaaactcctatcaaaggccgtctttgcaaacactatcagatgaactcaagaaaaccaaactggcgctgtccatattgtaacacctcctcaagcttcactgacctacgtattgaccaaaagatgatgaagatactagaagagactggagatgatgtcactgatgtccttgtatttgctgatggatcttggaaagttgttccagctcaggatgaaaaatctgatagacatagaggtgacacaattcagcaggctggagatgctgtagaaactggttcaccttctcgagatgtcatagatctgataaatggcaatgatgatggtgatatgcaaatggattgggcatcggctccagaagattcaaagcctgtgttgaatagtcaagatttgtctgtatcagactatcttacagatttccctatgacagctcagacagaagatctgaatcgaggggatggaaataatgggggaagcaacatggcttccacttcacgtcaaaatttgttactacctcctactagtgggctgggctcaagttcattagggaccttggaatctattctacctcaaaatgttctgcaccctgttatcacagatgcagtctctccttctcttgaaacctcttcagcatctggcatgcaacatgtttcacaggaaacacattgtggaactgtacagctgcagccacaaataggtccagtacatgggtccgaagtgagaaggcttcctatacctagaaatcccaggagagagccaataggagtacaggggttgacggttccaccacagaatcctgggtcatcaacaaggttgcagccaaatattctcaattgtccacctcctatcccgctatctagtccatcctcttcaacttaccaagcacatcaagtgaagaatccagacagtgtcattgcttcaaggaacagtggtagtgggccattaccaaggactcctagcgtcgctgctgcatcattgcacctacagtcgacagcacgggatattcgcaacacatcgagccatctacccagtcgagttgttggtctgcctgcgccacacctcatgggtgcacgaccaccaccaggaatttcagtgcaggctggaggagcgaacgcctacagaactatgcaacagactccaactatggatccactgaggcacacacggatgagcatgaaccaaacagcactggctgctgccggccaaaccaccgctgccgcgtatgtccgaccaacccaagcagacatccaaaaccatctctttcctgtgcagcaaagccaggcaccacgatcgcaacaagtgccacgaacaacaaccccgcctctacagcgggcgccaccgcacctgcaacctcccagtgtaccaccgactgttccaagcacacctcaggctggaccttcgcatggtcttccaccggagctccctgtggatgatagctggcgccccacgggacagatgagagggagtctgacaggcaatgcttacagttctgcaattaggcactatcggggccattctgagcagcagcagggcgagcctcggcctcccaacacttcaggtgcgcgaaggcctcagtaactgccagacattgcggcgttgccctgattatcaagcagggcttgggcagctaatttaccaagagattttaatttattatcatagctaatttggcgctatgatgatctatgttagtgtaggtaggggagcctagtgagtagtgatagtgctctgcttgtctacaacgcactctgatgttaaattagtagtatcaggtgaaccatttgtgtacccaatatggaacgtggattttttatgctaatgttttgcctgtgtaattggaccgattttcatgtgaaattcctgaacgattcccatgaaaatgaacaggtaacttgcatatgaacaatgtagtg

SEQ ID NO: 79371 - DNA, 5189 bp, Zea Mays
gttcgttttggtaacagtcgctagcgaaaaagcatccgcccacctcccctcgtctctctcgcgctccgccgccgcgcaaaactgtctggtgatgacgaacgccgccggtacggcccctcacccgactccgccgacgccgctccaacaacaacagcatcagccacccaaggaccagcagcagaaggcgctggccttgaacgcattccgcctgaaggggatcggcgaccgcatcaggttccacctgaagggcatgagcgtgcccccagtcgccgagttggcccacctcatctacgcgttcgccagagggattgacttcgcggtctcagctggtgatattcctctgacagccggtgacatacccgagattctgagaaaggtatatgagctgaggaaagaaacaattatacaatcttcgcttatgatactagcgatctcttgcaagaatgcttgctccaataaatggtttcaacctgcagattccagagacattcttagaatggtcaatgagctctctggcaacttctgcacgtccacaggccaggcagctagtgacagcactgtgcttgaaattatatcacaaataatgccaaggtattaccctcggttgaagtttgagcgcctaatcacttctattgaagcaaaggttggctatgatatattaatggctgacttctttattgagaggagcctatctcgagatgaaaagattagactaattgtcgtacaaaaggaaaatttagatgcctcatcatgtgtctcaagtccaccacatctttttggtcaatgggaagggtgtggacaagaggactaatgtttcaatggaacaaggaccccagttacctactgatatcaccaaaatgctcaaatatggggctaacattatccaaggtgttggatattttaatgctaattatatcatagctgtagcagttgtgaacgatttgacatccttcagtgctccaaaactggatgactatgcacaacctatcactgtttatcctgcagagaggctgcgttgaacccaggacctttggctttggctcagtgggaaggcttctcaccactgaaagttcagtatattttatgctatgcgtccagtttgttgttgttgttgttgttgtcgtcgagtttcttgactgggactgaagtgtgttttaaatgacattttgtaatctctcgattgaaatatccatgtaggttcatttaaatttgtgtctgattcttcatacccactgacattatagttttttatgttattttttgtttttttagaaatggactatcagttttactcgtaattattcaattcaattcttgctacaccttttgagttttttcaccatcgtcaatctgctcttgtctctgtttggccttatgttggaaaatggaaataactgattgctacctccatccccaaaaactttatgttcgtaaatcaaactatcttaagtttgactaaatttatagataaagttgtcaacttatgatacaaatagttatgctatgaaaacatgttcagatctaatgatacttatatttggtaatatatacattaatattctattgtataaaattggtcaaactttagatagtttgacttagaataaaatagaaagagtaaaatgcatcaacggtcctcgaacttggcatactgtgtcaattgggtccccctgggtccccgtacactcttgaaactaggaaaacaggtgttataactttgccagcccattcaaaatcaggtttgctcaaaccgtttgccgacgtggagtgccacgttagagtcacttggatccccgaactttcattagtgcgctccaacgtggctcgctatgtcagcatccggtttgaacaaacccggttttgaatggtgcagacaagttatagcacctgtttttctggttctgagagttcggagacccaattgacacaatatatcaagttcgaggactgctgatgcattttaatcaaacggaaacatcaagcttttggggatagaagtagtaccgaagattgattgtggtgttatgcatgatcatggacatggagcatgtaaagtgaacctgttgtctggaactggattcagtttctctgtaaagtgataggagctgggactcagtatgtaggtggacagttacttgtatagtttccctcttttaaactgactatatatatttttggctgtaaacatgaattcctgtctgtttgtgataacatgcagctttttaaagacttggtttttttttgctctgcacaaaatagacttgtgttttcccctagttcttcccatgggcaaatgaaacctgtaagttcagttttattgatccataaaagtgaaatacctagctgtacttgaacaatcagtttatattggaagagaccatacttgtaagcaaatgaacctatgaacaacatagaaaggtgacacaaatgccggatcatctgctagcagcccatgcggggcttatttgcatagttattgaagctggatgggcaattgacctgctcaggcaggttcaacagttttcctctccaacaactagtcctcttagtagcaactaccgagtatatttgccttggtgatgtgatcagcgtggttgtatctaagtacctaaaccccaattgtatgctgatcgtttcagttggttcgtgcaaagtcagatggctcagtgataatttgcatctatctgatgacttgaatcatgctgaaccaggctttagttctgctagcagtctgtccagtttcaataactacgtttatttgttgatagcatttccattcatttttcggtatcatgccttggtttcttgttcaaaataatatggtttgcttgcatgaagtacatgtagtgacagtaactagtaagagttaaaccatgtgagtatttttttattgtagttctaattgccagattagcaaaagttgattgccctctttggttcccctgcattcattgtctttatgtagtgtggccataatttgagttttaaggctgtccgcagcagatcgtgtaaaataggggatttacactgtagattacattgtttacagagtgaagtttgaaataggggatgcaatagaatagttgctggagacagcctaagtaatacagtatatgcattttcttagtgatggcttattttttaataatttcttccattacagttaacgatgtgtactggtctcttgtagattctgatgtacttgagggaccatcaagagtttccctaaattgtcctataagttttaggcgcataaaaactcctatcaaaggccgtctttgcaaacactatcagtgttttgattatgataattacatggagatgaactcaagaaaaccaaactggcgctgtccatattgtaacacctcctcaagcttcactgacctacgtattgaccaaaagatgatgaagatactagaagagactggagatgatgtcactgatgtccttgtatttgctgatggatcttggaaagttgttccagctcaggatgaaaaatctgatagacatagaggtgacacaattcagcaggctggagatgctgtagaaactggttcaccttctcgagatgtcatagatctgataaatggcaatgatgatggtgatatgcaaatggattgggcatcggctccagaagattcaaagcctgtgttgaatagtcaagatttgtctgtatcagactatcttacagatttccctatgacagctcagacagaagatctgaatcgaggggatggaaataatgggggaagcaacatggcttccacttcacgtcaaaatttgttactacctcctactagtgggctgggctcaagttcattagggaccttggaatctattctacctcaaaatgttctgcaccctgttatcacagatgcagtctctccttctcttgaaacctcttcagcatctggcatgcaacatgtttcacaggaaacacattgtggaactgtacagctgcagccacaaataggtccagtacatgggtccgaagtgagaaggcttcctatacctagaaatcccaggagagagccaataggagtacaggggttgacggttccaccacagaatcctgggtcatcaacaaggttgcagccaaatattctcaattgtccacctcctatcccgctatctagtccatcctcttcaacttaccaagcacatcaagtgaagaatccagacagtgtcattgcttcaaggaacagtggtagtgggccattaccaaggactcctagcgtcgctgctgcatcattgcacctacagtcgacagcacgggatattcgcaacacatcgagccatctacccagtcgagttgttggtctgcctgcgccacacctcatgggtgcacgaccaccaccaggaatttcagtgcaggctggaggagcgaacgcctacagaactatgcaacagactccaactatggatccactgaggcacacacggatgagcatgaaccaaacagcactggctgctgccggccaaaccaccgctgccgcgtatgtccgaccaacccaagcagacatccaaaaccatctctttcctgtgcagcaaagccaggcaccacgatcgcaacaagtgccacgaacaacaaccccgcctctacagcgggcgccaccgcacctgcaacctcccagtgtaccaccgactgttccaagcacacctcaggctggaccttcgcatggtcttccaccggagctccctgtggatgatagctggcgccccacgggacagatgagagggagtctgacaggcaatgcttacagttctgcaattaggcactatcggggccattctgagcagcagcagggcgagcctcggcctcccaacacttcaggtgcgcgaaggcctcagtaactgccagacattgcggcgttgccctgattatcaagcagggcttgggcagctaatttaccaagagattttaatttattatcatagctaatttggcgctatgatgatctatgttagtgtaggtaggggagcctagtgagtagtgatagtgctctgcttgtctacaacgcactctgatgttaaattagtagtatcaggtgaaccatttgtgtacccaatatggaacgtggattttttatgctaatgttttgcctgtgtaattggaccgattttcatgtgaaattcctgaacgattcccatgaaaatgaacaggtaacttgcatatgaacaatgtagtg

SEQ ID NO: 79372 - DNA, 4765 bp, Zea Mays
gttcgttttggtaacagtcgctagcgaaaaagcatccgcccacctcccctcgtctctctcgcgctccgccgccgcgcaaaactgtctggtgatgacgaacgccgccggtacggcccctcacccgactccgccgacgccgctccaacaacaacagcatcagccacccaaggaccagcagcagaaggcgctggccttgaacgcattccgcctgaaggggatcggcgaccgcatcaggttccacctgaagggcatgagcgtgcccccagtcgccgagttggcccacctcatctacgcgttcgccagagggattgacttcgcggtctcagctggtgatattcctctgacagccggtgacatacccgagattctgagaaaggtatatgagctgaggaaagaaacaattatacaatcttcgcttatgatactagcgatctcttgcaagaatgcttgctccaataaatggtttcaacctgcagattccagagacattcttagaatggtcaatgagctctctggcaacttctgcacgtccacaggccaggcagctagtgacagcactgtgcttgaaattatatcacaaataatgccaaggtattaccctcggttgaagtttgagcgcctaatcacttctattgaagcaaaggttggctatgatatattaatggctgacttctttattgagaggagcctatctcgagatgaaaagattagactaattgtcgtacaaaaggaaaatttagatgcctcatcatgtgtctcaagtccaccacatgtgagctttttggtcaatgggaagggtgtggacaagaggactaatgtttcaatggaacaaggaccccagttacctactgatatcaccaaaatgctcaaatatggggctaacattatccaaggtgttggatattttaatgctaattatatcatagctgtagcagttgtgaacgatttgacatccttcagtgctccaaaactggatgactatgcacaacctatcactgtttatcctgcagattctgatgtacttgagggaccatcaagagtttccctaaattgtcctataagttttaggcgcataaaaactcctatcaaaggccgtctttgcaaacactatcagtgttttgattatgataattacatggagatgaactcaagaaaaccaaactggcgctgtccatattgtaacacctcctcaagcttcactgacctacgtattgaccaaaagatgatgaagatactagaagagactggagatgatgtcactgatgtccttgtatttgctgatggatcttggaaagttgttccagctcaggatgaaaaatctgatagacatagaggtgacacaattcagcaggctggagatgctgtagaaactggttcaccttctcgagatgtcatagatctgataaatggcaatgatgatggtgatatgcaaatggattgggcatcggctccagaagattcaaagcctgtgttgaatagtcaagatttgtctgtatcagactatcttacagatttccctatgacagctcagacagaagatctgaatcgaggggatggaaataatgggggaagcaacatggcttccacttcacgtcaaaatttgttactacctcctactagtgggctgggctcaagttcattagggaccttggaatctattctacctcaaaatgttctgcaccctgttatcacagatgcagtctctccttctcttgaaacctcttcagcatctggcatgcaacatgtttcacaggaaacacattgtggaactgtacagctgcagccacaaataggtccagtacatgggtccgaagtgagaaggcttcctatacctagaaatcccaggagagagccaataggagtacaggggttgacggttccaccacagaatcctgggtcatcaacaaggttgcagccaaatattctcaattgtccacctcctatcccgctatctagtccatcctcttcaacttaccaagcacatcaagtgaagaatccagacagtgtcattgcttcaaggaacagtggtagtgggccattaccaaggactcctagcgtcgctgctgcatcattgcacctacagtcgacagcacgggatattcgcaacacatcgagccatctacccagtcgagttgttggtctgcctgcgccacacctcatgggtgcacgaccaccaccaggaatttcagtgcaggctggaggagcgaacgcctacagaactatgcaacagactccaactatggatccactgaggcacacacggatgagcatgaaccaaacagcactggctgctgccggccaaaccaccgctgccgcgtatgtccgaccaacccaagcagacatccaaaaccatctctttcctgtgcagcaaagccaggcaccacgatcgcaacaagtgccacgaacaacaaccccgcctctacagcgggcgccaccgcacctgcaacctcccagtgtaccaccgactgttccaagcacacctcaggctggaccttcgcatggtcttccaccggagctccctgtggatgatagctggcgccccacgggacagatgagagggagtctgacaggcaatgcttacagttctgcaattaggcactatcggggccattctgagcagcagcagggcgagcctcggcctcccaacacttcaggcacaaggttcgctctatggcaaatcaagatgagggacattcttactcaaactgaagtcgatgacactcttgataagttcagtaaaaaagatccaaaatcttggacccatgaggagaagattctgggaaagaatacatatctctgccttatttattgtacctacaaggagggcctggatttgagagtccccgtcccacggaagcaggtgggtggttaaagaaagcttgtgaagaccaccgcgttgtcctgctagatcagcggggaacaggattatccacaccgttgactccatcatctctttcgcaaattaaatctcctgcaaatcaggtggagtacctgaagcatttcagggcagataatatagttaaggatgcagaatttattcgtgtacgtcttgtaccagatgctaagccttggacagtcctaggacagagttatggtggattttgtgccgttacatatttgagttttgctccagaaggcctgaaatctgttcttttgactggagggctcccaccactaggagaaccttgcactgcagatacggtgtacagagcttgctttaaacaggtccagcagcaaaacgagaagtactataagaggtacccccaagatatacaggtcgttcatgaggttataagatacttaagtgaatctgaagggggaggggttcttcttccatctggtggccggttaacccctaagatgctgcagtgtcttggattatcaggtctaggttttggtggtggatttgaaaggctgcattatctgcttgagagggtgtgggatcctgtacttgtcgctggagctaaaaagaggataagctattacttcttaaaagagttcgaaatgtggctagattttgatcaaaatcctctttatgccctcttgcacgagtctatctactgtgagggctcttcatcaaaatggtctgctgaaaagattcatggcgaatatgggagtttgtttgaccctattaaagctacagaagaaggccgagctgtgtactttactggagagatggtgttcccttgcatgttcgatgacatccctgctctacgagacctaaaggaggctgcctgtttgttagctgagaaggaagactggcctccgctctatgatgtcagcgtgttgaacaacaataaggttccggtagcggctgcggtgtactacgaggacatgttcgttaacttcaacatcgccaaggagaccgcctcccagattgctgggatccggctctgggtgaccaacgagtacatgcactcgggcatccgcgacggcggctcgcacgtctttgagtatctcatggctcttctgaacggcaagaagcctttgttttagctgtttcagaagccctgctatctaggttcgagtgtcagttgagctgaacctactatgattgaaacgagcaaataatgaggtccgtttggtttcatgaacaaacgaataatgtttaccttgtagaaatttcacggataatgtataacgttttgaaatttggtccgcagctacatcatagaaatggaattggtctgctcgcaagacacgttccgagcagtactatgaaacaaatgtttgtgttcttcgtcgacatttgtgtccaaagtccaaacagatccagaagccagaggtgccattgtttcaaacaggcctggttcttttttttaaattaacaatacaaaatttactttacaaagttcccaataagcctaagcctcctttgtacctgccaagctcatgccgagtccccctgccccttattgctcatggatctacagagaagctcaaatctccttcacatattccaaggagatgacaaatgactagctctagcttctaccctagatattggctcttagggttgatttagtgacaaaggggatcacggaagattgggagagattggaagagattgatgagaaatgaactaattttgctctcaatcccttccgatctccatgatctaagggctaatttggtggccagggatgacgaggagatccatgtcagaggaatcccattgctatttatggatcctctcgtgatctctggtcatcaaactagcccttagcagcgatttttgtggctacaactacgtgtggcgaagaac

SEQ ID NO: 79373 - DNA, 2377 bp, Zea Mays
gcatccgcctaatcccatccgctatatatcggatcgacggtctccccgcatggacgcagcgagactccgttgcgccgccgccatcgccaccgccacagctgtccccgccgcccgggcgctcccgattcgccgccacccggcctttttccgcgtccccgccgccgttggcctccggttctcgtcgtgccggatcccggtgccgaggagagcggccgcggccatgtcgtcgtcagcggcggcgcaggggacggagcacgaggctgacgcgtggtacgcggtaccgggcctcagcctccgcgaccaccggttcgccgtcccgcttgaccactccagtcccgagcgcggggacaccatcaccgtcttcgcgcgcgaggtcgtcgccgctgggaaagaatacatatctctgccttatttattgtacctacaaggagggcctggatttgagagtccccgtcccacggaagcaggtgggtggttaaagaaagcttgtgaagaccaccgcgttgtcctgctagatcagcggggaacaggattatccacaccgttgactccatcatctctttcgcaaattaaatctcctgcaaatcaggtggagtacctgaagcatttcagggcagataatatagttaaggatgcagaatttattcgtgtacgtcttgtaccagatgctaagccttggacagtcctaggacagagttatggtggattttgtgccgttacatatttgagttttgctccagaaggcctgaaatctgttcttttgactggagggctcccaccactaggagaaccttgcactgcagatacggtgtacagagcttgctttaaacaggtccagcagcaaaacgagaagtactataagaggtacccccaagatatacaggtcgttcatgaggttataagatacttaagtgaatctgaagggggaggggttcttcttccatctggtggccggttaacccctaagatgctgcagtgtcttggattatcaggtctaggttttggtggtggatttgaaaggctgcattatcttgcaggcttgagagggtgtgggatcctgtacttgtcgctggagctaaaaagaggataagctattacttcttaaaagagttcgaaatgtggctagattttgatcaaaatcctctttatgccctcttgcacgagtctatctactgtgagggctcttcatcaaaatggtctgctgaaaagattcatggcgaatatgggagtttgtttgaccctattaaagctacagaagaaggccgagctgtgtactttactggagagatggtgttcccttgcatgttcgatgacatccctgctctacgagacctaaaggaggctgcctgtttgttagctgagaaggaagactggcctccgctctatgatgtcagcgtgttgaacaacaataaggttccggtagcggctgcggtgtactacgaggacatgttcgttaacttcaacatcgccaaggagaccgcctcccagattgctgggatccggctctgggtgaccaacgagtacatgcactcgggcatccgcgacggcggctcgcacgtctttgagtatctcatggctcttctgaacggcaagaagcctttgttttagctgtttcagaagccctgctatctaggttcgagtgtcagttgagctgaacctactatgattgaaacgagcaaataatgaggtccgtttggtttcatgaacaaacgaataatgtttaccttgtagaaatttcacggataatgtataacgttttgaaatttggtccgcagctacatcatagaaatggaattggtctgctcgcaagacacgttccgagcagtactatgaaacaaatgtttgtgttcttcgtcgacatttgtgtccaaagtccaaacagatccagaagccagaggtgccattgtttcaaacaggcctggttcttttttttaaattaacaatacaaaatttactttacaaagttcccaataagcctaagcctcctttgtacctgccaagctcatgccgagtccccctgccccttattgctcatggatctacagagaagctcaaatctccttcacatattccaaggagatgacaaatgactagctctagcttctaccctagatattggctcttagggttgatttagtgacaaaggggatcacggaagattgggagagattggaagagattgatgagaaatgaactaattttgctctcaatcccttccgatctccatgatctaagggctaatttggtggccagggatgacgaggagatccatgtcagaggaatcccattgctatttatggatcctctcgtgatctctggtcatcaaactagcccttagcagcgatttttgtggctacaactacgtgtggcgaagaac

SEQ ID NO: 79374 - DNA, 2296 bp, Zea Mays
gcatccgcctaatcccatccgctatatatcggatcgacggtctccccgcatggacgcagcgagactccgttgcgccgccgccatcgccaccgccacagctgtccccgccgcccgggcgctcccgattcgccgccacccggcctttttccgcgtccccgccgccgttggcctccggttctcgtcgtgccggatcccggtgccgaggagagcggccgcggccatgtcgtcgtcagcggcggcgcaggggacggagcacgaggctgacgcgtggtacgcggtaccgggcctcagcctccgcgaccaccggttcgccgtcccgcttgaccactccagtcccgagcgcggggacaccatcaccgtcttcgcgcgcgaggtcgtcgccgctgggaaagaatacatatctctgccttatttattgtacctacaaggagggcctggatttgagagtccccgtcccacggaagcaggtgggtggttaaagaaagcttgtgaagaccaccgcgttgtcctgctagatcagcggggaacaggattatccacaccgttgactccatcatctctttcgcaaattaaatctcctgcaaatcaggtggagtacctgaagcatttcagggcagataatatagttaaggatgcagaatttattcgtgtacgtcttgtaccagatgctaagccttggacagtcctaggacagggctcccaccactaggagaaccttgcactgcagatacggtgtacagagcttgctttaaacaggtccagcagcaaaacgagaagtactataagaggtacccccaagatatacaggtcgttcatgaggttataagatacttaagtgaatctgaagggggaggggttcttcttccatctggtggccggttaacccctaagatgctgcagtgtcttggattatcaggtctaggttttggtggtggatttgaaaggctgcattatctgcttgagagggtgtgggatcctgtacttgtcgctggagctaaaaagaggataagctattacttcttaaaagagttcgaaatgtggctagattttgatcaaaatcctctttatgccctcttgcacgagtctatctactgtgagggctcttcatcaaaatggtctgctgaaaagattcatggcgaatatgggagtttgtttgaccctattaaagctacagaagaaggccgagctgtgtactttactggagagatggtgttcccttgcatgttcgatgacatccctgctctacgagacctaaaggaggctgcctgtttgttagctgagaaggaagactggcctccgctctatgatgtcagcgtgttgaacaacaataaggttccggtagcggctgcggtgtactacgaggacatgttcgttaacttcaacatcgccaaggagaccgcctcccagattgctgggatccggctctgggtgaccaacgagtacatgcactcgggcatccgcgacggcggctcgcacgtctttgagtatctcatggctcttctgaacggcaagaagcctttgttttagctgtttcagaagccctgctatctaggttcgagtgtcagttgagctgaacctactatgattgaaacgagcaaataatgaggtccgtttggtttcatgaacaaacgaataatgtttaccttgtagaaatttcacggataatgtataacgttttgaaatttggtccgcagctacatcatagaaatggaattggtctgctcgcaagacacgttccgagcagtactatgaaacaaatgtttgtgttcttcgtcgacatttgtgtccaaagtccaaacagatccagaagccagaggtgccattgtttcaaacaggcctggttcttttttttaaattaacaatacaaaatttactttacaaagttcccaataagcctaagcctcctttgtacctgccaagctcatgccgagtccccctgccccttattgctcatggatctacagagaagctcaaatctccttcacatattccaaggagatgacaaatgactagctctagcttctaccctagatattggctcttagggttgatttagtgacaaaggggatcacggaagattgggagagattggaagagattgatgagaaatgaactaattttgctctcaatcccttccgatctccatgatctaagggctaatttggtggccagggatgacgaggagatccatgtcagaggaatcccattgctatttatggatcctctcgtgatctctggtcatcaaactagcccttagcagcgatttttgtggctacaactacgtgtggcgaagaac

SEQ ID NO: 79375 - DNA, 2022 bp, Zea Mays
aagcaattcgacctggatctgaatctcaatcccttttgcggctttgacttgcgtccgtccgaagaggaagtgctgaccttctcgccacactctaatctaatcgtaatcacatgcagatgccgctccgtcactctccttggcttatgggtcgccgtcggccaccgcaagcccatgtgtcctccctctcgccgacacgtcctccgcacgcggcccgccctataatccactgacaccaccaggcccaccgccagctaggcccacccgtcatctctgtgctgcagctccccacgaccccacctcgtgctactgcagcctgctccggtagtcgcggcgcacgcctcccgtccgccttgccgtttgaacactcgagctcgagagcaatttacggcaccatcgcatcgcgcactcgtgccaccccaccccccgattccttcgatcccctcgtggcggtggcgcgtcgtgcgggctctactggagctagatctcggaggagtggaagggagacagccagggagggaagggagaccgcggcgccgcgcatttcgtcgagcacgatgagggcgcggtgggctgtgacgcttctgctgctcgcggtcctagcgctcaccgcgtcggcggcgcggctggacctggacgacgacgacgactcgggcgtgctggacgagctcctggccatcgacgaggaggccgaacggggcgggctgctggacgcggagggcgccggggaggcggtgcggcgggcgcagtcgatggtgctggcgctcgacaatgacaacgcgcgccgcgccgtggaggaccacgcggagctgctgctgctcgggtacgcgccgtggtgtgagcgcagcgcgcagctcatgccgcggttcgccgaggccgccgccgcgctgcgcgccatgggcagcgccgtcgccttcgcgaagctcgacggggagcgctaccccaaggcggctgccgccgtcggggtcaagggcttccccaccgtgctcctcttcgtcaatggcaccgagcacgcctaccatggcctccacaccaaggacgccatagttacttgggtaagaaagaagactggcgtgccaatcattaggcttcagtctaaggattcagctgaggagttcctcaaaaaggacatgacctttgttattggtctattcaagaattttgagggagcagaccatgaagaatttgtgaaggcagcaaccacagacaacgaggtacagtttgtagaaaccagtgatacaagtgttgccaaagttctatttccaggtattacgtccgaggagaaatttgtgggcctcgttaaaagcgagccagagaagtttgaaaagttcgatgggaaatttgaagaaaaggaaattttgcggtttgtggagctcaacaagtttcctctaattactgtattcactgagctcaattctggtaaagtatattcaagccctattgagctacaggtcttcacctttgcagaggcttatgattttgaagatctggaatctatggttgaagaaatagccagagcattcaagacaaagataatgtttatatatgttgacactgctgaagaaaaccttgcaaaaccattcctcactctttatggccttgaatcagaaaaaaagcctactgttacagcatttgatacaagcaatggagccaagtatctgatggaggcagatatcaatgcaaacaacctgagggagttctgcttaagtcttctggatggcacgctcccgccataccacaaatcagaaccattgcctcaagagaagggacttattgaaaaggttgttggtcgtacatttgattcttctgtgctggaaagtcatcaaaacgtcttccttgaggttcatacaccttggtgtgttgactgtgaagcgataagtaaaaatgttgagaagctggcgaagcattttagtggttcggacaatcttaaatttgcgcgcatagatgcttctgtgaatgaacatcccaaattgaaggttgccggcttgcagtgcaaatttctatctagtatcaatattctgtgct

SEQ ID NO: 79376 - DNA, 1411 bp, Zea Mays
gtactgggagcagaccatgaagaatttgtgaaggcagcaaccacagacaacgaggtacagtttgtagaaaccagtgatacaagtgttgccaaagttctatttccaggtattacgtccgaggagaaatttgtgggcctcgttaaaagcgagccagagaagtttgaaaagttcgatgggaaatttgaagaaaaggaaattttgcggtttgtggagctcaacaagtttcctctaattactgtattcactgagctcaattctggtaaagtatattcaagccctattgagctacaggtcttcacctttgcagaggcttatgattttgaagatctggaatctatggttgaagaaatagccagagcattcaagacaaagataatgtttatatatgttgacactgctgaagaaaaccttgcaaaaccattcctcactctttatggccttgaatcagaaaaaaagcctactgttacagcatttgatacaagcaatggagccaagtatctgatggaggcagatatcaatgcaaacaacctgagggagttctgcttaagtcttctggatggcacgctcccgccataccacaaatcagaaccattgcctcaagagaagggacttattgaaaaggttgttggtcgtacatttgattcttctgtgctggaaagtcatcaaaacgtcttccttgaggttcatacaccttggtgtgttgactgtgaagcgataagtaaaaatgttgagaagctggcgaagcattttagtggttcggacaatcttaaatttgcgcgcatagatgcttctgtgaatgaacatcccaaattgaaggtgaataattacccgacgctattcctttatcttgctgaagacaaaagcaacccgatcaagctttcaaagaaatcgagtgtcaaggacatggccaaactgatcaaggagaagctgcaaataccagacgtggagacagtagcggcccctgacaacgtcaaggatgagctataacctgtagtagacaaactaaggtccagtgaaggaaaaattgcagcatgtttgcgtgttttgcgccaacctgatcacagagctcagctttattcgcgtgccgtgttaagtgactaaagacaatggtatatatataggtacctaaatcaaagaggcttcggaccctagcattggtatcgattgagttattgacaagtattctgctgtaaaattcggagcattggacatgtatgtgtgagactatagcatgctttggggtcagtagactcgtcactaataactatactcaattcatcagtgatgtgttcggggaataccgtgtcaatataggcaccaagctatgctttgtctcaccacatcacacccgaagcaacaagcaagtgaagagggcgaatgtggaaattctcctgagccaagactagagcat

SEQ ID NO: 79377 - DNA, 1208 bp, Zea Mays
ggcggggctcgctttcgaccctggctggggccccacttggcagagacgcaaatcaaaccgctgcacaaaaggagatgctcccctacaccggccgatttgctaatttgtcgttattgccgcttcgaaaatttgcatgaaactcataaaatcacgcagaaaactatacaacgaattcagtgctaaaattccaattatttccctgcaggctgcatcggccaggtggccaagtctcgtcaagtcgtccccgctcccccatagtcgccaccgccggcccgcctgcccgcggcacgcaacccgccacgcccaagcagcggagggccaaaaatgcgctcgcagttgccgtagcgccatcgcgtcgtccatccgctggggagccacgcgatggaggaggacaagcgggcggaggaggcgcggcgcgccaaggaggccggcaacgacgcataccgcaagtccttcctcgagacggccgtcgagcactacacccgcggcgcgctcctcgacccccgagatatctccttcctcactaaccgcgccgccgcctacttccacatgggcaagtataaggagtgcgtgagggactgcgagggggcggtggagcgtggcagggacctcagcgccgccaacaagctgatcgcgaaggcgctgttgcggaaggcgtcggcgctgctcgagctcgcgacatgctccggggattacgcaccggcgatcagggccctgcagcaatcgctcaccgagcattacagcgaggagacgcacgagaagctcaacaaggcggtggtagttaagaaggagcttgaggagcaggagcgattggatcaggagacggccgaccaacaccgcgagagaggcaacgaattgttcaagcagaagcagtaccatgaagcagcaacgcactacacacgagctatgaaaatgaacccaaaggatccaagagcatttagcaacagagctcaatgccacatctatctgggagctttccctcaaggtcttgaggatgcagagaaatgtgttgaactggatccaacttttataaagggctacgtgcgtaaagctaaagttcagttcctgatggaaaattatgaaaatgctatggcaacttacctagagggtttgacgtacgacccaaataatctggaggttcttgatggcttaagaagcatgcattaagagggctaatgggggtgatgttgagcttgaggacttgaaag

SEQ ID NO: 79378 - DNA, 1534 bp, Zea Mays
ggcggggctcgctttcgaccctggctggggccccacttggcagagacgcaaatcaaaccgctgcacaaaaggagatgctcccctacaccggccgatttgctaatttgtcgttattgccgcttcgaaaatttgcatgaaactcataaaatcacgcagaaaactatacaacgaattcagtgctaaaattccaattatttccctgcaggctgcatcggccaggtggccaagtctcgtcaagtcgtccccgctcccccatagtcgccaccgccggcccgcctgcccgcggcacgcaacccgccacgcccaagcagcggagggccaaaaatgcgctcgcagttgccgtagcgccatcgcgtcgtccatccgctggggagccacgcgatggaggaggacaagcgggcggaggaggcgcggcgcgccaaggaggccggcaacgacgcataccgcaagtccttcctcgagacggccgtcgagcactacacccgcggcgcgctcctcgacccccgagatatctccttcctcactaaccgcgccgccgcctacttccacatgggcaagtataaggagtgcgtgagggactgcgagggggcggtggagcgtggcagggacctcagcgccgccaacaagctgatcgcgaaggcgctgttgcggaaggcgtcggcgctgctcgagctcgcgacatgctccggggattacgcaccggcgatcagggccctgcagcaatcgctcaccgagcattacagcgaggagacgcacgagaagctcaacaaggcggtggtagttaagaaggagcttgaggagcaggagcgattggatcaggagacggccgaccaacaccgcgagagaggcaacgaattgttcaagcagaagcagtaccatgaagcagcaacgcactacacacgagctatgaaaatgaacccaaaggatccaagagcatttagcaacagagctcaatgccacatctatctgggagctttccctcaaggtcttgaggatgcagagaaatgtgttgaactggatccaacttttataaagggctacgtgcgtaaagctaaagttcagttcctgatggaaaattatgaaaatgctatggcaacttacctagagggtttgacgtacgacccaaataatctggaggttcttgatggcttaagaagatgtgcagcatgcattaagagggctaatgggggtgatgttgagcttgaggacttgaaagatatgttgggaaatttccaatcagaaaataaccttcttaaatttcgaaaagcaacagaacaagctgcaatactcaagaaggaagcttctgatgagcgtttgaagcgtattgaatctgaacgaatgatcactgccactatattcacagttcaatgctacgacagtcttatgaacatatttttatccaaaaaacccccaacatattagcaggttatcttgacaaagtttgttggctgttgatgttactgaagctatagattatcttatctcaataatatgaataagcgaccaataaaaaaatctgcaggctagaacaatg

SEQ ID NO: 79379 - DNA, 1487 bp, Zea Mays
ggcggggctcgctttcgaccctggctggggccccacttggcagagacgcaaatcaaaccgctgcacaaaaggagatgctcccctacaccggccgatttgctaatttgtcgttattgccgcttcgaaaatttgcatgaaactcataaaatcacgcagaaaactatacaacgaattcagtgctaaaattccaattatttccctgcaggctgcatcggccaggtggccaagtctcgtcaagtcgtccccgctcccccatagtcgccaccgccggcccgcctgcccgcggcacgcaacccgccacgcccaagcagcggagggccaaaaatgcgctcgcagttgccgtagcgccatcgcgtcgtccatccgctggggagccacgcgatggaggaggacaagcgggcggaggaggcgcggcgcgccaaggaggccggcaacgacgcataccgcaagtccttcctcgagacggccgtcgagcactacacccgcggcgcgctcctcgacccccgagatatctccttcctcactaaccgcgccgccgcctacttccacatggtataaggagtgcgtgagggactgcgagggggcggtggagcgtggcagggacctcagcgccgccaacaagctgatcgcgaaggcgctgttgcggaaggcgtcggcgctgctcgagctcgcgacatgctccggggattacgcaccggcgatcagggccctgcagcaatcgctcaccgagcattacagcgaggagacgcacgagaagctcaacaaggcggtggtagttaagaaggagcttgaggagcaggagcgattggatcaggagacggccgaccaacaccgcgagagaggcaacgaattgttcaagcagaagcagtaccatgaagcagcaacgcactacacacgagctatgaaaatgaacccaaaggatccaagagcatttagcaacagagctcaatgccacatctatctgggagctttccctcaaggtcttgaggatgcagagaaatgtgttgaactggatccaacttttataaagggctacgtgcgtaaagctaaagttcagttcctgatggaaaattatgaaaatgctatggcaacttacctagagggtttgacgtacgacccaaataatctggaggttcttgatggcttaagaagcttatgtctaaatgatgcacaaatgggaaatttccaatcagaaaataaccttcttaaatttcgaaaagcaacagaacaagctgcaatactcaagaaggaagcttctgatgagcgtttgaagcgtattgaatctgaacgaatgatcactgccactatattcacagttcaatgctacgacagtcttatgaacatatttttatccaaaaaacccccaacatattagcaggttatcttgacaaagtttgttggctgttgatgttactgaagctatagattatcttatctcaataatatgaataagcgaccaataaaaaaatctgcaggctagaacaatg

SEQ ID NO: 79380 - DNA, 2601 bp, Zea Mays
atggagcagttccccgacggggcgcacgtgcggctgcggagccgcgtgcacgcagggtacctccacgccgacgaggacggggtgggggtgtccctgcgccgctggcgccgcaggtcgatgaacgtggcgtggaaggtgcaccgcatcctgcacgacggctccaccagcgtcctcctccacagcgccgcctatggccggtacctcgcggcgtcccacgacccggcgccgccgggccacctcggcctccgcgtcgacctgggcgactacgaccaggacgtggaccccatcctgtggaaggccgtcggctccggggacgccggctacgtcctcctgcgccacgtctccaaccgcctcctccgcgccaacggaaggtaccgcctctggcaccgtggcgtctccgtcgacgacgtcgacaaccagagcacgatgatgcattggaaggtcgagaccatccccaccagccccaggccgccagcacttccagcgccgactcggaggaaccgaggcagcttccgcggcctgttcctcctgcacgaggagcccgtggtgctgcagcggacggtacggttcgtgcgggcggacaactacggcaacttcccggacaactggggcacgctccagttccagggccgctccgtctttgagctgagagcggagatggcgcgtcgcttaaactatgcgctcttcttcttccgcctcctgatgtgcgtccggggcggccgctacgggcgcctgaccccgctactcatcgacctgcctcgcaacgaggagaccctggacatcatcgtcctcttcatcgggacacaaggacctgaaaattgcatcacttgtgtgctgattgctgaagctctccacatgattttgttaactgacagccccatgaggccgcatgtggacatgtctactcggaccactgcgtttaccattacctacacggctacaccgtcgcctaatttgccaacgcccgccgccgttccgatggaaaccgccgcgccggcgcgcgtccaagccctcgctgaggccggcgtgtcccgcctcccggcgcagtacatccagccgcctgagcaccgaccaaccccctcgccttctcctattgccgcggcgctctccgtgccggtcgtcgacctctcaacctccaccgccgacgacgccgtccgcgccgcgtgcgcggactggggcgcctttcacgtggtcggccacggcgtgccggtggatctcctcgacgcggtgcgcgcggcagggctcgccttcttccgcgcgcccatggaggacaaactccggttcgcctgcgacccggccaggggcgccgcctcggaagggtacggcagccgcatgctcgccaacgacgactccgtgctcgactggcgcgactactttgaccaccacacgctcccggagtcccgctgtgatcccgcccgctggcccgacttcgtccccggttacagagatactattgcaaaatacagcaacagcatgaaggatcttgctcaaaaattgttgtgcatcatctcagaaaatctgagcctaccaccatcttatatacaagaggcggttggagaagttttccagaacattactattagctactattctccgtgtccacaacctgatcttgctcttggattacaatctcattctgatatgggcgcaataacacttctgatacaagatgatgttggtgggcttgaagtattaaaggatggaatgtggatacctgtgcctgctttgcgtgatggcatccttgtgattctcgctgatcagacagagatcatcaccaatggaagatacaagagttcagttcatcgagctgttgtcaatgctgagcatgcccgcttatcagtagcaacattttatgatccatcaaaatcaaggaaaatatgcactgccccgcagcttgtgagtgagaatgaaccacaaaagtatcgggatgtaatttatggtgactatgtctcatcttggtatagcaaaggtccagagggcaagcgaaacatcgacgccctcctgattcagcactagagccataggtatgccttaaaacagggttggaccactcatctgttttgtaaacttctaatgcatgtacaacatatcagtttccaactttaaacaatcaggataaggaaaccaacttgtatactgaatgcagtgcaataaagtaccttttcattgtcagtcttttagttaagatactttcatctgactgaaagagtaaatgagacagaatcttgacattttttttctctaacattgttttttgtttttttcttgttttagtttctctaaaaaaacttcgtattgatgtaatacctgattatggtcttaaagacaaccttttctaggttggaacctggcatgtgtagtcgattttattcccagttataaagataaattgttaatcttgggtccccagcatctattgcagttttttttcctgctcatgtgttgaggccgagtgggcatagtagtgtgcaaggcggatggaagcagccaaccaacttgacaatgaaactcttggctctgtcacctggttgcatcaccaatgggaaatccattgcgactttctcactagtaatgtaaccttcatatacactatggttttct

SEQ ID NO: 79381 - DNA, 2337 bp, Zea Mays
atggagcagttccccgacggggcgcacgtgcggctgcggagccgcgtgcacgcagggtacctccacgccgacgaggacggggtgggggtgtccctgcgccgctggcgccgcaggtcgatgaacgtggcgtggaaggtgcaccgcatcctgcacgacggctccaccagcgtcctcctccacagcgccgcctatggccggtacctcgcggcgtcccacgacccggcgccgccgggccacctcggcctccgcgtcgacctgggcgactacgaccaggacgtggaccccatcctgtggaaggccgtcggctccggggacgccggctacgtcctcctgcgccacgtctccaaccgcctcctccgcgccaacggaaggtaccgcctctggcaccgtggcgtctccgtcgacgacgtcgacaaccagagcacgatgatgcattggaaggtcgagaccatccccaccagccccaggccgccagcacttccagcgccgactcggaggaaccgaggcagcttccgcggcctgttcctcctgcacgaggagcccgtggtgctgcagcggacggtacggttcgtgcgggcggacaactacggcaacttcccggacaactggggcacgctccagttccagggccgctccgtctttgagctgagagcggagatggcgcgtcgcttaaactatgcgctcttcttcttccgcctcctgatgtgcgtccggggcggccgctacgggcgcctgaccccgctactcatcgacctgcctcgcaacgaggagaccctggacatcatcgtcctcttcatcgggacacaaggacctgaaaattgcatcacttgtgtgctgattgctgaagctctccacatgattttgttaactgacagccccatgaggccgcatgtggacatgtctactcggaccactgcgtttaccattacctacacggctacaccgtcgcctaatttgccaacgcccgccgccgttccgatggaaaccgccgcgccggcgcgcgtccaagccctcgctgaggccggcgtgtcccgcctcccggcgcagtacatccagccgcctgagcaccgaccaaccccctcgccttctcctattgccgcggcgctctccgtgccggtcgtcgacctctcaacctccaccgccgacgacgccgtccgcgccgcgtgcgcggactggggcgcctttcacgtggtcggccacggcgtgccggtggatctcctcgacgcggtgcgcgcggcagggctcgccttcttccgcgcgcccatggaggacaaactccggttcgcctgcgacccggccaggggcgccgcctcggaagggtacggcagccgcatgctcgccaacgacgactccgtgctcgactggcgcgactactttgaccaccacacgctcccggagtcccgctgtgatcccgcccgctggcccgacttcgtccccggttacagagatactattgcaaaatacagcaacagcatgaaggatcttgctcaaaaattgttgtgcatcatctcagaaaatctgagcctaccaccatcttatatacaagaggcggttggagaagttttccagaacattactattagctactattctccgtgtccacaacctgatcttgctcttggattacaatctcattctgatatgggcgcaataacacttctgatacaagatgatgttggtgggcttgaagtattaaaggatggaatgtggatacctgtgcctgctttgcgtgatggcatccttgtgattctcgctgatcagacagagatcatcaccaatggaagatacaagagttcagttcatcgagctgttgtcaatgctgagcatgcccgcttatcagtagcaacattttatgatccatcaaaatcaaggaaaatatgcactgccccgcagcttgtgagtgagaatgaaccacaaaagtatcgggatgtaatttatggtgactatgtctcatcttggtatagcaaaggtccagagggcaagcgaaacatcgacgccctcctgattcagcactagagccatagttttttttcctgctcatgtgttgaggccgagtgggcatagtagtgtgcaaggcggatggaagcagccaaccaacttgacaatgaaactcttggctctgtcacctggttgcatcaccaatgaaaaaccaatccggacaggagaaaggagcagaggtaggaatgagaagcggaggggacgggtagaacgaagtctccctttccttcttgcaagttagaagtttgtaggagcaacgtttgacatgtgccgttccattaccttggggtgactagtgaaaggttggttccaagctccattgacgctgtagggtcccag

SEQ ID NO: 79382 - DNA, 2312 bp, Zea Mays
atggagcagttccccgacggggcgcacgtgcggctgcggagccgcgtgcacgcagggtacctccacgccgacgaggacggggtgggggtgtccctgcgccgctggcgccgcaggtcgatgaacgtggcgtggaaggtgcaccgcatcctgcacgacggctccaccagcgtcctcctccacagcgccgcctatggccggtacctcgcggcgtcccacgacccggcgccgccgggccacctcggcctccgcgtcgacctgggcgactacgaccaggacgtggaccccatcctgtggaaggccgtcggctccggggacgccggctacgtcctcctgcgccacgtctccaaccgcctcctccgcgccaacggaaggtaccgcctctggcaccgtggcgtctccgtcgacgacgtcgacaaccagagcacgatgatgcattggaaggtcgagaccatccccaccagccccaggccgccagcacttccagcgccgactcggaggaaccgaggcagcttccgcggcctgttcctcctgcacgaggagcccgtggtgctgcagcggacggtacggttcgtgcgggcggacaactacggcaacttcccggacaactggggcacgctccagttccagggccgctccgtctttgagctgagagcggagatggcgcgtcgcttaaactatgcgctcttcttcttccgcctcctgatgtgcgtccggggcggccgctacgggcgcctgaccccgctactcatcgacctgcctcgcaacgaggagaccctggacatcatcgtcctcttcatcgggacacaaggacctgaaaattgcatcacttgtgtgctgattgctgaagctctccacatgattttgttaactgacagccccatgaggccgcatgtggacatgtctactcggaccactgcgtttaccattacctacacggctacaccgtcgcctaatttgccaacgcccgccgccgttccgatggaaaccgccgcgccggcgcgcgtccaagccctcgctgaggccggcgtgtcccgcctcccggcgcagtacatccagccgcctgagcaccgaccaaccccctcgccttctcctattgccgcggcgctctccgtgccggtcgtcgacctctcaacctccaccgccgacgacgccgtccgcgccgcgtgcgcggactggggcgcctttcacgtggtcggccacggcgtgccggtggatctcctcgacgcggtgcgcgcggcagggctcgccttcttccgcgcgcccatggaggacaaactccggttcgcctgcgacccggccaggggcgccgcctcggaagggtacggcagccgcatgctcgccaacgacgactccgtgctcgactggcgcgactactttgaccaccacacgctcccggagtcccgctgtgatcccgcccgctggcccgacttcgtccccggttacagagatactattgcaaaatacagcaacagcatgaaggatcttgctcaaaaattgttgtgcatcatctcagaaaatctgagcctaccaccatcttatatacaagaggcggttggagaagttttccagaacattactattagctactattctccgtgtccacaacctgatcttgctcttggattacaatctcattctgatatgggcgcaataacacttctgatacaagatgatgttggtgggcttgaagtattaaaggatggaatgtggatacctgtgcctgctttgcgtgatggcatccttgtgattctcgctgatcagacagagatcatcaccaatggaagatacaagagttcagttcatcgagctgttgtcaatgctgagcatgcccgcttatcagtagcaacattttatgatccatcaaaatcaaggaaaatatgcactgccccgcagcttgtgagtgagaatgaaccacaaaagtatcgggatgtaatttatggtgactatgtctcatcttggtatagcaaaggtccagagggcaagcgaaacatcgacgccctcctgattcagcactagagccataggccgagtgggcatagtagtgtgcaaggcggatggaagcagccaaccaacttgacaatgaaactcttggctctgtcacctggttgcatcaccaatgaaaaaccaatccggacaggagaaaggagcagaggtaggaatgagaagcggaggggacgggtagaacgaagtctccctttccttcttgcaagttagaagtttgtaggagcaacgtttgacatgtgccgttccattaccttggggtgactagtgaaaggttggttccaagctccattgacgctgtagggtcccag

SEQ ID NO: 79383 - DNA, 2275 bp, Zea Mays
atggagcagttccccgacggggcgcacgtgcggctgcggagccgcgtgcacgcagggtacctccacgccgacgaggacggggtgggggtgtccctgcgccgctggcgccgcaggtcgatgaacgtggcgtggaaggtgcaccgcatcctgcacgacggctccaccagcgtcctcctccacagcgccgcctatggccggtacctcgcggcgtcccacgacccggcgccgccgggccacctcggcctccgcgtcgacctgggcgactacgaccaggacgtggaccccatcctgtggaaggccgtcggctccggggacgccggctacgtcctcctgcgccacgtctccaaccgcctcctccgcgccaacggaaggtaccgcctctggcaccgtggcgtctccgtcgacgacgtcgacaaccagagcacgatgatgcattggaaggtcgagaccatccccaccagccccaggccgccagcacttccagcgccgactcggaggaaccgaggcagcttccgcggcctgttcctcctgcacgaggagcccgtggtgctgcagcggacggtacggttcgtgcgggcggacaactacggcaacttcccggacaactggggcacgctccagttccagggccgctccgtctttgagctgagagcggagatggcgcgtcgcttaaactatgcgctcttcttcttccgcctcctgatgtgcgtccggggcggccgctacgggcgcctgaccccgctactcatcgacctgcctcgcaacgaggagaccctggacatcatcgtcctcttcatcgggacacaaggacctgaaaattgcatcacttgtgtgctgattgctgaagctctccacatgattttgttaactgacagccccatgaggccgcatgtggacatgtctactcggaccactgcgtttaccattacctacacggctacaccgtcgcctaatttgccaacgcccgccgccgttccgatggaaaccgccgcgccggcgcgcgtccaagccctcgctgaggccggcgtgtcccgcctcccggcgcagtacatccagccgcctgagcaccgaccaaccccctcgccttctcctattgccgcggcgctctccgtgccggtcgtcgacctctcaacctccaccgccgacgacgccgtccgcgccgcgtgcgcggactggggcgcctttcacgtggtcggccacggcgtgccggtggatctcctcgacgcggtgcgcgcggcagggctcgccttcttccgcgcgcccatggaggacaaactccggttcgcctgcgacccggccaggggcgccgcctcggaagggtacggcagccgcatgctcgccaacgacgactccgtgctcgactggcgcgactactttgaccaccacacgctcccggagtcccgctgtgatcccgcccgctggcccgacttcgtccccggttacagcatgttacttttgcctataacacgggagataacaccatgtaccttttacagagatactattgcaaaatacagcaacagcatgaaggatcttgctcaaaaattgttgtgcatcatctcagaaaatctgagcctaccaccatcttatatacaagaggcggttggagaagttttccagaacattactattagctactattctccgtgtccacaacctgatcttgctcttggattacaatctcattctgatatgggcgcaataacacttctgatacaagatgatgttggtgggcttgaagtattaaaggatggaatgtggatacctgtgcctgctttgcgtgatggcatccttgtgattctcgctgatcagacagagatcatcaccaatggaagatacaagagttcagttcatcgagctgttgtcaatgctgagcatgcccgcttatcagtagcaacattttatgatccatcaaaatcaaggaaaatatgcactgccccgcagcttgtgagtgagaatgaaccacaaaagtatcgggatgtaatttatggtgactatgtctcatcttggtatagcaaaggtccagagggcaagcgaaacatcgacgccctcctgattcagcactagagccatagttttttttcctgctcatgtgttgaggccgagtgggcatagtagtgtgcaaggcggatggaagcagccaaccaacttgacaatgaaactcttggctctgtcacctggttgcatcaccaatggttctgcgagacttacgatattgagagcaaatgcagccagcgttgcgtagggctgtccatcaacagacggcacgaaggcc

SEQ ID NO: 79384 - DNA, 2236 bp, Zea Mays
atggagcagttccccgacggggcgcacgtgcggctgcggagccgcgtgcacgcagggtacctccacgccgacgaggacggggtgggggtgtccctgcgccgctggcgccgcaggtcgatgaacgtggcgtggaaggtgcaccgcatcctgcacgacggctccaccagcgtcctcctccacagcgccgcctatggccggtacctcgcggcgtcccacgacccggcgccgccgggccacctcggcctccgcgtcgacctgggcgactacgaccaggacgtggaccccatcctgtggaaggccgtcggctccggggacgccggctacgtcctcctgcgccacgtctccaaccgcctcctccgcgccaacggaaggtaccgcctctggcaccgtggcgtctccgtcgacgacgtcgacaaccagagcacgatgatgcattggaaggtcgagaccatccccaccagccccaggccgccagcacttccagcgccgactcggaggaaccgaggcagcttccgcggcctgttcctcctgcacgaggagcccgtggtgctgcagcggacggtacggttcgtgcgggcggacaactacggcaacttcccggacaactggggcacgctccagttccagggccgctccgtctttgagctgagagcggagatggcgcgtcgcttaaactatgcgctcttcttcttccgcctcctgatgtgcgtccggggcggccgctacgggcgcctgaccccgctactcatcgacctgcctcgcaacgaggagaccctggacatcatcgtcctcttcatcgggacacaaggacctgaaaattgcatcacttgtgtgctgattgctgaagctctccacatgattttgttaactgacagccccatgaggccgcatgtggacatgtctactcggaccactgcgtttaccattacctacacggctacaccgtcgcctaatttgccaacgcccgccgccgttccgatggaaaccgccgcgccggcgcgcgtccaagccctcgctgaggccggcgtgtcccgcctcccggcgcagtacatccagccgcctgagcaccgaccaaccccctcgccttctcctattgccgcggcgctctccgtgccggtcgtcgacctctcaacctccaccgccgacgacgccgtccgcgccgcgtgcgcggactggggcgcctttcacgtggtcggccacggcgtgccggtggatctcctcgacgcggtgcgcgcggcagggctcgccttcttccgcgcgcccatggaggacaaactccggttcgcctgcgacccggccaggggcgccgcctcggaagggtacggcagccgcatgctcgccaacgacgactccgtgctcgactggcgcgactactttgaccaccacacgctcccggagtcccgctgtgatcccgcccgctggcccgacttcgtccccggttacagagatactattgcaaaatacagcaacagcatgaaggatcttgctcaaaaattgttgtgcatcatctcagaaaatctgagcctaccaccatcttatatacaagaggcggttggagaagttttccagaacattactattagctactattctccgtgtccacaacctgatcttgctcttggattacaatctcattctgatatgggcgcaataacacttctgatacaagatgatgttggtgggcttgaagtattaaaggatggaatgtggatacctgtgcctgctttgcgtgatggcatccttgtgattctcgctgatcagacagagatcatcaccaatggaagatacaagagttcagttcatcgagctgttgtcaatgctgagcatgcccgcttatcagtagcaacattttatgatccatcaaaatcaaggaaaatatgcactgccccgcagcttgtgagtgagaatgaaccacaaaagtatcgggatgtaatttatggtgactatgtctcatcttggtatagcaaaggtccagagggcaagcgaaacatcgacgccctcctgattcagcactagagccatagcatctattgcagttttttttcctgctcatgtgttgaggccgagtgggcatagtagtgtgcaaggcggatggaagcagccaaccaacttgacaatgaaactcttggctctgtcacctggttgcatcaccaatggttctgcgagacttacgatattgagagcaaatgcagccagcgttgcgtagggctgtccatcaacagacggcacgaaggcc

SEQ ID NO: 79385 - DNA, 2143 bp, Zea Mays
cagaaatctctagaattcttccacgtactcctctctctaatccaatcaattcacatacgtatctcagttttcatttgcttcactacagtattcctttcaccatgtgcgatccagccaccagacaattctctctcgtcgtctcctcacatgccacgttcggctcttgggcacgcagcctccatctccccacgcttgcttgagcaggccacgccggctgctactcccctgctcagtcacgacaagccgtcgaccatgtgccgcgccctccctgctcgtcggccaccaggacggcatctccacgcgccgagttcctcccatggctatcccaaaccctagccgagatcccctcctgtgttggccactgtctccttcaccaggcgtcctcccctatccacgtgctggcagcacatggcgagctcacccccctgtgccagacgagttcatcacttcctttagagcaacaccttcatccatggtgcccagctgctccttggagtctacttaaaattcctggagaattaggtggagaagaaggttaagttcaacgctctttaggtgttcgatgatacgctcgaactggtggccgtcttcgttcttgctgaaatcgagtcgaagcatgatgtggtacgttaattgatcacgtcctatggaagacgagtggaattgatctccaagtgatgctgatggacgaagctaaaatggatgaatcaaccaagtgccaggatggaagatgctcaccaagtggtcgtcaattaacaacactaacgtagtgtttatcccaggcaagccccggtgcatttgccacctccttgttgttttaaaacttttatcacttatatgctgcattaggtgataggagctgagtgatgaaaccattgatgcattaccattccttggaatttgattattattccttgattcctgtttataaaagagaactaaagatgcttagccctgcttagataattaaaagttgtttttttaaaagatgttgtgttacacgggatatgggaaattgttgtgaaaaagaaattgggatggtgaatccatatggccatgatggattcaacatccagaaaaagtacccctgtcgggtaccaaaatgggagaatggttggaataaatctagaccagacgttgagcaggaaaggtcgcccgtctgtgtcgattaaggaccgttccgattgttggcctgctgatctaggaccctttaactggccacatgcctcgtcatgggtaagcttagcctcggttggaccaatactataaaggccggcccgcaatgggagtggagagatggcgagagtatcgtgtatccacctggcaagaggctggatggtggggtactgagctctcggttggcggggacccgttctggtcttgagaaacccgtgggcgagttgacatatgcaagggttaagtgctacatatgtcgtgtggttagagatccccagctgggtattaatcgattcggatcgccgaacttctcggatatgaagactggatctttgaccctcatcgtagataacaagtgaaactaaagttgctaaaatgaaactagtgtaggacaagtgaatactctagatcaggcaaatctagattcaggaaaagtacttaatttgtgaagtaaaagtttggtataaggatccactactagtaagcttttctgcaaaaccgagtctttgaaatttgataagctttaccttgattcccaacaaaccagcatacccttgagagtcttttctttagtcgggtaagtcttgctgagtaattgcgtactcagggttttattccctgttgtttttcaggttgtaattttgttctgttgtggatggtgctaagtgccggtgggctcggccttcttctataagtatatcccgtctttagtttctctattgaggattgtcacttaagctagcatgtatttgaaaacctataaatattctatacattttaaattgtattttttttaatcactccgataattgtataatgtaaacttattgtaatatgaaatcattttgcaataaagaattttgtttccgctgcaaatgttggtgtgtgatttgtgtttacttaatcctgcgatcttggcggtaagtcgtttatccggggtcctcggggcactcggacagatcctgtt

SEQ ID NO: 79386 - DNA, 5555 bp, Zea Mays
agcacctacactactcctgcgcatccaagacaacggccaggcgagcacgaagccgcgcgaggaaacagagcgcgcgcagggcgacgggcaccgcggcacgtcagggagccggacgcggcacacaaggagatccacggctggaaaaacgccggccagcagagaagtagaggtgagggcgcaccatggacagagaaggcagtgcgcacccacggaacgagcagaggcgagcgtgtagcgtccgatgggtgagcgactggagcagggtgcggctgaggaatgggcagaggccaagctggggcaccgcagcgccggagaggacgcgcagaaagaatccacggcgagggagctcggaggaaaccgcggcgcgtgcgcagggacgagcagggcatagagagcaggacgccgagcgctagtcaccggagcagggagctgggcgaactccatgggcgagcaggagtcgagctcgcaggggaagaggctaggggaagccgagcggtcgagctgagctacggcggacatggcgacaagcgaacagaggggaggggcgctggggaagagagcggcgttggggaagtggagaggctgggcgcgcaggaagccgaagcttgcagggaatccggcgctgggagcttcgagcagaggatccacatccgaccaggcgccggggagaagaggagcagaggctgggcgaggcaccagggagaggcgaccgcgccatgggggctcggtagggagcagggcagaggcactcgactaagagcagaagatagacaccgcgatgggatttttattcagggtggccgagcggatgggaacgaggcaacggcggtgagaaaaatcttgagcagagcggcggcggggataagggaagaagacggctggaaggatagagccgcgagatttttcttcctgggcacatgagaatagcagagggaggagctccggcgaggttggctggaacgacgacttggagcggcggccgggcgtctgcaagctctgagcgcagaactgcaggggatagaaaatatgtgcgatgcggagaggtggccggataatggagtccgtcgagaagagaatggatatggccagcgacgacgacgacaagctagtagcgccacttgattttgacggacgggagtggccgaaccgctgtttcgtccacacggcaccagataatggagtcccgcagatgacgtggtcaatataaggaggagagagagacgcgtggaagagttccatgcggtggtcaaaaaatgctaaacggtggaaggatttcagatattttctatttggtcttttcttctttctcaaagaatactggtattagaattagagtttgggtgtgatataaatagaacagatcaaaacacaatcaaaatacgatacttaagacgccattaaattagtttgcccgggataaaaatcacctagtgggtcgagcttccaaattcgtatttgcgcgagcgatgaattttaaatactcaccggacgcaccgattttcggaacaacgatattccgaacatcacgaaaatttaggaagagcccggataaataaaaacaatatcgaactcgcgataaatggaacagatgcgatattaaaatcgcgatacgcgaagatgtttaaaatttagcatatgttttatccactgatattacgtgcttaaatccatactcgttgttgagcggaatataaacacctggggtgttacagccctcccccttaaaagaatctcgtcccgagattcggagcgaaagacttttaagagtagagaagcatgtaacccatatccatatcagcgataatcataagacagtcctgaacgaaggtgagtgccttagaatgttgtttctctagtggacatatcatgtatcgccttagactaatttagaaatgtccaacaatagagacgatgtctgctagaggaacacataaggttccatatgtgcagtttgctttttctaatgacactgtactatctgagtctgttgagcaggcgacaaatacgcggttttacccaaacaggaccagatgcaacctcttgggtaaaacacacagaaagaggtttaccaacaagcggtcacggtaagttcataacacacgagatgggtgtgaatgtcgaatacatcatagttaactcgtgttagctagaaaatccaagtccaagaaaatgatagactcgaaaaatcaccagcgaagggatctgtagatgctgccttcataaccaatccattttatccatcactaggcatggctcgacttgatcacacatgctggaaaagcacacgtgaggcgatcgaggcacgactagagcgataattaggtggttatcagtcgatttaacttaatttttttaagttctttctcaggatgggttgaaccaaagtgagtttagttactcgacaaatcgatctctaaactcaaccttcgttcattgggcagttacaagttagttaaaaccaacttgttgaactacttttgacattgggcatgtcctctcagtaccattggtaagccaagggctgtgagttcgcttctgttaacaggagattatgcacttgagtagaaatccatttggtcatgttgttcatccgtttcttcatgcgagatgaaccatccacttggttagggaatacctggattaaataggagagcgaatgaacaaactcctgtatttcagtagcagggaaaatcaatctccattttgagagataatcagttgttttccaacgctaaaaagctccaaggcttcacctttacacaaaggacgtaaagggaacttgtatgcgtgcagtcactatcaaaggcaagggaaaagagaccacacatgacagggatatgcccttttgatccaacggagatgatatatgttgcttgattacttgacaaacaacatagaaattgtttcaaaggagaggtctacggaagataacacatcagtgtaattccataatggatcatgactagagacttcgatatcggcatgcgccaagcagcagaaccttgcatgtacattcacaaggggctctcagtttcgccgcggtaccataagttcccaaccatgacaccattacaaaactggcaccaataatgaatctcacatagtaagaacaagttgtgcagagataacatattaatataatctcataatggattatgactactaactgtgatactagcgtgcaccgagcagcacaaccttgtgtgtatacccacaggaggccctcggtttggcgcggcatcatcaattttagtcataacgccaatactagacataaccaataagaaatctcacacaacacaaatagactggtcaaggatgacaatgtacaaaagagactccacctgtaagaatggttacaagtagagagccaaatagatcatggcccgatgaaatgaacatgatatggccaaaacctcaacttgatgaaaggagtatgatgggagactgttgcttttagcccaagaatatttctacgcccatcatagagatcatgaggataaggattagtatctgattagatacagagggaaaacaatcacaagattaagttggtatgccttcgatagatatgaggaaaccaaaggcatcaatttcaagaaaatactcggacaggtctgttctgggttaggttgatgaagtgacaagataatccgcaaggagaggccaaatacaatagagacctcaacctgcatcaactgaacaaggaaatggttctagaaggagacatgacttgagattcctgttttaagcttgggtacattttatgttcaacaaagaaagtatctaagaatttacttgtatggactttgtcatggagtgataatggacaattcaaatttaggtctaagttcaccaagtaagaacatggcctaattttgggtttaggcaaaacaagtcactaaccttctatcgacacatcaagcacaagggcaaacacatttgcactaatggtcaaattatgaaagctaaaagcaatctaaacctgtatccctaagacaccacatcatttacaatcaccaagttttggaataaaggtgagagaagcattttgggtgtataggtaacaaacataatgcaacaatcaggatgcatgctcgtcttattcgtcctcacgagtttttgccaacacaacatggcaataacgttctatatcggtggcatatttacgactctcacggtattttgctagtcgtcagctacacatacgttttcgaggttagtgtacctgcagaaaaatccatcacagcccaattcccaatgatgcaattcacacatgacagtttatcacagtttatactccatatattgctatatggaggccagctcatcattaagcgccgagccacgcataggcgtcgttgccacactttaaccatagggcaactcattatggtaactcaccttcttacctgagcgtaggtgcgtcgttacaaatacaatacactctcagtattcccatgtctgtatacccgtacacatccatgggatactgaattctcggaaaagtaactactccacatcgcagccttcatatatacatatatggaacatgtatataatcaagcgctttttacactcttccctagaccgacggttgttcggtcatgctctcacatcttaccttaccttaagcgtcgatccattcaaaactgaatggcctcaaaaataacaatacacatgtatgcaatacccccggttgtgggttactggttttgaactaagccacctgatagtccttaatatagggcttaacagaggatgtcgctagtattatagtttttcaaaactgtttttcaaagccaaacaatgtgtttagttgaaaataggttttctaaaaccaaaacttttgttttgaaaatacgtatgtgaccgtatatacttaatcctgctctgataccagctgtggcagaacctcccaagttattgggcccacatgcacccgtccttgtctcaaagacctcagactgctatgcatgtgcaccagataacttaacaggatccgtccgattgccccaaggacaccggataaaccacttacaaccagaatcgcgggattaagtaacacaaatcacacacaccaatatttttgcagcggaaatcttgttaccaaattttacaagttacaaaaattttacattattttatcggagtgattgcaaaagtataagtttgaaatatatgctagctcaagggaccatcctcattaagaagtatagaagggttacttaaacttataagaaggccgagcccaccggcacttaacaccaccatcagcagcacaaaactatgacctgaaaaacaacagggaataaaaccctgagtacgcaattactcagcaagacttacccgactaaagaaaagactctcaagggtatgctggctagagggagtcaaggtaaggctaagcaataatcaaggactcattttgcagaagagcttactagtagtgaatccttatgccaaaattttacttcgcaagttaagtacttttcctgtatctagatttgcctaatctatagcattcacttgtcctgatctagctttcttttaac

SEQ ID NO: 79387 - DNA, 500 bp, Zea Mays
cgcccctgccggcgctctggcggacgaggccaccgccggagggcttcactacgtacgaggatgaggccaacaagttcaacattcaagttccgcaaggctggctggtcggcgccggcgaggccagcggcatcaagtccgtcacggcgttctaccccgagcaggccgccaccgactccaacgtcagcgtcgccatcatcgagatcgggccggacttcaccagcctcaagtccttcggcgacgtcgctgccttcgccgagggcctggtacgcctgtactacttggaatacacgtcgcagaaccccggcgagcggcggcggcacatcgtctcggccatcgggatggccttcaacggctggtacaaccgcctctacattgcgacaggccagggacgtacccctgggaaacaatttgtcaagaaatttcagggaagcacgtacttgtttgttaagatggaccaatgcaaggctacggtctacggatcggacctgacaaactactga

SEQ ID NO: 79388 - DNA, 2579 bp, Zea Mays
ccacatggccgacgtgattgatatggatgttttcacgaaacctgaccagtagccgtcctcgtcttccacgttgtgtttctcgcccacctatctatatttatcataaaaaacagccaaatcgagcgaggcgacgagggcgagtagtagttggcgagttggagcagagatcgccatggacgcatcggcggaggtggaccacctcgccgccgagaggtcggccgcgcgcttcgatgtcgaggcgatgaaggttgcatgggctggctcgcgacacgccgtcgaagtcggcgaccgcatggcccgactcgtcgcgtccgaccctgtcttccgcaaggataacaggaccatgctctccaggaaggacttgtttaaggacactctaagaaaggcagcccatgcatggaagcgtattgtggaactacgtctcacagaggaggaagcaggtatgctgaggctatacgtcgatcagcctggttatgttgatctgcattggggcatgtttgttcctgctataaaaggtcaaggtactgaggagcagcagaaaaagtggttaccaatggcttacaagttccaaataattgggtgctatgctcagactgaactcggtcatggctcaaacgttcagggccttgaaacaactgccacatttgatccaaagactgatgagtttgtcatccacagtccaactctgacctccagcaaatggtggcctggtggcttggggaaagcttccactcatgcagtggtgtatgctcggctgataactgaaggaaaggactatggtatacatggtttcattgtgcaactgcgaagcttagaggatcactcccctcttcctggtattactctgggtgatattggtggaaaatttggcagtggtgcatataacagtatggacaatggtgttctgcgatttgaccatgtgcgcataccaagggatcaaatgttgatgaggctttcacaagttacaagggaggggaaatatgttcattcagatgtcccaaagcagctgctttatgggacaatggtttttgttcgccagacaatagtcgcagatgcttctaaggctttgtcccgtgctgtttgcattgctgtacgatacagcgccatccgaaagcagtttggctctcaagatggtggccctgagactaaggtccttgattacaagactcaacaaagcagactctttccgttgctggcttcagcatatgcatttagatttgtgggtgactggctgaagtggctatacatggatgtcactcagaaactggaagctaaagactactcaacactgcaagaagcccatgcctgtactgctggtttgaaggctgtgacaacatctgcaacagctgatgccattgaagaatgtagaaagctctgtggcggacatggttacctgaacagcagtgggcttcctgaattgtttgctgtctatgttcctgcttgcacttatgaaggagacaatattgttctgcttttgcaggttgcaaggattctaatgaagaccttatctcaattgacatctggaaaacaacctgttggtacaatggcttacatgggcaatgtacaatatctgatgcaatgcaaatgtgctgttaacacagctgaagattggcttaaccctgttgccatacaagaggcgtttgaagccagggctctcaggatggcagtaaactgtgcccagaacataggccaagcagcaaaccaagaagaaggtttctatgagcggtcccctgatttgctagaggctgcagtagctcacatccagttggtcattgtaaccaagttcatttcgaaggtgcagcaggacattcctggacctggagtgaaggaacagctccagaacctttgcaatgtctatgccctctacattctccacaagcacctgggcgacttcctggcaaccgggtgcatcacacccaagcagggagcgctggcaaacgagcagctgggcaagctttacgcacaggtgcgtccaaatgctgttgcgctggttgatgccttcaactacacagaccactacctggggtctgtgctggggcggtacgatgggaatgtgtacccagcgctgtacgaggaggcgtggaaggaccctctgaacgagacggtggtgcccgaggggtaccacgagtacctccgccccttgctcaagcagcagctcaagctctccaggctctagtctgatcggctaccccccctggaattctccatggcggctgccttctcagaaaatctcacgcgacctccgaatgaaagtgatgtaagctactaacgattcttgttagagccaggaaagaggctctccagccaattataaatttattcctcaagctctgaggatcaagttcaagctgtggattatataggaagcacgtttaataattaataaagagggagaggatgagcatctctctgttgctgctcaagtgttgtgcgcagtgcgagtagtagaatgaatatgtatgtacgagtgcgtgtattgtatggtgaattgaagttccatttgtttgctaaaagtatatcagaaaacaatggcttgatttgcctaagtccaaaatgaaagccagattccgaacacatca

SEQ ID NO: 79389 - DNA, 2586 bp, Zea Mays
ccacatggccgacgtgattgatatggatgttttcacgaaacctgaccagtagccgtcctcgtcttccacgttgtgtttctcgcccacctatctatatttatcataaaaaacagccaaatcgagcgaggcgacgagggcgagtagtagttggcgagttggagcagtcgacagagatcgccatggacgcatcggcggaggtggaccacctcgccgccgagaggtcggccgcgcgcttcgatgtcgaggcgatgaaggttgcatgggctggctcgcgacacgccgtcgaagtcggcgaccgcatggcccgactcgtcgcgtccgaccctgtcttccgcaaggataacaggaccatgctctccaggaaggacttgtttaaggacactctaagaaaggcagcccatgcatggaagcgtattgtggaactacgtctcacagaggaggaagcaggtatgctgaggctatacgtcgatcagcctggttatgttgatctgcattggggcatgtttgttcctgctataaaaggtcaaggtactgaggagcagcagaaaaagtggttaccaatggcttacaagttccaaataattgggtgctatgctcagactgaactcggtcatggctcaaacgttcagggccttgaaacaactgccacatttgatccaaagactgatgagtttgtcatccacagtccaactctgacctccagcaaatggtggcctggtggcttggggaaagcttccactcatgcagtggtgtatgctcggctgataactgaaggaaaggactatggtatacatggtttcattgtgcaactgcgaagcttagaggatcactcccctcttcctggtattactctgggtgatattggtggaaaatttggcagtggtgcatataacagtatggacaatggtgttctgcgatttgaccatgtgcgcataccaagggatcaaatgttgatgaggctttcacaagttacaagggaggggaaatatgttcattcagatgtcccaaagcagctgctttatgggacaatggtttttgttcgccagacaatagtcgcagatgcttctaaggctttgtcccgtgctgtttgcattgctgtacgatacagcgccatccgaaagcagtttggctctcaagatggtggccctgagactaaggtccttgattacaagactcaacaaagcagactctttccgttgctggcttcagcatatgcatttagatttgtgggtgactggctgaagtggctatacatggatgtcactcagaaactggaagctaaagactactcaacactgcaagaagcccatgcctgtactgctggtttgaaggctgtgacaacatctgcaacagctgatgccattgaagaatgtagaaagctctgtggcggacatggttacctgaacagcagtgggcttcctgaattgtttgctgtctatgttcctgcttgcacttatgaaggagacaatattgttctgcttttgcaggttgcaaggattctaatgaagaccttatctcaattgacatctggaaaacaacctgttggtacaatggcttacatgggcaatgtacaatatctgatgcaatgcaaatgtgctgttaacacagctgaagattggcttaaccctgttgccatacaagaggcgtttgaagccagggctctcaggatggcagtaaactgtgcccagaacataggccaagcagcaaaccaagaagaaggtttctatgagcggtcccctgatttgctagaggctgcagtagctcacatccagttggtcattgtaaccaagttcatttcgaaggtgcagcaggacattcctggacctggagtgaaggaacagctccagaacctttgcaatgtctatgccctctacattctccacaagcacctgggcgacttcctggcaaccgggtgcatcacacccaagcagggagcgctggcaaacgagcagctgggcaagctttacgcacaggtgcgtccaaatgctgttgcgctggttgatgccttcaactacacagaccactacctggggtctgtgctggggcggtacgatgggaatgtgtacccagcgctgtacgaggaggcgtggaaggaccctctgaacgagacggtggtgcccgaggggtaccacgagtacctccgccccttgctcaagcagcagctcaagctctccaggctctagtctgatcggctaccccccctggaattctccatggcggctgccttctcagaaaatctcacgcgacctccgaatgaaagtgatgtaagctactaacgattcttgttagagccaggaaagaggctctccagccaattataaatttattcctcaagctctgaggatcaagttcaagctgtggattatataggaagcacgtttaataattaataaagagggagaggatgagcatctctctgttgctgctcaagtgttgtgcgcagtgcgagtagtagaatgaatatgtatgtacgagtgcgtgtattgtatggtgaattgaagttccatttgtttgctaaaagtatatcagaaaacaatggcttgatttgcctaagtccaaaatgaaagccagattccgaacacatca

SEQ ID NO: 79390 - DNA, 2482 bp, Zea Mays
ctcccctccccttcgcatggattgcttgcgggctcttcgcttgcccttccccaacttttcagcttcattcactagctgacatccacacaatccgtgctttgccttttccgctcccccccggatcaatcccaatctcgtttccttcttcctgataaaacagcaacacctttccgcatctgatctcctgtagcctctctatgcaaggcagaaaaaaactaacaagtcttccgcaaggataacaggaccatgctctccaggaaggacttgtttaaggacactctaagaaaggcagcccatgcatggaagcgtattgtggaactacgtctcacagaggaggaagcaggtatgctgaggctatacgtcgatcagcctggttatgttgatctgcattggggcatgtttgttcctgctataaaaggtcaaggtactgaggagcagcagaaaaagtggttaccaatggcttacaagttccaaataattgggtgctatgctcagactgaactcggtcatggctcaaacgttcagggccttgaaacaactgccacatttgatccaaagactgatgagtttgtcatccacagtccaactctgacctccagcaaatggtggcctggtggcttggggaaagcttccactcatgcagtggtgtatgctcggctgataactgaaggaaaggactatggtatacatggtttcattgtgcaactgcgaagcttagaggatcactcccctcttcctggtattactctgggtgatattggtggaaaatttggcagtggtgcatataacagtatggacaatggtgttctgcgatttgaccatgtgcgcataccaagggatcaaatgttgatgaggctttcacaagttacaagggaggggaaatatgttcattcagatgtcccaaagcagctgctttatgggacaatggtttttgttcgccagacaatagtcgcagatgcttctaaggctttgtcccgtgctgtttgcattgctgtacgatacagcgccatccgaaagcagtttggctctcaagatggtggccctgagactaaggtccttgattacaagactcaacaaagcagactctttccgttgctggcttcagcatatgcatttagatttgtgggtgactggctgaagtggctatacatggatgtcactcagaaactggaagctaaagactactcaacactgcaagaagcccatgcctgtactgctggtttgaaggctgtgacaacatctgcaacagctgatgccattgaagaatgtagaaagctctgtggcggacatggttacctgaacagcagtgggcttcctgaattgtttgctgtctatgttcctgcttgcacttatgaaggagacaatattgttctgcttttgcaggttgcaaggattctaatgaagaccttatctcaattgacatctggaaaacaacctgttggtacaatggcttacatgggcaatgtacaatatctgatgcaatgcaaatgtgctgttaacacagctgaagattggcttaaccctgttgccatacaagaggcgtttgaagccagggctctcaggatggcagtaaactgtgcccagaacataggccaagcagcaaaccaagaagaaggtttctatgagcggtcccctgatttgctagaggctgcagtagctcacatccagttggtcattgtaaccaagttcatttcgaaggtgcagcaggacattcctggacctggagtgaaggaacagctccagaacctttgcaatgtctatgccctctacattctccacaagcacctgggcgacttcctggcaaccgggtgcatcacacccaagcagggagcgctggcaaacgagcagctgggcaagctttacgcacaggtgcgtccaaatgctgttgcgctggttgatgccttcaactacacagaccactacctggggtctgtgctggggcggtacgatgggaatgtgtacccagcgctgtacgaggaggcgtggaaggaccctctgaacgagacggtggtgcccgaggggtaccacgagtacctccgccccttgctcaagcagcagctcaagctctccaggctctagtctgatcggctaccccccctggaattctccatggcggctgccttctcagaaaatctcacgcgacctccgaatgaaagtgatgtaagctactaacgattcttgttagagccaggaaagaggctctccagccaattataaatttattcctcaagctctgaggatcaagttcaagctgtggattatataggaagcacgtttaataattaataaagagggagaggatgagcatctctctgttgctgctcaagtgttgtgcgcagtgcgagtagtagaatgaatatgtatgtacgagtgcgtgtattgtatggtgaattgaagttccatttgtttgctaaaagtatatcagaaaacaatggcttgatttgcctaagtccaaaatgaaagccagattccgaacacatca

SEQ ID NO: 79391 - DNA, 2292 bp, Zea Mays
tgagccaaatcagcacccaagctttgattatcaagccaagataatgcatcaggaccatgctctccaggaaggacttgtttaaggacactctaagaaaggcagcccatgcatggaagcgtattgtggaactacgtctcacagaggaggaagcaggtatgctgaggctatacgtcgatcagcctggttatgttgatctgcattggggcatgtttgttcctgctataaaaggtcaaggtactgaggagcagcagaaaaagtggttaccaatggcttacaagttccaaataattgggtgctatgctcagactgaactcggtcatggctcaaacgttcagggccttgaaacaactgccacatttgatccaaagactgatgagtttgtcatccacagtccaactctgacctccagcaaatggtggcctggtggcttggggaaagcttccactcatgcagtggtgtatgctcggctgataactgaaggaaaggactatggtatacatggtttcattgtgcaactgcgaagcttagaggatcactcccctcttcctggtattactctgggtgatattggtggaaaatttggcagtggtgcatataacagtatggacaatggtgttctgcgatttgaccatgtgcgcataccaagggatcaaatgttgatgaggctttcacaagttacaagggaggggaaatatgttcattcagatgtcccaaagcagctgctttatgggacaatggtttttgttcgccagacaatagtcgcagatgcttctaaggctttgtcccgtgctgtttgcattgctgtacgatacagcgccatccgaaagcagtttggctctcaagatggtggccctgagactaaggtccttgattacaagactcaacaaagcagactctttccgttgctggcttcagcatatgcatttagatttgtgggtgactggctgaagtggctatacatggatgtcactcagaaactggaagctaaagactactcaacactgcaagaagcccatgcctgtactgctggtttgaaggctgtgacaacatctgcaacagctgatgccattgaagaatgtagaaagctctgtggcggacatggttacctgaacagcagtgggcttcctgaattgtttgctgtctatgttcctgcttgcacttatgaaggagacaatattgttctgcttttgcaggttgcaaggattctaatgaagaccttatctcaattgacatctggaaaacaacctgttggtacaatggcttacatgggcaatgtacaatatctgatgcaatgcaaatgtgctgttaacacagctgaagattggcttaaccctgttgccatacaagaggcgtttgaagccagggctctcaggatggcagtaaactgtgcccagaacataggccaagcagcaaaccaagaagaaggtttctatgagcggtcccctgatttgctagaggctgcagtagctcacatccagttggtcattgtaaccaagttcatttcgaaggtgcagcaggacattcctggacctggagtgaaggaacagctccagaacctttgcaatgtctatgccctctacattctccacaagcacctgggcgacttcctggcaaccgggtgcatcacacccaagcagggagcgctggcaaacgagcagctgggcaagctttacgcacaggtgcgtccaaatgctgttgcgctggttgatgccttcaactacacagaccactacctggggtctgtgctggggcggtacgatgggaatgtgtacccagcgctgtacgaggaggcgtggaaggaccctctgaacgagacggtggtgcccgaggggtaccacgagtacctccgccccttgctcaagcagcagctcaagctctccaggctctagtctgatcggctaccccccctggaattctccatggcggctgccttctcagaaaatctcacgcgacctccgaatgaaagtgatgtaagctactaacgattcttgttagagccaggaaagaggctctccagccaattataaatttattcctcaagctctgaggatcaagttcaagctgtggattatataggaagcacgtttaataattaataaagagggagaggatgagcatctctctgttgctgctcaagtgttgtgcgcagtgcgagtagtagaatgaatatgtatgtacgagtgcgtgtattgtatggtgaattgaagttccatttgtttgctaaaagtatatcagaaaacaatggcttgatttgcctaagtccaaaatgaaagccagattccgaacacatca

SEQ ID NO: 79392 - DNA, 2438 bp, Zea Mays
gtgctctaatcaaaaatcaaacaaaccagaagctcctcctcgcctcccatcacttcctacgccacccgcgaagcgcgcccgaggcggcaccccaccgtcgtagtagaagacacgggacgcacccccgcagcctcgctcgctcgctcccctcacttcctccccgcgcgatccacggcccccgccccccgcgctcctgtctgctctccctctccgcaatggcgacgccctcggccgtgggcgccgcgtgcctcctcctcgcgcgggccgcctggccggccgccgtcggcgaccgggcgcgcccgcggcggctccagcgcgtgctgcgccgccggtgcgtcgcggagctgagcagggagggccccgcgccgcgcccgctgccacccgcgctgctggcgcccccgctcgtgcccggcttcctcgcgccgccggccgagcccacgggtgagccggcatcgacgccgccgcccgtgcccgacgccggcctgggggtcctcggtctcgaacctgaagggattgctgaaggttccatcgataacacagtagttgtggcaagtgagcaagattctgagattgtggttggaaaggagcaagctcgagctaaagtaacacaaaacattgtctttgtaactggcgaagcttctccttatgcaaagtctgggggtctaggagatgtttgtggttcattgccagttgctcttgctgctcgtggtcaccgtgtgatggttgtaatgcccagatatttaaatggtacctccgataagaattatgcaaatgcattttacacagaaaaacacattcggattccatgctttggcggtgaacatgaagttaccttcttccatgagtatagagattcagttgactgggtgtttgttgatcatccctcatatcacagacctggaaatttatatggagataagtttggtgcttttggtgataatcagttcagatacacactcctttgctatgctgcatgtgaggctcctttggtccttgaattgggaggatatatttatggacagaattgcatgtttgttgtcaatgattggcatgccagtctagtgccagtccttcttgctgcaaaatatagaccatatggtgtttataaagactcccgcagcattcttgtaatacataatttagcacatcagggtgtagagcctgcaagcacatatcctgaccttgggttgccacctgaatggtatggagctctggagtgggtattccctgaatgggcgaggaggcatgcccttgacaagggtgaggcagttaattttttgaaaggtgcagttgtgacagcagatcgaatcgtgactgtcagtaagggttattcatgggaggtcacaactgctgaaggtggacagggcctcaatgagctcttaagctccagaaagagtgtattaaacggaattgtaaatggaattgacattaatgattggaaccctgccacagacaaatgtatcccctgtcattattctgttgatgacctctctggaaaggccaaatgtaaaggtgcattgcagaaggagctgggtttacctataaggcctgatgttcctctgattggctttattggaagattggattatcagaaaggcattgatctcattcaacttatcataccagatctcatgcgggaagatgttcaatttgtcatgcttggatctggtgacccagagcttgaagattggatgagatctacagagtcgatcttcaaggataaatttcgtggatgggttggatttagtgttccagtttcccaccgaataactgccggattcgaaccttgtggtctcaatcagctatatgctatgcagtatggcacagttcctgttgtccatgcaactgggggccttagagataccgtggagaacttcaaccctttcggtgagaatggagagcagggtacagggtgggcattcgcacccctaaccacagaaaacatgttgtggacattgcgaactgcaatatctacatacagggaacacaagtcctcctgggaagggctaatgaagcgaggcatgtcaaaagacttcacgtgggaccatgccgctgaacaatacgaacaaatcttccagtgggccttcatcgatcgaccctatgtcatgtaaaaaaggaccaaagtggtggttccttgaagatcatcagttcatcatcctatagtaagctgaatgatgaaagaaaacccctgtacattacatggaaggcagaccggctattggctccattgctccaatgtctgctttggctgccttgcctcgatggaccggatgcagtgaggaatccagccgaacgacagttttgaaggataggaaggggagctggaagcagtcacgcaggcagcctcgccgtgattcatatggaacaagctggagagtgcatcacctggacctttggtccaaccgaacaattaatcatcaacaaacaattaatccgca

SEQ ID NO: 79393 - DNA, 2649 bp, Zea Mays
gtgctctaatcaaaaatcaaacaaaccagaagctcctcctcgcctcccatcacttcctacgccacccgcgaagcgcgcccgaggcggcaccccaccgtcgtagtagaagacacgggacgcacccccgcagcctcgctcgctcgctcccctcacttcctccccgcgcgatccacggcccccgccccccgcgctcctgtctgctctccctctccgcaatggcgacgccctcggccgtgggcgccgcgtgcctcctcctcgcgcgggccgcctggccggccgccgtcggcgaccgggcgcgcccgcggcggctccagcgcgtgctgcgccgccggtgcgtcgcggagctgagcagggagggccccgcgccgcgcccgctgccacccgcgctgctggcgcccccgctcgtgcccggcttcctcgcgccgccggccgagcccacgggtgagccggcatcgacgccgccgcccgtgcccgacgccggcctgggggtcctcggtctcgaacctgaagggattgctgaaggttccatcgataacacagtagttgtggcaagtgagcaagattctgagattgtggttggaaaggagcaagctcgagctaaagtaacacaaaacattgtctttgtaactggcgaagcttctccttatgcaaagtctgggggtctaggagatgtttgtggttcattgccagttgctcttgctgctcgtggtcaccgtgtgatggttgtaatgcccagatatttaaatggtacctccgataagaattatgcaaatgcattttacacagaaaaacacattcggattccatgctttggcggtgaacatgaagttaccttcttccatgagtatagagattcagttgactgggtgtttgttgatcatccctcatatcacagacctggaaatttatatggagataagtttggtgcttttggtgataatcagatacacactcctttgctatgctgcatgtgaggctcctttggtccttgaattgggaggatatatttatggacagaattgcatgtttgttgtcaatgattggcatgccagtctagtgccagtccttcttgctgcaaaatatagaccatatggtgtttataaagactcccgcagcattcttgtaatacataatttagcacatcagggtgtagagcctgcaagcacatatcctgaccttgggttgccacctgaatggtatggagctctggagtgggtattccctgaatgggcgaggaggcatgcccttgacaagggtgaggcagttaattttttgaaaggtgcagttgtgacagcagatcgaatcgtgactgtcagtaagggttattcatgggaggtcacaactgctgaaggtggacagggcctcaatgagctcttaagctccagaaagagtgtattaaacggaattgtaaatggaattgacattaatgattggaaccctgccacagacaaatgtatcccctgtcattattctgttgatgacctctctggaaaggccaaatgtaaaggtgcattgcagaaggagctgggtttacctataaggcctgatgttcctctgattggctttattggaagattggattatcagaaaggcattgatctcattcaacttatcataccagatctcatgcgggaagatgttcaatttgtcatgcttggatctggtgacccagagcttgaagattggatgagatctacagagtcgatcttcaaggataaatttcgtggatgggttggatttagtgttccagtttcccaccgaataactgccggctgcgatatattgttaatgccatccagattcgaaccttgtggtctcaatcagctatatgctatgcagtatggcacagttcctgttgtccatgcaactgggggccttagagataccgtggagaacttcaaccctttcggtgagaatggagagcagggtacagggtgggcattcgcacccctaaccacagaaaacatgttgtggacattgcgaactgcaatatctacatacagggaacacaagtcctcctgggaagggctaatgaagcgaggcatgtcaaaagacttcacgtgggaccatgccgctgaacaatacgaacaaatcttccagtgggccttcatcgatcgaccctatgtcatgtaaaaaaggaccaaagtggtggttccttgaagatcatcagttcatcatcctatagtaagctgaatgatgaaagaaaacccctgtacattacatggaaggcagaccggctattggctccattgctccaatgtctgctttggctgccttgcctcgatggaccggatgcagtgaggaatccagccgaacgacagttttgaaggataggaaggggagctggaagcagtcacgcaggcagcctcgccgtgattcatatggaacaagctggagtcagtttctgctgtgccactcactgtttaccttaagattattacctgtgttgttgtcctttgctcgttagggctgataacataatgactcattagaaaatcatgcctcgtttttattaactgaagtggacacttcgcattcttgcccgtttaccagagatggccactgctgatggtgcattttgacaggagtgcatcacctggacctttggtccaaccgaacaattaatcatcaacaaacaattaatccgca

SEQ ID NO: 79394 - DNA, 2604 bp, Zea Mays
gtgctctaatcaaaaatcaaacaaaccagaagctcctcctcgcctcccatcacttcctacgccacccgcgaagcgcgcccgaggcggcaccccaccgtcgtagtagaagacacgggacgcacccccgcagcctcgctcgctcgctcccctcacttcctccccgcgcgatccacggcccccgccccccgcgctcctgtctgctctccctctccgcaatggcgacgccctcggccgtgggcgccgcgtgcctcctcctcgcgcgggccgcctggccggccgccgtcggcgaccgggcgcgcccgcggcggctccagcgcgtgctgcgccgccggtgcgtcgcggagctgagcagggagggccccgcgccgcgcccgctgccacccgcgctgctggcgcccccgctcgtgcccggcttcctcgcgccgccggccgagcccacgggtgagccggcatcgacgccgccgcccgtgcccgacgccggcctgggggtcctcggtctcgaacctgaagggattgctgaaggttccatcgataacacagtagttgtggcaagtgagcaagattctgagattgtggttggaaaggagcaagctcgagctaaagtaacacaaaacattgtctttgtaactggcgaagcttctccttatgcaaagtctgggggtctaggagatgtttgtggttcattgccagttgctcttgctgctcgtggtcaccgtgtgatggttgtaatgcccagatatttaaatggtacctccgataagaattatgcaaatgcattttacacagaaaaacacattcggattccatgctttggcggtgaacatgaagttaccttcttccatgagtatagagattcagttgactgggtgtttgttgatcatccctcatatcacagacctggaaatttatatggagataagtttggtgcttttggtgataatcagttcagatacacactcctttgctatgctgcatgtgaggctcctttggtccttgaattgggaggatatatttatggacagaattgcatgtttgttgtcaatgattggcatgccagtctagtgccagtccttcttgctgcaaaatatagaccatatggtgtttataaagactcccgcagcattcttgtaatacataatttagcacatcagggtgtagagcctgcaagcacatatcctgaccttgggttgccacctgaatggtatggagctctggagtgggtattccctgaatgggcgaggaggcatgcccttgacaagggtgaggcagttaattttttgaaaggtgcagttgtgacagcagatcgaatcgtgactgtcaggttattcatgggaggtcacaactgctgaaggtggacagggcctcaatgagctcttaagctccagaaagagtgtattaaacgacaaatgtatcccctgtcattattctgttgatgacctctctggaaaggccaaatgtaaaggtgcattgcagaaggagctgggtttacctataaggcctgatgttcctctgattggctttattggaagattggattatcagaaaggcattgatctcattcaacttatcataccagatctcatgcgggaagatgttcaatttgtcatgcttggatctggtgacccagagcttgaagattggatgagatctacagagtcgatcttcaaggataaatttcgtggatgggttggatttagtgttccagtttcccaccgaataactgccggctgcgatatattgttaatgccatccagattcgaaccttgtggtctcaatcagctatatgctatgcagtatggcacagttcctgttgtccatgcaactgggggccttagagataccgtggagaacttcaaccctttcggtgagaatggagagcagggtacagggtgggcattcgcacccctaaccacagaaaacatgttgtggacattgcgaactgcaatatctacatacagggaacacaagtcctcctgggaagggctaatgaagcgaggcatgtcaaaagacttcacgtgggaccatgccgctgaacaatacgaacaaatcttccagtgggccttcatcgatcgaccctatgtcatgtaaaaaaggaccaaagtggtggttccttgaagatcatcagttcatcatcctatagtaagctgaatgatgaaagaaaacccctgtacattacatggaaggcagaccggctattggctccattgctccaatgtctgctttggctgccttgcctcgatggaccggatgcagtgaggaatccagccgaacgacagttttgaaggataggaaggggagctggaagcagtcacgcaggcagcctcgccgtgattcatatggaacaagctggagtcagtttctgctgtgccactcactgtttaccttaagattattacctgtgttgttgtcctttgctcgttagggctgataacataatgactcattagaaaatcatgcctcgtttttattaactgaagtggacacttcgcattcttgcccgtttaccagagatggccactgctgatggtgcattttgacaggagtgcatcacctggacctttggtccaaccgaacaattaatcatcaacaaacaattaatccgca

SEQ ID NO: 79395 - DNA, 2250 bp, Zea Mays
cggaagtaggggaaaattgagagtgcgtctcttacttgccttggtggtgtgattgtaaccccccgttgcaagtagttgtactccacggcaggggcaagttatcgggggattgctgaaggttccatcgataacacagtagttgtggcaagtgagcaagattctgagattgtggttggaaaggagcaagctcgagctaaagtaacacaaaacattgtctttgtaactggcgaagcttctccttatgcaaagtctgggggtctaggagatgtttgtggttcattgccagttgctcttgctgctcgtggtcaccgtgtgatggttgtaatgcccagatatttaaatggtacctccgataagaattatgcaaatgcattttacacagaaaaacacattcggattccatgctttggcggtgaacatgaagttaccttcttccatgagtatagagattcagttgactgggtgtttgttgatcatccctcatatcacagacctggaaatttatatggagataagtttggtgcttttggtgataatcagttcagatacacactcctttgctatgctgcatgtgaggctcctttggtccttgaattgggaggatatatttatggacagaattgcatgtttgttgtcaatgattggcatgccagtctagtgccagtccttcttgctgcaaaatatagaccatatggtgtttataaagactcccgcagcattcttgtaatacataatttagcacatcagggtgtagagcctgcaagcacatatcctgaccttgggttgccacctgaatggtatggagctctggagtgggtattccctgaatgggcgaggaggcatgcccttgacaagggtgaggcagttaattttttgaaaggtgcagttgtgacagcagatcgaatcgtgactgtcagtaagggttattcatgggaggtcacaactgctgaaggtggacagggcctcaatgagctcttaagctccagaaagagtgtattaaacggaattgtaaatggaattgacattaatgattggaaccctgccacagacaaatgtatcccctgtcattattctgttgatgacctctctggaaaggccaaatgtaaaggtgcattgcagaaggagctgggtttacctataaggcctgatgttcctctgattggctttattggaagattggattatcagaaaggcattgatctcattcaacttatcataccagatctcatgcgggaagatgttcaatttgtcatgcttggatctggtgacccagagcttgaagattggatgagatctacagagtcgatcttcaaggataaatttcgtggatgggttggatttagtgttccagtttcccaccgaataactgccggctgcgatatattgttaatgccatccagattcgaaccttgtggtctcaatcagctatatgctatgcagtatggcacagttcctgttgtccatgcaactgggggccttagagataccgtggagaacttcaaccctttcggtgagaatggagagcagggtacagggtgggcattcgcacccctaaccacagaaaacatgttgtggacattgcgaactgcaatatctacatacagggaacacaagtcctcctgggaagggctaatgaagcgaggcatgtcaaaagacttcacgtgggaccatgccgctgaacaatacgaacaaatcttccagtgggccttcatcgatcgaccctatgtcatgtaaaaaaggaccaaagtggtggttccttgaagatcatcagttcatcatcctatagtaagctgaatgatgaaagaaaacccctgtacattacatggaaggcagaccggctattggctccattgctccaatgtctgctttggctgccttgcctcgatggaccggatgcagtgaggaatccagccgaacgacagttttgaaggataggaaggggagctggaagcagtcacgcaggcagcctcgccgtgattcatatggaacaagctggagtcagtttctgctgtgccactcactgtttaccttaagattattacctgtgttgttgtcctttgctcgttagggctgataacataatgactcattagaaaatcatgcctcgtttttattaactgaagtggacacttcgcattcttgcccgtttaccagagatggccactgctgatggtgcattttgacaggagtgcatcacctggacctttggtccaaccgaacaattaatcatcaacaaacaattaatccgca

SEQ ID NO: 79396 - DNA, 1689 bp, Zea Mays
aaacacatatctttgtttctgtatctcaaacagcactttgtagttcagatatgttatttgagttctcctttaacttgaatttatcactccaagagtgttccttgccttcttgctgcaaaatatagaccatatggtgtttataaagactcccgcagcattcttgtaatacataatttagcacatcagggtgtagagcctgcaagcacatatcctgaccttgggttgccacctgaatggtatggagctctggagtgggtattccctgaatgggcgaggaggcatgcccttgacaagggtgaggcagttaattttttgaaaggtgcagttgtgacagcagatcgaatcgtgactgtcagtaagggttattcatgggaggtcacaactgctgaaggtggacagggcctcaatgagctcttaagctccagaaagagtgtattaaacggaattgtaaatggaattgacattaatgattggaaccctgccacagacaaatgtatcccctgtcattattctgttgatgacctctctggaaaggccaaatgtaaaggtgcattgcagaaggagctgggtttacctataaggcctgatgttcctctgattggctttattggaagattggattatcagaaaggcattgatctcattcaacttatcataccagatctcatgcgggaagatgttcaatttgtcatgcttggatctggtgacccagagcttgaagattggatgagatctacagagtcgatcttcaaggataaatttcgtggatgggttggatttagtgttccagtttcccaccgaataactgccggctgcgatatattgttaatgccatccagattcgaaccttgtggtctcaatcagctatatgctatgcagtatggcacagttcctgttgtccatgcaactgggggccttagagataccgtggagaacttcaaccctttcggtgagaatggagagcagggtacagggtgggcattcgcacccctaaccacagaaaacatgttgtggacattgcgaactgcaatatctacatacagggaacacaagtcctcctgggaagggctaatgaagcgaggcatgtcaaaagacttcacgtgggaccatgccgctgaacaatacgaacaaatcttccagtgggccttcatcgatcgaccctatgtcatgtaaaaaaggaccaaagtggtggttccttgaagatcatcagttcatcatcctatagtaagctgaatgatgaaagaaaacccctgtacattacatggaaggcagaccggctattggctccattgctccaatgtctgctttggctgccttgcctcgatggaccggatgcagtgaggaatccagccgaacgacagttttgaaggataggaaggggagctggaagcagtcacgcaggcagcctcgccgtgattcatatggaacaagctggagtcagtttctgctgtgccactcactgtttaccttaagattattacctgtgttgttgtcctttgctcgttagggctgataacataatgactcattagaaaatcatgcctcgtttttattaactgaagtggacacttcgcattcttgcccgtttaccagagatggccactgctgatggtgcattttgacaggagtgcatcacctggacctttggtccaaccgaacaattaatcatcaacaaacaattaatccgca

SEQ ID NO: 79397 - DNA, 1662 bp, Zea Mays
ggtattactacagatggtatttcccatgttctgggtgttgacatggttttacttctaaccttttatctgtcatagatccttcttgctgcaaaatatagaccatatggtgtttataaagactcccgcagcattcttgtaatacataatttagcacatcagggtgtagagcctgcaagcacatatcctgaccttgggttgccacctgaatggtatggagctctggagtgggtattccctgaatgggcgaggaggcatgcccttgacaagggtgaggcagttaattttttgaaaggtgcagttgtgacagcagatcgaatcgtgactgtcagtaagggttattcatgggaggtcacaactgctgaaggtggacagggcctcaatgagctcttaagctccagaaagagtgtattaaacggaattgtaaatggaattgacattaatgattggaaccctgccacagacaaatgtatcccctgtcattattctgttgatgacctctctggaaaggccaaatgtaaaggtgcattgcagaaggagctgggtttacctataaggcctgatgttcctctgattggctttattggaagattggattatcagaaaggcattgatctcattcaacttatcataccagatctcatgcgggaagatgttcaatttgtcatgcttggatctggtgacccagagcttgaagattggatgagatctacagagtcgatcttcaaggataaatttcgtggatgggttggatttagtgttccagtttcccaccgaataactgccggctgcgatatattgttaatgccatccagattcgaaccttgtggtctcaatcagctatatgctatgcagtatggcacagttcctgttgtccatgcaactgggggccttagagataccgtggagaacttcaaccctttcggtgagaatggagagcagggtacagggtgggcattcgcacccctaaccacagaaaacatgttgtggacattgcgaactgcaatatctacatacagggaacacaagtcctcctgggaagggctaatgaagcgaggcatgtcaaaagacttcacgtgggaccatgccgctgaacaatacgaacaaatcttccagtgggccttcatcgatcgaccctatgtcatgtaaaaaaggaccaaagtggtggttccttgaagatcatcagttcatcatcctatagtaagctgaatgatgaaagaaaacccctgtacattacatggaaggcagaccggctattggctccattgctccaatgtctgctttggctgccttgcctcgatggaccggatgcagtgaggaatccagccgaacgacagttttgaaggataggaaggggagctggaagcagtcacgcaggcagcctcgccgtgattcatatggaacaagctggagtcagtttctgctgtgccactcactgtttaccttaagattattacctgtgttgttgtcctttgctcgttagggctgataacataatgactcattagaaaatcatgcctcgtttttattaactgaagtggacacttcgcattcttgcccgtttaccagagatggccactgctgatggtgcattttgacaggagtgcatcacctggacctttggtccaaccgaacaattaatcatcaacaaacaattaatccgca

SEQ ID NO: 79398 - DNA, 1095 bp, Zea Mays
catggttttacttctaaccttttatctgtcatagatccttcttgctgcaaaatatagaccatatggtgtttataaagactcccgcagcattcttgtaatacataatttagcacatcagagcttgaagattggatgagatctacagagtcgatcttcaaggataaatttcgtggatgggttggatttagtgttccagtttcccaccgaataactgccggctgcgatatattgttaatgccatccagattcgaaccttgtggtctcaatcagctatatgctatgcagtatggcacagttcctgttgtccatgcaactgggggccttagagataccgtggagaacttcaaccctttcggtgagaatggagagcagggtacagggtgggcattcgcacccctaaccacagaaaacatgttgtggacattgcgaactgcaatatctacatacagggaacacaagtcctcctgggaagggctaatgaagcgaggcatgtcaaaagacttcacgtgggaccatgccgctgaacaatacgaacaaatcttccagtgggccttcatcgatcgaccctatgtcatgtaaaaaaggaccaaagtggtggttccttgaagatcatcagttcatcatcctatagtaagctgaatgatgaaagaaaacccctgtacattacatggaaggcagaccggctattggctccattgctccaatgtctgctttggctgccttgcctcgatggaccggatgcagtgaggaatccagccgaacgacagttttgaaggataggaaggggagctggaagcagtcacgcaggcagcctcgccgtgattcatatggaacaagctggagtcagtttctgctgtgccactcactgtttaccttaagattattacctgtgttgttgtcctttgctcgttagggctgataacataatgactcattagaaaatcatgcctcgtttttattaactgaagtggacacttcgcattcttgcccgtttaccagagatggccactgctgatggtgcattttgacaggagtgcatcacctggacctttggtccaaccgaacaattaatcatcaacaaacaattaatccgca

SEQ ID NO: 79399 - DNA, 3116 bp, Zea Mays
aaacacgcatccgactccgtctccagcaaccccattcggctcctccctccgtctccagcagttctccatccaaacaaaccgcgtgatccgtctgaccgctcgctcgctctcgccgggggtccggagctccccacctccagcgacccagtccatccgcgcgtgcagcgccgcggcgccgatggagtacgacttccgcggcggccgctcgagctcgggcccgggcccctacggcgcgcctccggggggcgcgcccgggggaggctcctcgctctacccgcgcgtcgggcagccctcccacggcgggggcggggcctccacggcgtctccgcgggccgcgccgtaccaccacggctccgggtccggatccggctccgggtcctcggctcccgtcgtaacgccgttggctccaacctccttctcctcgtcctcgtcctcgtcctcgaaagtgggcatacaagttgcgataaagcctgaattccgcattaccccacctcctcaattgccaccagagatggtagagattcctcgcagcaccttcaactttgattttgagtatgagagaatgattcttgctgaggcagagaaggagaaccccaactggactaaatttgtggtagaaagacaggctgcacctcttgtgccacagcaggctagaccagcatcgtcagggtcaggggatccagttgttgacaagtatgtctcaatggggcttgggcgtcaagccgtctcatttgcggtgttgaattatggagataatccaacaaaggtgaaagagttcgtgaaatcctacagcatcctccacgagatgggcttcacatcgccaaacgtccccgagctgctagccatccacgacaacgatcccgacaaagtcatccagcgactgctatcctcgccatcctgatcctagaagaacaagacgcctcgcatttgtgtgccgcatccatgtacagccctgcccctacgctggcaaccatcacagatgatgtatacgcgttgcctgccgttagttctgtgaaccgagtaacacgctttgtatgttgtacttgtataccgtcacccgtttggtgtttttccttaaaaaatgttttcgcgtcgttttattcacgtttgaattttttgtgagcctatacagtacaacatgattgggttagtgatgattctcgtcgagaaacggggcgtacttgctttgcttgactagttcatctttttttcttcagtttccttgcaccgccgagcgtcggcgttggctgtcacggattgtcctgtgtttggtcagaggatacaaggctatagcagcagcgtccgaaatctgaattgatcgaagtgtccaacaaagtccaaaacatctgtcggtcgttggactccactccacagttcacatcaccagtgtaactgagaattctccaacaggctggacagcaaagcatgagcaaatactagtagacgtactagtctacaagcatctccagccagtaacggcgctaccgctttgtcatggcgtcgcggcggcggctgctgccgttctctccttccccgtgcagccaagctccagccgctcaacgcgagcaaatcccaaagatagttttcatcactaccaaggaagtgacaaatttccagctcaacagcaggaactggtgccgctgccgcctataagtgtgccatgtcgccaccgctctctacctctacacaccgacacgcatgcagatcggttgccggggcacgatgaggaccgcgtggccgctgctcctcgtggcgacggcgctgctttcgacttcggcagcgagggccaggaggacctgcaggttccctgccgtcttcaacttcggcgactccaactccgacaccggcggcttctgggccgccttcccggcgcagcagggcccgttcggcatgacgtacttcggcaggccggccggccgcgcctccgacggccgcctcgtcatcgacttcatagcgcaagcgatggggctgccgctgctgagcccctacctgcagtccatagggtcggactaccggcacggcgccaacttcgcgacgctggcgtcgacggcgctgctgcccaacacgtcggtgttcgtcaccgggaccagccccttctccctcggcatccagctcaaccagatgaaggagttcaggaacagagtgctcgcctccaaaggaaacaacggccaactccctggctcggaaatcttgggcgacgctctgtacacaatcgacatcgggcagaacgacttcacctcgaaccttggatccctcggggtcgaaagcgtcaagcgaagcctaccttcagtcgtcagccagatctcctggacgatacagcatcggagctcgcagcttcatggtgttcaacatggtgcccgtaggatgctacccggcattcctcgcggggcttcctcgtgacagcaaggacctggacgagttcgggtgcgtgaaaagctacaacggcggggtcacgtactacaaccagctgctgaacgacagcctagccgaggtgaggaagacgctgcaggatgcgtcggtcgtgtacgtcgacaagcatgctgtgacgctcgaactgttccagcacccaaccgctcacgggctgaagcacggggctagagcttgctgcgggtacggcggtggaacctacaatttcgatcgagatgtttattgtggtgacagcaaggtagtgaatggagaagctgcgacggcgggggcttgtgcagacccgcaaaactatgtcagctgggacgggatacatgccactgaagctgcaaatagtaggatagcgtatgctgtgatcagcggctcctattcgtacccacctttcgatctttcaaagctatgtagcccttaggcatcatcagtcgtgaaagggagtacagcatcaccatacaccgcatttctctgaaacaagcagccacatttctttcattgacagcatcaacacacaggacaaaagctacgaactcaagaacgacgcacgcctacaacgagtcacgacgagaacagaggctaaagacctactccctctgccctagaaatgaagtcgtttgacttttttaagacaagtttgactggtttgttttattcaaaatatttatgaaaatatagaaaaaaaacatttgatagttaaa

SEQ ID NO: 79400 - DNA, 5662 bp, Zea Mays
cgacgtgagcaatgacggatgcggcgtccgcatccgcacgcgcctttagctactagctctagctctagctctccggagaggcgtctgcagaccaaccgcagccagccagcagactgttagacgacggccacgcggagccgagcgttgccgcgctttgcttgatgggataaacgccgcgcgctgggaaggttcagtgaccactccctgccgccgccgccgccgccgccgcgctggtttttattcgcttctttctgccttcttcctcctcgcggccggggcgggggcgtgctgctctctcctctccagggagttttctgcgggggttttggttgggttttcttcagcgccagccgtggatgtgtttaacgcaacagtattagtttcttcatgatcagctaagggcctggagttgaagcacgaatcatcgaagcgcagcaaaactgagacacacgtcttacttcttcacaagttcttggacgatggacatcttcgggagcccattctgctccaagcaagccgtcgcctcatgcggcggatggacggacatactcgactcctccagctgcacgaaccatatcctggaaaccggcaccgccgctctgatcaccgtcgctctcgcgctgcacctcctcgtcgtcaggattactacgaagaccagagcgtccgcacgccgcccccctgtcgcgcccggcctgccgctgcagctggccggcgcggcgttcaccgcctgcttgggcctcgtctacctcggcctcgcgtcgtggatgctggggagcaacttcactcagcacgcttccgcttacctcccacactggtgggtgacggcactgtcccagggactctgcttggtcctcgccggcttcgctctcagcggcgtcggaggagcacgtctcctcgggccaatgtctgcgcgcgcgtggtcggctctgctggccgcgtacgccgcgttcgtcgcttgttcctcggtcgttcacatggttgcggatagggcactgaccatgaagggttttctggacgctctgttcctgccaggtgcactgctgcttgtctgtggcgcttggtgcgtcaaggaagaggacggtgatggcggaactggaactgctgcttctttgtataagcccttgaagactgacgacactgttgatgatgagaggggtgggtctgagagccatgtgaccccgttcgctaaagccggggttttcagcgtgatgtcgttctggtggatgaacccgatgatgaagacgggctacgagaagccgctcgaggagaaagacatgccgctcttgggtccctcggaccgagcgtacagccagtacctggtgttcctggagaagctcaacaggaagaagcagctgcgggcacacggcaacccgtcgatgttttggaccatcgtttcttgccagaaaactgggatcttggtctcgggtctctttgcactgctcaaggttctcacgctgtcttcgggcccggtgcttctgaaagcattcatcaacgtctcgctcgggaaagggtccttcaagtacgaaggctacgtgttggccgtagcgatgttcctctgcaaatgctgcgaatctctgtcgcagaggcagtggtacttccgcacgcggaggctagggctccaggtgcggtcgttcctgtcggccgccgtctacaagaagcatcagaggctgtccaactcggcgaagctgaagcactcttccggcgagatcatgaactacgtcaccgtcgacgcctaccggatcggcgagttcccgtactggttccaccagacgtggacgacgagcgtccagctctgcatcgctctagcgatcctgtacgacgcggtcggcctcgccacggtcgcggcgctggccgtcatcatcgccaccgtggtctgcaacgcgccgctggccaagctgcagcacaagttccagagcaggcttatggaggcgcaggacgtgaggttgaaggcgatgtcggagtccttggttcacatgaaggtcctgaagctttacgcgtgggagacccacttcaagaaggtcatcgaggggctgagggaggtcgagatcaaatggctgtcggcgttccagcttaggaaagcgtacaacagcttcctgttctggacgtcgcctatcttggtctcggctgcgaccttcctggcatgctatcttctgaagatccctcttgatgccagcaacgtcttcacttttgtggccaccctgcgcctcgttcaggatccgattcggcagataccagacgtgatcggagttgtgattcaggcgaaagttgccttcaccaggataaccaagttccttgacgcgcctgagctgagtggacaggtcaggaagaaaagctgtctgggggatgagtatccgatagtgatgaattgctgcagtttctcgtgggacgagaacccgtcgaaaccagctctaaagaatgtaaatctggtggtcaaaactggacagaaggttgcaatatgcggcgaggtaggatcaggaaagtctacactgctggctgcagttcttggagaggttccgaaaactgaaggcacgatccaagtttgcgggaaaacagcatatgtttctcagaacgcatggatccaaacaggaaccgtgcaggacaacattctctttgggtcttcgatggacaggcaaaggtaccaggaaacactcgagcggtgttctttagtgaaggatcttgagatgttgccgtatggagaccgtactcagatcggcgagcggggcataaatcttagcggcggtcagaagcagcgtgttcagcttgctcgtgcattgtaccagaatgcagacatctatctccttgatgaccctttcagcgctgttgatgcccacacagcaacgagtctgtttaatggatatgtcatgggagctctgtcagacaagactgttcttttggtgacccaccaagttgattttctgcctgtattcgattctattctgttaatgtcagatggtcaaattattcgttctgcatcttatcatgatctattggcatattgtcaagaatttcagaaccttgtaaatgcccataaagacactattggtgtttcagatcttaacagggtgcctccccatagagaaaatgaaatattgatcaaggagacaattgatgttcatggaagcagatacaaagagtctttgaagccatcaccaacagatcaactgattaagacagaagaaagagaaatgggtgatactggtctcaagccttatattctctacctgcgtcagaataaaggcttcttctatgcttctctgggtattatttcccatatagttttcgtatgtggccaaatatcacagaattcatggatggctactaatgtcgagaatcctgatgttagtactcttaagttgacttctgtgtacattgcaattggaatcttctcggtgttcttcttgctatttagatcattagcagttgttgttcttggggtcaagacatcaagatccttattttctcagttactaaactcattattccgtgcaccaatgtccttttatgattctacccctcttggaagaatacttagccgggtttcttcagatctgagtattgttgaccttgatattccgtttggcttcatgtttagcattggtgctggcataaatgcatatagcaatctaggagtattggctgttgttacatggcaagttctgttcgtctctgtgccaatgattgttttggcaatcaggttgcagaggtattatttagcctcatctaaggaattgatgaggatcaatggcactaccaaatctgctctcgctaatcacttgggcgagtcgattgcaggggctataacaataagggcttttcaggaagaagatcgtttctttgagaaaaacttggaacttgttgacaagaatgctggtccatatttctataattttgcagcaactgaatggctcattcaacgtttggagaccatgagtgctgcagttctttctttttctgcccttatcatggctcttcttcctcaaggaacttttaaccctggctttgtaggaatggcattatcttatggtctatccctgaatatatcctttgttttctctatccaaaaccaatgccagctagctagtcaaatcatctctgtggaaagggttcatcagtacatggacataccaagtgaagcagcagagattattgaagaaaatcgaccagcaccagactggccccaagttggcagggtggaccttaaagatttgaagattagatacagacaagatgctcctcttgtattacatggaatcacctgcagtttccacggtggagataagatcggtatagttgggcgaacaggaagtggaaagacaactttaattggtgcactgtttcgtcttgttgagccaactggagggaaaataattatagactctatagacatcaccacaataggcttacatgacctgcgttcacgtttgggtatcattccgcaagatccgacactctttcaaggaaccataagatataatctagaccctcttgggcaattctctgatcaacaaatatgggaggttctaggcaaatgtcagcttcttgaagctgtccaggagaaggagcagggattggactcacttgttgtggaagatggttcgaactggagcatgggtcaaaggcagctcttttgtttgggacgtgcacttctaagaagatgccgtatcttagttcttgatgaggccacggcatctatagacaacgctactgatgctatccttcagaagacgatcaggacagagtttagagattgcactgtcatcactgtcgcacaccgtatacccaccgttatggactgcgatatggtacttgcaatgagtgacgggaaagtagtggagtacgacaagcctacaaagctcgtggaaaccgaaggatctctcttccgtgatcttgtcaaggagtactggtcatacacatcgaattgaaatatctaggagaaactgtgacaatcacatgttcactcgttgcagtctcttaaaaaagagataacaggagcctgttctcacacacatccgatgaactattctatctcaagtccgaagtagaggtgtcaggcattgtcgggaagtgctttttgttaactagttgaacagggggaaacctgtcgtcccttaaaaaaaaggaaacctccagcgtttttttgctccgatattgagcgaataaaccgaaatatctagtggaaggcgcatcaagtatgcatccttgatactgcatgttcacagaaatgcttgtgcggcaggctgttccaaggctttaaactttatggtgctttacattcctaataaaccgaattgtgtatatgatgtttgggaaaatggtgatttttcaggtttcagctccctctcttgctcacgtttaatgtattatcagtgtaaattcatccgtgattggatttaaggcaaccaatttgttggtacgtagctctgttttcacagcgtgtgcccttcaaacttataactcttgggctccctcatatccagggtaagggtctgtttggtttgtggctaactgtgcgtctgtgccacactttgtctaaggttggtcgttcgaattgaagaactaaccttagacagaaaaattaggcaaagtgtagcaagttaggcagggaacattttaaataagatgagtggtcaaagtttatggtgtcatatatttaagaacggtg

SEQ ID NO: 79401 - DNA, 5349 bp, Zea Mays
cgacgtgagcaatgacggatgcggcgtccgcatccgcacgcgcctttagctactagctctagctctagctctccggagaggcgtctgcagaccaaccgcagccagccagcagactgttagacgacggccacgcggagccgagcgttgccgcgctttgcttgatgggataaacgccgcgcgctgggaagaagggcctggagttgaagcacgaatcatcgaagcgcagcaaaactgagacacacgtcttacttcttcacaagttcttggacgatggacatcttcgggagcccattctgctccaagcaagccgtcgcctcatgcggcggatggacggacatactcgactcctccagctgcacgaaccatatcctggaaaccggcaccgccgctctgatcaccgtcgctctcgcgctgcacctcctcgtcgtcaggattactacgaagaccagagcgtccgcacgccgcccccctgtcgcgcccggcctgccgctgcagctggccggcgcggcgttcaccgcctgcttgggcctcgtctacctcggcctcgcgtcgtggatgctggggagcaacttcactcagcacgcttccgcttacctcccacactggtgggtgacggcactgtcccagggactctgcttggtcctcgccggcttcgctctcagcggcgtcggaggagcacgtctcctcgggccaatgtctgcgcgcgcgtggtcggctctgctggccgcgtacgccgcgttcgtcgcttgttcctcggtcgttcacatggttgcggatagggcactgaccatgaagggttttctggacgctctgttcctgccaggtgcactgctgcttgtctgtggcgcttggtgcgtcaaggaagaggacggtgatggcggaactggaactgctgcttctttgtataagcccttgaagactgacgacactgttgatgatgagaggggtgggtctgagagccatgtgaccccgttcgctaaagccggggttttcagcgtgatgtcgttctggtggatgaacccgatgatgaagacgggctacgagaagccgctcgaggagaaagacatgccgctcttgggtccctcggaccgagcgtacagccagtacctggtgttcctggagaagctcaacaggaagaagcagctgcgggcacacggcaacccgtcgatgttttggaccatcgtttcttgccagaaaactgggatcttggtctcgggtctctttgcactgctcaaggttctcacgctgtcttcgggcccggtgcttctgaaagcattcatcaacgtctcgctcgggaaagggtccttcaagtacgaaggctacgtgttggccgtagcgatgttcctctgcaaatgctgcgaatctctgtcgcagaggcagtggtacttccgcacgcggaggctagggctccaggtgcggtcgttcctgtcggccgccgtctacaagaagcatcagaggctgtccaactcggcgaagctgaagcactcttccggcgagatcatgaactacgtcaccgtcgacgcctaccggatcggcgagttcccgtactggttccaccagacgtggacgacgagcgtccagctctgcatcgctctagcgatcctgtacgacgcggtcggcctcgccacggtcgcggcgctggccgtcatcatcgccaccgtggtctgcaacgcgccgctggccaagctgcagcacaagttccagagcaggcttatggaggcgcaggacgtgaggttgaaggcgatgtcggagtccttggttcacatgaaggtcctgaagctttacgcgtgggagacccacttcaagaaggtcatcgaggggctgagggaggtcgagatcaaatggctgtcggcgttccagcttaggaaagcgtacaacagcttcctgttctggacgtcgcctatcttggtctcggctgcgaccttcctggcatgctatcttctgaagatccctcttgatgccagcaacgtcttcacttttgtggccaccctgcgcctcgttcaggatccgattcggcagataccagacgtgatcggagttgtgattcaggcgaaagttgccttcaccaggataaccaagttccttgacgcgcctgagctgagtggacaggtcaggaagaaaagctgtctgggggatgagtatccgatagtgatgaattgctgcagtttctcgtgggacgagaacccgtcgaaaccagctctaaagaatgtaaatctggtggtcaaaactggacagaaggttgcaatatgcggcgaggtaggatcaggaaagtctacactgctggctgcagttcttggagaggttccgaaaactgaaggcacgatccaagtttgcgggaaaacagcatatgtttctcagaacgcatggatccaaacaggaaccgtgcaggacaacattctctttgggtcttcgatggacaggcaaaggtaccaggaaacactcgagcggtgttctttagtgaaggatcttgagatgttgccgtatggagaccgtactcagatcggcgagcggggcataaatcttagcggcggtcagaagcagcgtgttcagcttgctcgtgcattgtaccagaatgcagacatctatctccttgatgaccctttcagcgctgttgatgcccacacagcaacgagtctgtttaatggatatgtcatgggagctctgtcagacaagactgttcttttggtgacccaccaagttgattttctgcctgtattcgattctattctggtttcttcagatctgagtattgttgaccttgatattccgtttggcttcatgtttagcattggtgctggcataaatgcatatagcaatctaggagtattggctgttgttacatggcaagttctgttcgtctctgtgccaatgattgttttggcaatcaggttgcagaggtattatttagcctcatctaaggaattgatgaggatcaatggcactaccaaatctgctctcgctaatcacttgggcgagtcgattgcaggggctataacaataagggcttttcaggaagaagatcgtttctttgagaaaaacttggaacttgttgacaagaatgctggtccatatttctataattttgcagcaactgaatggctcattcaacgtttggagaccatgagtgctgcagttctttctttttctgcccttatcatggctcttcttcctcaaggaacttttaaccctggctttgtaggaatggcattatcttatggtctatccctgaatatatcctttgttttctctatccaaaaccaatgccagctagctagtcaaatcatctctgtggaaagggttcatcagtacatggacataccaagtgaagcagcagagattattgaagaaaatcgaccagcaccagactggccccaagttggcagggtggaccttaaagatttgaagattagatacagacaagatgctcctcttgtattacatggaatcacctgcagtttccacggtggagataagatcggtatagttgggcgaacaggaagtggaaagacaactttaattggtgcactgtttcgtcttgttgagccaactggagggaaaataattatagactctatagacatcaccacaataggcttacatgacctgcgttcacgtttgggtatcattccgcaagatccgacactctttcaaggaaccataagatataatctagaccctcttgggcaattctctgatcaacaaatatgggaggttctaggcaaatgtcagcttcttgaagctgtccaggagaaggagcagggattggactcacttgttgtggaagatggttcgaactggagcatgggtcaaaggcagctcttttgtttgggacgtgcacttctaagaagatgccgtatcttagttcttgatgaggccacggcatctatagacaacgctactgatgctatccttcagaagacgatcaggacagagtttagagattgcactgtcatcactgtcgcacaccgtatacccaccgttatggactgcgatatggtacttgcaatgagtgacggtatgttttcttcttgaacttgctagatgttagagtttatgtatttgggtgttttgcccctttggcctatatgtacttgtgggaaaccctaactctaacagtacttttgtcctatgggctgttaatttattcactctttttcctccaatactagagatacagcagttcagcacaactagaatctggaatctggggattcttcctaaaacagtattgtgtttttctttaaaaaggcctaaaacaatatatttgttgatacaagcaagcactcctttttctgatatgtatctttactaccttttctgcggtgatttatgcatgccaacttggcaaactcgtgtcagatcttaaacataaaccagaactgagcagtatatcttgccctttctctttattcttttctgcttagttttgttagattgtggaagcctgcctccagatagtattgcagcatgccagcatttacatgctaacgggttcagtttattcccagggaaagtagtggagtacgacaagcctacaaagctcgtggaaaccgaaggatctctcttccgtgatcttgtcaaggagtactggtcatacacatcgaattgaaatatctaggagaaactgtgacaatcacatgttcactcgttgcagtctcttaaaaaagagataacaggagcctgttctcacacacatccgatgaactattctatctcaagtccgaagtagaggtgtcaggcattgtcgggaagtgctttttgttaactagttgaacagggggaaacctgtcgtcccttaaaaaaaaggaaacctccagcgtttttttgctccgatattgagcgaataaaccgaaatatctagtggaaggcgcatcaagtatgcatccttgatactgcatgttcacagaaatgcttgtgcggcaggctgttccaaggctttaaactttatggtgctttacattcctaataaaccgaattgtgtatatgatgtttgggaaaatggtgatttttcaggtttcagctccctctcttgctcacgtttaatgtattatcagtgtaaattcatccgtgattggatttaaggcaaccaatttgttggtacgtagctctgttttcacagcgtgtgcccttcaaacttataactcttgggctccctcatatccagggtaagggtctgtttggtttgtggctaactgtgcgtctgtgccacactttgtctaaggttggtcgttcgaattgaagaactaaccttagacagaaaaattaggcaaagtgtagcaagttaggcagggaacattttaaataagatgagtggtcaaagtttatggtgtcatatatttaagaacggtg

SEQ ID NO: 79402 - DNA, 6113 bp, Zea Mays
tgggaaggttcagtgaccactccctgccgccgccgccgccgccgccgcgctggtttttattcgcttctttctgccttcttcctcctcgcggccggggcgggggcgtgctgctctctcctctccagggagttttctgcgggggttttggttgggttttcttcagcgccagccgtggatgtgtttaacgcaacagtattagtttcttcatgatcagctgtgtgtcctcaaattgagtttcgtgccgtgtaccagtcgcgcatgttccccagatcgattaaagtttcttcgcgcgtatgtatgagctctattcgaatgttctttgctctgaaaagattccccctgttcatggttacagaagggcctggagttgaagcacgaatcatcgaagcgcagcaaaactgagacacacgtcttacttcttcacaagttcttggacgatggacatcttcgggagcccattctgctccaagcaagccgtcgcctcatgcggcggatggacggacatactcgactcctccagctgcacgaaccatatcctggaaaccggcaccgccgctctgatcaccgtcgctctcgcgctgcacctcctcgtcgtcaggattactacgaagaccagagcgtccgcacgccgcccccctgtcgcgcccggcctgccgctgcagctggccggcgcggcgttcaccgcctgcttgggcctcgtctacctcggcctcgcgtcgtggatgctggggagcaacttcactcagcacgcttccgcttacctcccacactggtgggtgacggcactgtcccagggactctgcttggtcctcgccggcttcgctctcagcggcgtcggaggagcacgtctcctcgggccaatgtctgcgcgcgcgtggtcggctctgctggccgcgtacgccgcgttcgtcgcttgttcctcggtcgttcacatggttgcggatagggcactgaccatgaagggttttctggacgctctgttcctgccaggtgcactgctgcttgtctgtggcgcttggtgcgtcaaggaagaggacggtgatggcggaactggaactgctgcttctttgtataagcccttgaagactgacgacactgttgatgatgagaggggtgggtctgagagccatgtgaccccgttcgctaaagccggggttttcagcgtgatgtcgttctggtggatgaacccgatgatgaagacgggctacgagaagccgctcgaggagaaagacatgccgctcttgggtccctcggaccgagcgtacagccagtacctggtgttcctggagaagctcaacaggaagaagcagctgcgggcacacggcaacccgtcgatgttttggaccatcgtttcttgccagaaaactgggatcttggtctcgggtctctttgcactgctcaaggttctcacgctgtcttcgggcccggtgcttctgaaagcattcatcaacgtctcgctcgggaaagggtccttcaagtacgaaggctacgtgttggccgtagcgatgttcctctgcaaatgctgcgaatctctgtcgcagaggcagtggtacttccgcacgcggaggctagggctccaggtgcggtcgttcctgtcggccgccgtctacaagaagcatcagaggctgtccaactcggcgaagctgaagcactcttccggcgagatcatgaactacgtcaccgtcgacgcctaccggatcggcgagttcccgtactggttccaccagacgtggacgacgagcgtccagctctgcatcgctctagcgatcctgtacgacgcggtcggcctcgccacggtcgcggcgctggccgtcatcatcgccaccgtggtctgcaacgcgccgctggccaagctgcagcacaagttccagagcaggcttatggaggcgcaggacgtgaggttgaaggcgatgtcggagtccttggttcacatgaaggtcctgaagctttacgcgtgggagacccacttcaagaaggtcatcgaggggctgagggaggtcgagatcaaatggctgtcggcgttccagcttaggaaagcgtacaacagcttcctgttctggacgtcgcctatcttggtctcggctgcgaccttcctggcatgctatcttctgaagatccctcttgatgccagcaacgtcttcacttttgtggccaccctgcgcctcgttcaggatccgattcggcagataccagacgtgatcggagttgtgattcaggcgaaagttgccttcaccaggataaccaagttccttgacgcgcctgagctgagtggacaggtcaggaagaaaagctgtctgggggatgagtatccgatagtgatgaattgctgcagtttctcgtgggacgagaacccgtcgaaaccagctctaaagaatgtaaatctggtggtcaaaactggacagaaggttgcaatatgcggcgaggtaggatcaggaaagtctacactgctggctgcagttcttggagaggttccgaaaactgaaggcacgatccaagtttgcgggaaaacagcatatgtttctcagaacgcatggatccaaacaggaaccgtgcaggacaacattctctttgggtcttcgatggacaggcaaaggtaccaggaaacactcgagcggtgttctttagtgaaggatcttgagatgttgccgtatggagaccgtactcagatcggcgagcggggcataaatcttagcggcggtcagaagcagcgtgttcagcttgctcgtgcattgtaccagaatgcagacatctatctccttgatgaccctttcagcgctgttgatgcccacacagcaacgagtctgtttaatggatatgtcatgggagctctgtcagacaagactgttcttttggtgacccaccaagttgattttctgcctgtattcgattctattctgttaatgtcagatggtcaaattattcgttctgcatcttatcatgatctattggcatattgtcaagaatttcagaaccttgtaaatgcccataaagacactattggtgtttcagatcttaacagggtgcctccccatagagaaaatgaaatattgatcaaggagacaattgatgttcatggaagcagatacaaagagtctttgaagccatcaccaacagatcaactgattaagacagaagaaagagaaatgggtgatactggtctcaagccttatattctctacctgcgtcagaataaaggcttcttctatgcttctctgggtattatttcccatatagttttcgtatgtggccaaatatcacagaattcatggatggctactaatgtcgagaatcctgatgttagtactcttaagttgacttctgtgtacattgcaattggaatcttctcggtgttcttcttgctatttagatcattagcagttgttgttcttggggtcaagacatcaagatccttattttctcagttactaaactcattattccgtgcaccaatgtccttttatgattctacccctcttggaagaatacttagccgggtttcttcagatctgagtattgttgaccttgatattccgtttggcttcatgtttagcattggtgctggcataaatgcatatagcaatctaggagtattggctgttgttacatggcaagttctgttcgtctctgtgccaatgattgttttggcaatcaggttgcagaggtattatttagcctcatctaaggaattgatgaggatcaatggcactaccaaatctgctctcgctaatcacttgggcgagtcgattgcaggggctataacaataagggcttttcaggaagaagatcgtttctttgagaaaaacttggaacttgttgacaagaatgctggtccatatttctataattttgcagcaactgaatggctcattcaacgtttggagaccatgagtgctgcagttctttctttttctgcccttatcatggctcttcttcctcaaggaacttttaaccctggctttgtaggaatggcattatcttatggtctatccctgaatatatcctttgttttctctatccaaaaccaatgccagctagctagtcaaatcatctctgtggaaagggttcatcagtacatggacataccaagtgaagcagcagagattattgaagaaaatcgaccagcaccagactggccccaagttggcagggtggaccttaaagatttgaagattagatacagacaagatgctcctcttgtattacatggaatcacctgcagtttccacggtggagataagatcggtatagttgggcgaacaggaagtggaaagacaactttaattggtgcactgtttcgtcttgttgagccaactggagggaaaataattatagactctatagacatcaccacaataggcttacatgacctgcgttcacgtttgggtatcattccgcaagatccgacactctttcaaggaaccataagatataatctagaccctcttgggcaattctctgatcaacaaatatgggaggttctaggcaaatgtcagcttcttgaagctgtccaggagaaggagcagggattggactcacttgttgtggaagatggttcgaactggagcatgggtcaaaggcagctcttttgtttgggacgtgcacttctaagaagatgccgtatcttagttcttgatgaggccacggcatctatagacaacgctactgatgctatccttcagaagacgatcaggacagagtttagagattgcactgtcatcactgtcgcacaccgtatacccaccgttatggactgcgatatggtacttgcaatgagtgacggtatgttttcttcttgaacttgctagatgttagagtttatgtatttgggtgttttgcccctttggcctatatgtacttgtgggaaaccctaactctaacagtacttttgtcctatgggctgttaatttattcactctttttcctccaatactagagatacagcagttcagcacaactagaatctggaatctggggattcttcctaaaacagtattgtgtttttctttaaaaaggcctaaaacaatatatttgttgatacaagcaagcactcctttttctgatatgtatctttactaccttttctgcggtgatttatgcatgccaacttggcaaactcgtgtcagatcttaaacataaaccagaactgagcagtatatcttgccctttctctttattcttttctgcttagttttgttagattgtggaagcctgcctccagatagtattgcagcatgccagcatttacatgctaacgggttcagtttattcccagggaaagtagtggagtacgacaagcctacaaagctcgtggaaaccgaaggatctctcttccgtgatcttgtcaaggagtactggtcatacacatcgaattgaaatatctaggagaaactgtgacaatcacatgttcactcgttgcagtctcttaaaaaagagataacaggagcctgttctcacacacatccgatgaactattctatctcaagtccgaagtagaggtgtcaggcattgtcgggaagtgctttttgttaactagttgaacagggggaaacctgtcgtcccttaaaaaaaaggaaacctccagcgtttttttgctccgatattgagcgaataaaccgaaatatctagtggaaggcgcatcaagtatgcatccttgatactgcatgttcacagaaatgcttgtgcggcaggctgttccaaggctttaaactttatggtgctttacattcctaataaaccgaattgtgtatatgatgtttgggaaaatggtgatttttcaggtttcagctccctctcttgctcacgtttaatgtattatcagtgtaaattcatccgtgattggatttaaggcaaccaatttgttggtacgtagctctgttttcacagcgtgtgcccttcaaacttataactcttgggctccctcatatccagggtaagggtctgtttggtttgtggctaactgtgcgtctgtgccacactttgtctaaggttggtcgttcgaattgaagaactaaccttagacagaaaaattaggcaaagtgtagcaagttaggcagggaacattttaaataagatgagtggtcaaagtttatggtgtcatatatttaagaacggtg

SEQ ID NO: 79403 - DNA, 5543 bp, Zea Mays
tgggaaggttcagtgaccactccctgccgccgccgccgccgccgccgcgctggtttttattcgcttctttctgccttcttcctcctcgcggccggggcgggggcgtgctgctctctcctctccagggagttttctgcgggggttttggttgggttttcttcagcgccagccgtggatgtgtttaacgcaacagtattagtttcttcatgatcagctgtgtgtcctcaaattgagtttcgtgccgtgtaccagtcgcgcatgttccccagatcgattaaagtttcttcgcgcgtatgtatgagctctattcgaatgttctttgctctgaaaagattccccctgttcatggttacagaagggcctggagttgaagcacgaatcatcgaagcgcagcaaaactgagacacacgtcttacttcttcacaagttcttggacgatggacatcttcgggagcccattctgctccaagcaagccgtcgcctcatgcggcggatggacggacatactcgactcctccagctgcacgaaccatatcctggaaaccggcaccgccgctctgatcaccgtcgctctcgcgctgcacctcctcgtcgtcaggattactacgaagaccagagcgtccgcacgccgcccccctgtcgcgcccggcctgccgctgcagctggccggcgcggcgttcaccgcctgcttgggcctcgtctacctcggcctcgcgtcgtggatgctggggagcaacttcactcagcacgcttccgcttacctcccacactggtgggtgacggcactgtcccagggactctgcttggtcctcgccggcttcgctctcagcggcgtcggaggagcacgtctcctcgggccaatgtctgcgcgcgcgtggtcggctctgctggccgcgtacgccgcgttcgtcgcttgttcctcggtcgttcacatggttgcggatagggcactgaccatgaagggttttctggacgctctgttcctgccaggtgcactgctgcttgtctgtggcgcttggtgcgtcaaggaagaggacggtgatggcggaactggaactgctgcttctttgtataagcccttgaagactgacgacactgttgatgatgagaggggtgggtctgagagccatgtgaccccgttcgctaaagccggggttttcagcgtgatgtcgttctggtggatgaacccgatgatgaagacgggctacgagaagccgctcgaggagaaagacatgccgctcttgggtccctcggaccgagcgtacagccagtacctggtgttcctggagaagctcaacaggaagaagcagctgcgggcacacggcaacccgtcgatgttttggaccatcgtttcttgccagaaaactgggatcttggtctcgggtctctttgcactgctcaaggttctcacgctgtcttcgggcccggtgcttctgaaagcattcatcaacgtctcgctcgggaaagggtccttcaagtacgaaggctacgtgttggccgtagcgatgttcctctgcaaatgctgcgaatctctgtcgcagaggcagtggtacttccgcacgcggaggctagggctccaggtgcggtcgttcctgtcggccgccgtctacaagaagcatcagaggctgtccaactcggcgaagctgaagcactcttccggcgagatcatgaactacgtcaccgtcgacgcctaccggatcggcgagttcccgtactggttccaccagacgtggacgacgagcgtccagctctgcatcgctctagcgatcctgtacgacgcggtcggcctcgccacggtcgcggcgctggccgtcatcatcgccaccgtggtctgcaacgcgccgctggccaagctgcagcacaagttccagagcaggcttatggaggcgcaggacgtgaggttgaaggcgatgtcggagtccttggttcacatgaaggtcctgaagctttacgcgtgggagacccacttcaagaaggtcatcgaggggctgagggaggtcgagatcaaatggctgtcggcgttccagcttaggaaagcgtacaacagcttcctgttctggacgtcgcctatcttggtctcggctgcgaccttcctggcatgctatcttctgaagatccctcttgatgccagcaacgtcttcacttttgtggccaccctgcgcctcgttcaggatccgattcggcagataccagacgtgatcggagttgtgattcaggcgaaagttgccttcaccaggataaccaagttccttgacgcgcctgagctgagtggacaggtcaggaagaaaagctgtctgggggatgagtatccgatagtgatgaattgctgcagtttctcgtgggacgagaacccgtcgaaaccagctctaaagaatgtaaatctggtggtcaaaactggacagaaggttgcaatatgcggcgaggtaggatcaggaaagtctacactgctggctgcagttcttggagaggttccgaaaactgaaggcacgatccaagtttgcgggaaaacagcatatgtttctcagaacgcatggatccaaacaggaaccgtgcaggacaacattctctttgggtcttcgatggacaggcaaaggtaccaggaaacactcgagcggtgttctttagtgaaggatcttgagatgttgccgtatggagaccgtactcagatcggcgagcggggcataaatcttagcggcggtcagaagcagcgtgttcagcttgctcgtgcattgtaccagaatgcagacatctatctccttgatgaccctttcagcgctgttgatgcccacacagcaacgagtctgtttaatggatatgtcatgggagctctgtcagacaagactgttcttttggtgacccaccaagttgattttctgcctgtattcgattctattctgttaatgtcagatggtcaaattattcgttctgcatcttatcatgatctattggcatattgtcaagaatttcagaaccttgtaaatgcccataaagacactattggtgtttcagatcttaacagggtgcctccccatagagaaaatgaaatattgatcaaggagacaattgatgttcatggaagcagatacaaagagtctttgaagccatcaccaacagatcaactgattaagacagaagaaagagaaatgggtgatactggtctcaagccttatattctctacctgcgtcagaataaaggcttcttctatgcttctctgggtattatttcccatatagttttcgtatgtggccaaatatcacagaattcatggatggctactaatgtcgagaatcctgatgttagtactcttaagttgacttctgtgtacattgcaattggaatcttctcggtgttcttcttgctatttagatcattagcagttgttgttcttggggtcaagacatcaagatccttattttctcagttactaaactcattattccgtgcaccaatgtccttttatgattctacccctcttggaagaatacttagccgggtttcttcagatctgagtattgttgaccttgatattccgtttggcttcatgtttagcattggtgctggcataaatgcatatagcaatctaggagtattggctgttgttacatggcaagttctgttcgtctctgtgccaatgattgttttggcaatcaggttgcagaggtattatttagcctcatctaaggaattgatgaggatcaatggcactaccaaatctgctctcgctaatcacttgggcgagtcgattgcaggggctataacaataagggcttttcaggaagaagatcgtttctttgagaaaaacttggaacttgttgacaagaatgctggtccatatttctataattttgcagcaactgaatggctcattcaacgtttggagaccatgagtgctgcagttctttctttttctgcccttatcatggctcttcttcctcaaggaacttttaaccctgctagctagtcaaatcatctctgtggaaagggttcatcagtacatggacataccaagtgaagcagcagagattattgaagaaaatcgaccagcaccagactggccccaagttggcagggtggaccttaaagatttgaagattagatacagacaagatgctcctcttgtattacatggaatcacctgcagtttccacggtggagataagatcggtatagttgggcgaacaggaagtggaaagacaactttaattggtgcactgtttcgtcttgttgagccaactggagggaaaataattatagactctatagacatcaccacaataggcttacatgacctgcgttcacgtttgggtatcattccgcaagatccgacactctttcaaggaaccataagatataatctagaccctcttgggcaattctctgatcaacaaatatgggaggttctaggcaaatgtcagcttcttgaagctgtccaggagaaggagcagggattggactcacttgttgtggaagatggttcgaactggagcatgggtcaaaggcagctcttttgtttgggacgtgcacttctaagaagatgccgtatcttagttcttgatgaggccacggcatctatagacaacgctactgatgctatccttcagaagacgatcaggacagagtttagagattgcactgtcatcactgtcgcacaccgtatacccaccgttatggactgcgatatggtacttgcaatgagtgacgggaaagtagtggagtacgacaagcctacaaagctcgtggaaaccgaaggatctctcttccgtgatcttgtcaaggagtactggtcatacacatcgaattgaaatatctaggagaaactgtgacaatcacatgttcactcgttgcagtctcttaaaaaagagataacaggagcctgttctcacacacatccgatgaactattctatctcaagtccgaagtagaggtgtcaggcattgtcgggaagtgctttttgttaactagttgaacagggggaaacctgtcgtcccttaaaaaaaaggaaacctccagcgtttttttgctccgatattgagcgaataaaccgaaatatctagtggaaggcgcatcaagtatgcatccttgatactgcatgttcacagaaatgcttgtgcggcaggctgttccaaggctttaaactttatggtgctttacattcctaataaaccgaattgtgtatatgatgtttgggaaaatggtgatttttcaggtttcagctccctctcttgctcacgtttaatgtattatcagtgtaaattcatccgtgattggatttaaggcaaccaatttgttggtacgtagctctgttttcacagcgtgtgcccttcaaacttataactcttgggctccctcatatccagggtaagggtctgtttggtttgtggctaactgtgcgtctgtgccacactttgtctaaggttggtcgttcgaattgaagaactaaccttagacagaaaaattaggcaaagtgtagcaagttaggcagggaacattttaaataagatgagtggtcaaagtttatggtgtcatatatttaagaacggtg

SEQ ID NO: 79404 - DNA, 3673 bp, Zea Mays
cgcgtttccccgcatttctgcggcttggcacttctttacctttttcttaaaaagagagagaaaaaggaactcctttcatgcgttccccgggcgctctggttctgttggtgtcccgtcattttcagcacaaattagagtgaccaacagttggtgttatacttgaggcatttgaggttgggactgagagctatcagtttgatctcgatgtcaacttggctgcgtgcctgcgtggggagaaatgtgctaatgccatccttgccagcatggaggtcgatctctccatgtccattaggactagtttgggaatctcattttctcatgagattttcatttttccaagggaatttagtttattttcccttgggaaaacagaaattccttggaaaaatggagttcccaaactagtcctcagaggtcttgccactccataccttatgtgggaccgcctccgtcacatttacgatattcatcacagttaatttcttccaaggcacatacataggcccacaatagattcttaatctccaaactcagtgttgtctttccaccattagtttaagagggggtgctagatgtatagaggtgtgtggtattttccctctactttggagagtccctttgcatatgcacactcgctcactctcttgtatatctctgcctttgggcctggtaatagaagttggttggactcattatagcaatcctattatctctttatgtctttcgactttctttctgatgatcgaacattattttgttaaaaatcatattgttctactaaatcaaaaggtcatccattgtccatcatcaattgatagtttcagaatcaaagaaagacttaaggaaaaaagtgctatgcaaagatattactccctccatgtttatatgtattttagttatcatatattttttgtggttgatgtcatctaagaataagtgtttcttggcagttaatgtcagatggtcaaattattcgttctgcatcttatcatgatctattggcatattgtcaagaatttcagaaccttgtaaatgcccataaagacactattggtgtttcagatcttaacagggtgcctccccatagagaaaatgaaatattgatcaaggagacaattgatgttcatggaagcagatacaaagagtctttgaagccatcaccaacagatcaactgattaagacagaagaaagagaaatgggtgatactggtctcaagccttatattctctacctgcgtcagaataaaggcttcttctatgcttctctgggtattatttcccatatagttttcgtatgtggccaaatatcacagaattcatggatggctactaatgtcgagaatcctgatgttagtactcttaagttgacttctgtgtacattgcaattggaatcttctcggtgttcttcttgctatttagatcattagcagttgttgttcttggggtcaagacatcaagatccttattttctcagttactaaactcattattccgtgcaccaatgtccttttatgattctacccctcttggaagaatacttagccgggtttcttcagatctgagtattgttgaccttgatattccgtttggcttcatgtttagcattggtgctggcataaatgcatatagcaatctaggagtattggctgttgttacatggcaagttctgttcgtctctgtgccaatgattgttttggcaatcaggttgcagaggtattatttagcctcatctaaggaattgatgaggatcaatggcactaccaaatctgctctcgctaatcacttgggcgagtcgattgcaggggctataacaataagggcttttcaggaagaagatcgtttctttgagaaaaacttggaacttgttgacaagaatgctggtccatatttctataattttgcagcaactgaatggctcattcaacgtttggagaccatgagtgctgcagttctttctttttctgcccttatcatggctcttcttcctcaaggaacttttaaccctggctttgtaggaatggcattatcttatggtctatccctgaatatatcctttgttttctctatccaaaaccaatgccagctagctagtcaaatcatctctgtggaaagggttcatcagtacatggacataccaagtgaagcagcagagattattgaagaaaatcgaccagcaccagactggccccaagttggcagggtggaccttaaagatttgaagattagatacagacaagatgctcctcttgtattacatggaatcacctgcagtttccacggtggagataagatcggtatagttgggcgaacaggaagtggaaagacaactttaattggtgcactgtttcgtcttgttgagccaactggagggaaaataattatagactctatagacatcaccacaataggcttacatgacctgcgttcacgtttgggtatcattccgcaagatccgacactctttcaaggaaccataagatataatctagaccctcttgggcaattctctgatcaacaaatatgggaggttctaggcaaatgtcagcttcttgaagctgtccaggagaaggagcagggattggactcacttgttgtggaagatggttcgaactggagcatgggtcaaaggcagctcttttgtttgggacgtgcacttctaagaagatgccgtatcttagttcttgatgaggccacggcatctatagacaacgctactgatgctatccttcagaagacgatcaggacagagtttagagattgcactgtcatcactgtcgcacaccgtatacccaccgttatggactgcgatatggtacttgcaatgagtgacgggaaagtagtggagtacgacaagcctacaaagctcgtggaaaccgaaggatctctcttccgtgatcttgtcaaggagtactggtcatacacatcgaattgaaatatctaggagaaactgtgacaatcacatgttcactcgttgcagtctcttaaaaaagagataacaggagcctgttctcacacacatccgatgaactattctatctcaagtccgaagtagaggtgtcaggcattgtcgggaagtgctttttgttaactagttgaacagggggaaacctgtcgtcccttaaaaaaaaggaaacctccagcgtttttttgctccgatattgagcgaataaaccgaaatatctagtggaaggcgcatcaagtatgcatccttgatactgcatgttcacagaaatgcttgtgcggcaggctgttccaaggctttaaactttatggtgctttacattcctaataaaccgaattgtgtatatgatgtttgggaaaatggtgatttttcaggtttcagctccctctcttgctcacgtttaatgtattatcagtgtaaattcatccgtgattggatttaaggcaaccaatttgttggtacgtagctctgttttcacagcgtgtgcccttcaaacttataactcttgggctccctcatatccagggtaagggtctgtttggtttgtggctaactgtgcgtctgtgccacactttgtctaaggttggtcgttcgaattgaagaactaaccttagacagaaaaattaggcaaagtgtagcaagttaggcagggaacattttaaataagatgagtggtcaaagtttatggtgtcatatatttaagaacggtg

SEQ ID NO: 79405 - DNA, 2862 bp, Zea Mays
cgcatttctgcggcttggcacttctttacctttttcttaaaaagagagagaaaaaggaactcctttcatgcgttccccgggcgctctggttctgttggtgtcccgtcattttcagcacaaattagagtgaccaacagttttaatgtcagatggtcaaattattcgttctgcatcttatcatgatctattggcatattgtcaagaatttcagaaccttgtaaatgcccataaagacactattggtgtttcagatcttaacagggtgcctccccatagagaaaatgaaatattgatcaaggagacaattgatgttcatggaagcagatacaaagagtctttgaagccatcaccaacagatcaactgattaagacagaagaaagagaaatgggtgatactggtctcaagccttatattctctacctgcgtcagaataaaggcttcttctatgcttctctgggtattatttcccatatagttttcgtatgtggccaaatatcacagaattcatggatggctactaatgtcgagaatcctgatgttagtactcttaagttgacttctgtgtacattgcaattggaatcttctcggtgttcttcttgctatttagatcattagcagttgttgttcttggggtcaagacatcaagatccttattttctcagttactaaactcattattccgtgcaccaatgtccttttatgattctacccctcttggaagaatacttagccgggtttcttcagatctgagtattgttgaccttgatattccgtttggcttcatgtttagcattggtgctggcataaatgcatatagcaatctaggagtattggctgttgttacatggcaagttctgttcgtctctgtgccaatgattgttttggcaatcaggttgcagaggtattatttagcctcatctaaggaattgatgaggatcaatggcactaccaaatctgctctcgctaatcacttgggcgagtcgattgcaggggctataacaataagggcttttcaggaagaagatcgtttctttgagaaaaacttggaacttgttgacaagaatgctggtccatatttctataattttgcagcaactgaatggctcattcaacgtttggagaccatgagtgctgcagttctttctttttctgcccttatcatggctcttcttcctcaaggaacttttaaccctggctttgtaggaatggcattatcttatggtctatccctgaatatatcctttgttttctctatccaaaaccaatgccagctagctagtcaaatcatctctgtggaaagggttcatcagtacatggacataccaagtgaagcagcagagattattgaagaaaatcgaccagcaccagactggccccaagttggcagggtggaccttaaagatttgaagattagatacagacaagatgctcctcttgtattacatggaatcacctgcagtttccacggtggagataagatcggtatagttgggcgaacaggaagtggaaagacaactttaattggtgcactgtttcgtcttgttgagccaactggagggaaaataattatagactctatagacatcaccacaataggcttacatgacctgcgttcacgtttgggtatcattccgcaagatccgacactctttcaaggaaccataagatataatctagaccctcttgggcaattctctgatcaacaaatatgggaggttctaggcaaatgtcagcttcttgaagctgtccaggagaaggagcagggattggactcacttgttgtggaagatggttcgaactggagcatgggtcaaaggcagctcttttgtttgggacgtgcacttctaagaagatgccgtatcttagttcttgatgaggccacggcatctatagacaacgctactgatgctatccttcagaagacgatcaggacagagtttagagattgcactgtcatcactgtcgcacaccgtatacccaccgttatggactgcgatatggtacttgcaatgagtgacgggaaagtagtggagtacgacaagcctacaaagctcgtggaaaccgaaggatctctcttccgtgatcttgtcaaggagtactggtcatacacatcgaattgaaatatctaggagaaactgtgacaatcacatgttcactcgttgcagtctcttaaaaaagagataacaggagcctgttctcacacacatccgatgaactattctatctcaagtccgaagtagaggtgtcaggcattgtcgggaagtgctttttgttaactagttgaacagggggaaacctgtcgtcccttaaaaaaaaggaaacctccagcgtttttttgctccgatattgagcgaataaaccgaaatatctagtggaaggcgcatcaagtatgcatccttgatactgcatgttcacagaaatgcttgtgcggcaggctgttccaaggctttaaactttatggtgctttacattcctaataaaccgaattgtgtatatgatgtttgggaaaatggtgatttttcaggtttcagctccctctcttgctcacgtttaatgtattatcagtgtaaattcatccgtgattggatttaaggcaaccaatttgttggtacgtagctctgttttcacagcgtgtgcccttcaaacttataactcttgggctccctcatatccagggtaagggtctgtttggtttgtggctaactgtgcgtctgtgccacactttgtctaaggttggtcgttcgaattgaagaactaaccttagacagaaaaattaggcaaagtgtagcaagttaggcagggaacattttaaataagatgagtggtcaaagtttatggtgtcatatatttaagaacggtg

SEQ ID NO: 79406 - DNA, 2799 bp, Zea Mays
gtttgatctcgatgtcaacttggctgcgtgcctgcgtggggagaaatgtgctaatgccatccttgccagcatggagttaatgtcagatggtcaaattattcgttctgcatcttatcatgatctattggcatattgtcaagaatttcagaaccttgtaaatgcccataaagacactattggtgtttcagatcttaacagggtgcctccccatagagaaaatgaaatattgatcaaggagacaattgatgttcatggaagcagatacaaagagtctttgaagccatcaccaacagatcaactgattaagacagaagaaagagaaatgggtgatactggtctcaagccttatattctctacctgcgtcagaataaaggcttcttctatgcttctctgggtattatttcccatatagttttcgtatgtggccaaatatcacagaattcatggatggctactaatgtcgagaatcctgatgttagtactcttaagttgacttctgtgtacattgcaattggaatcttctcggtgttcttcttgctatttagatcattagcagttgttgttcttggggtcaagacatcaagatccttattttctcagttactaaactcattattccgtgcaccaatgtccttttatgattctacccctcttggaagaatacttagccgggtttcttcagatctgagtattgttgaccttgatattccgtttggcttcatgtttagcattggtgctggcataaatgcatatagcaatctaggagtattggctgttgttacatggcaagttctgttcgtctctgtgccaatgattgttttggcaatcaggttgcagaggtattatttagcctcatctaaggaattgatgaggatcaatggcactaccaaatctgctctcgctaatcacttgggcgagtcgattgcaggggctataacaataagggcttttcaggaagaagatcgtttctttgagaaaaacttggaacttgttgacaagaatgctggtccatatttctataattttgcagcaactgaatggctcattcaacgtttggagaccatgagtgctgcagttctttctttttctgcccttatcatggctcttcttcctcaaggaacttttaaccctggctttgtaggaatggcattatcttatggtctatccctgaatatatcctttgttttctctatccaaaaccaatgccagctagctagtcaaatcatctctgtggaaagggttcatcagtacatggacataccaagtgaagcagcagagattattgaagaaaatcgaccagcaccagactggccccaagttggcagggtggaccttaaagatttgaagattagatacagacaagatgctcctcttgtattacatggaatcacctgcagtttccacggtggagataagatcggtatagttgggcgaacaggaagtggaaagacaactttaattggtgcactgtttcgtcttgttgagccaactggagggaaaataattatagactctatagacatcaccacaataggcttacatgacctgcgttcacgtttgggtatcattccgcaagatccgacactctttcaaggaaccataagatataatctagaccctcttgggcaattctctgatcaacaaatatgggaggttctaggcaaatgtcagcttcttgaagctgtccaggagaaggagcagggattggactcacttgttgtggaagatggttcgaactggagcatgggtcaaaggcagctcttttgtttgggacgtgcacttctaagaagatgccgtatcttagttcttgatgaggccacggcatctatagacaacgctactgatgctatccttcagaagacgatcaggacagagtttagagattgcactgtcatcactgtcgcacaccgtatacccaccgttatggactgcgatatggtacttgcaatgagtgacgggaaagtagtggagtacgacaagcctacaaagctcgtggaaaccgaaggatctctcttccgtgatcttgtcaaggagtactggtcatacacatcgaattgaaatatctaggagaaactgtgacaatcacatgttcactcgttgcagtctcttaaaaaagagataacaggagcctgttctcacacacatccgatgaactattctatctcaagtccgaagtagaggtgtcaggcattgtcgggaagtgctttttgttaactagttgaacagggggaaacctgtcgtcccttaaaaaaaaggaaacctccagcgtttttttgctccgatattgagcgaataaaccgaaatatctagtggaaggcgcatcaagtatgcatccttgatactgcatgttcacagaaatgcttgtgcggcaggctgttccaaggctttaaactttatggtgctttacattcctaataaaccgaattgtgtatatgatgtttgggaaaatggtgatttttcaggtttcagctccctctcttgctcacgtttaatgtattatcagtgtaaattcatccgtgattggatttaaggcaaccaatttgttggtacgtagctctgttttcacagcgtgtgcccttcaaacttataactcttgggctccctcatatccagggtaagggtctgtttggtttgtggctaactgtgcgtctgtgccacactttgtctaaggttggtcgttcgaattgaagaactaaccttagacagaaaaattaggcaaagtgtagcaagttaggcagggaacattttaaataagatgagtggtcaaagtttatggtgtcatatatttaagaacggtg

SEQ ID NO: 79407 - DNA, 1547 bp, Zea Mays
gctaaacccaacagttgtcgtgtcgcatgccccgagccgactcgagctcagccaaacctaggtacggcaagatgctcggcggtctgtacggcgaccttccgccgccgtcgtcggcgggcgacgacgacaaagcctccacggcctccgtttggtccagcgccaccaagatggcgcctcccaccctccgcaagccgtccaccgccttcgccacacccccgtctattctccgcaaccagcacctgcgtccgcccaaagccgcccccacctccgtccccgctccctccgccgttgctgccgaacccgccgcggccacctccttccagcccgcgttcgtcgctgtccagcccaccgtgctggaggagtacgaccctgccaggcccaacgactacgaggactaccgtaaggacaagctccgacgcgccaacgaggctaagctgaacaaggagcttgagaggcggcgccgtgaggatcaagagccggagagggaacgcgagcagcgggagagggaagcccgcgagcgcgaggagaaggactaccagtccagggcctcttccctcaacatatccggggaggaggcgtggaagaggagggcagcgatgagcggtggcggtgctgctgctaggactccctcgtccccacctcacggggatggattcgccattgggagctcatcttctgctgggttgggtgtgggcgccggcggacagatgactgctgcccagcggatgatggccaagatggggtggaaagaaggtcaggggcttggcaagcaagagcaggggatcaccgcgcctcttgtggccaagaagaccgataggaggggaggagttattgttgatgagagcagttccaggccttcagaaaagaagtcgagatctgtcaactttgatgggcaaccaacacgagttttgctgctccgcaacatggttggtcctggcgaggttgacgacgagctggaagacgaggtggcatcggagtgtgccaggtacgggacggtgtcccgggtgctgatattcgagatcacacaggcatacttcccgtccgatgaggctgtaaggatattcatacagtttgagcgggcggaagaagcaaccaaggcaatggtcgatctgcaggggcggttctttggcgggcgcgtggtgcaggcaaccttctttgacgaggaaaggtttgcgaggaacgaactcgctccgatgccaggggaagtaccagggttcttcgactaaagccaaacgttttggtgtggtatcagtataatatcaggtgagaggtgggttgtggccttgtagttctttctgttaatcgaggatgaagtagagcatacagtcagacaatttgcatgctttctagtgctaggtgtagtgtactggaaatattgtggatataagatatgtttttttttttttgtgccgtgtctcctgctactgaactaccttctacgtatatacatgaaaaattttgtcctgattttcgatcttgtaatcacctaactgcgatatgacatctcagacgaaatccttattgttgacagaatagcattgctggaa

SEQ ID NO: 79408 - DNA, 1537 bp, Zea Mays
gctaaacccaacagttgtcgtgtcgcatgccccgagccgactcgagctcaggtacggcaagatgctcggcggtctgtacggcgaccttccgccgccgtcgtcggcgggcgacgacgacaaagcctccacggcctccgtttggtccagcgccaccaagatggcgcctcccaccctccgcaagccgtccaccgccttcgccacacccccgtctattctccgcaaccagcacctgcgtccgcccaaagccgcccccacctccgtccccgctccctccgccgttgctgccgaacccgccgcggccacctccttccagcccgcgttcgtcgctgtccagcccaccgtgctggaggagtacgaccctgccaggcccaacgactacgaggactaccgtaaggacaagctccgacgcgccaacgaggctaagctgaacaaggagcttgagaggcggcgccgtgaggatcaagagccggagagggaacgcgagcagcgggagagggaagcccgcgagcgcgaggagaaggactaccagtccagggcctcttccctcaacatatccggggaggaggcgtggaagaggagggcagcgatgagcggtggcggtgctgctgctaggactccctcgtccccacctcacggggatggattcgccattgggagctcatcttctgctgggttgggtgtgggcgccggcggacagatgactgctgcccagcggatgatggccaagatggggtggaaagaaggtcaggggcttggcaagcaagagcaggggatcaccgcgcctcttgtggccaagaagaccgataggaggggaggagttattgttgatgagagcagttccaggccttcagaaaagaagtcgagatctgtcaactttgatgggcaaccaacacgagttttgctgctccgcaacatggttggtcctggcgaggttgacgacgagctggaagacgaggtggcatcggagtgtgccaggtacgggacggtgtcccgggtgctgatattcgagatcacacaggcatacttcccgtccgatgaggctgtaaggatattcatacagtttgagcgggcggaagaagcaaccaaggcaatggtcgatctgcaggggcggttctttggcgggcgcgtggtgcaggcaaccttctttgacgaggaaaggtttgcgaggaacgaactcgctccgatgccaggggaagtaccagggttcttcgactaaagccaaacgttttggtgtggtatcagtataatatcaggtgagaggtgggttgtggccttgtagttctttctgttaatcgaggatgaagtagagcatacagtcagacaatttgcatgctttctagtgctaggtgtagtgtactggaaatattgtggatataagatatgtttttttttttttgtgccgtgtctcctgctactgaactaccttctacgtatatacatgaaaaattttgtcctgattttcgatcttgtaatcacctaactgcgatatgacatctcagacgaaatccttattgttgacagaatagcattgctggaa

SEQ ID NO: 79409 - DNA, 660 bp, Zea Mays
agttgtcgtgtcgcatgccccgagccgactcgagctcaggttggtcctggcgaggttgacgacgagctggaagacgaggtggcatcggagtgtgccaggtacgggacggtgtcccgggtgctgatattcgagatcacacaggcatacttcccgtccgatgaggctgtaaggatattcatacagtttgagcgggcggaagaagcaaccaaggcaatggtcgatctgcaggggcggttctttggcgggcgcgtggtgcaggcaaccttctttgacgaggaaaggtttgcgaggaacgaactcgctccgatgccaggggaagtaccagggttcttcgactaaagccaaacgttttggtgtggtatcagtataatatcaggtgagaggtgggttgtggccttgtagttctttctgttaatcgaggatgaagtagagcatacagtcagacaatttgcatgctttctagtgctaggtgtagtgtactggaaatattgtggatataagatatgtttttttttttttgtgccgtgtctcctgctactgaactaccttctacgtatatacatgaaaaattttgtcctgattttcgatcttgtaatcacctaactgcgatatgacatctcagacgaaatccttattgttgacagaatagcattgctggaa

SEQ ID NO: 79410 - DNA, 1582 bp, Zea Mays
gtcgcatgccccgagccgactcgagctcagattttaaatcggaccctcgtcttcttccccaaatcgcatctctctcacttgatcagccaaacctaggtacggcaagatgctcggcggtctgtacggcgaccttccgccgccgtcgtcggcgggcgacgacgacaaagcctccacggcctccgtttggtccagcgccaccaagatggcgcctcccaccctccgcaagccgtccaccgccttcgccacacccccgtctattctccgcaaccagcacctgcgtccgcccaaagccgcccccacctccgtccccgctccctccgccgttgctgccgaacccgccgcggccacctccttccagcccgcgttcgtcgctgtccagcccaccgtgctggaggagtacgaccctgccaggcccaacgactacgaggactaccgtaaggacaagctccgacgcgccaacgaggctaagctgaacaaggagcttgagaggcggcgccgtgaggatcaagagccggagagggaacgcgagcagcgggagagggaagcccgcgagcgcgaggagaaggactaccagtccagggcctcttccctcaacatatccggggaggaggcgtggaagaggagggcagcgatgagcggtggcggtgctgctgctaggactccctcgtccccacctcacggggatggattcgccattgggagctcatcttctgctgggttgggtgtgggcgccggcggacagatgactgctgcccagcggatgatggccaagatggggtggaaagaaggtcaggggcttggcaagcaagagcaggggatcaccgcgcctcttgtggccaagaagaccgataggaggggaggagttattgttgatgagagcagttccaggccttcagaaaagaagtcgagatctgtcaactttgatgggcaaccaacacgagttttgctgctccgcaacatggttggtcctggcgaggttgacgacgagctggaagacgaggtggcatcggagtgtgccaggtacgggacggtgtcccgggtgctgatattcgagatcacacaggcatacttcccgtccgatgaggctgtaaggatattcatacagtttgagcgggcggaagaagcaaccaaggcaatggtcgatctgcaggggcggttctttggcgggcgcgtggtgcaggcaaccttctttgacgaggaaaggtttgcgaggaacgaactcgctccgatgccaggggaagtaccagggttcttcgactaaagccaaacgttttggtgtggtatcagtataatatcaggtgagaggtgggttgtggccttgtagttctttctgttaatcgaggatgaagtagagcatacagtcagacaatttgcatgctttctagtgctaggtgtagtgtactggaaatattgtggatataagatatgtttttttttttttgtgccgtgtctcctgctactgaactaccttctacgtatatacatgaaaaattttgtcctgattttcgatcttgtaatcacctaactgcgatatgacatctcagacgaaatccttattgttgacagaatagcattgctggaa

SEQ ID NO: 79411 - DNA, 3633 bp, Zea Mays
cgcctagccctcccgccccgagagcgaccggcactaccgcactagcgctgagttgtgctgaacagccgcgcgtgcaagcgaataaacaacgccgcgacgagaagagagaagagggcgggcatcggccagtgggggctctgaggccgagggaggcgaggaaagcggcgggtgccgggccgcccgcgccggtgccgagccgcccgcgccggtgccgaggccctcaccagtcaccaccccctcccctcttccgtctgtcccccgcttgccgccaccgccgctgcccgctcgcgatccttcccctttttaacgctcccgcggccccgcgtcgtgctcccttttgtcgccgctgccttcgtgcccgtactcgcgggttctcctcgctcctcaatctccgcgcctgggcgcggcgttcgccgccggatctgggcgcgggacggtgccccggacggtcgatggcgcgggcggcgctccggttgggcgaccgcgcgctcgcgctcctcgtcctcgtgtcagtggctctgcttccacttgtcagttccgacgatggacacaaacactgcgagggtgttgtcaggggctgggcggattcctccacggggcgcgtgaaggacggggacaaactgagcctcaaggatttgctcttcttcctccacattcctaggactggaggccgcacctactttcactgcttcctaaaaaagctgtatacaaatgcgcaggaatgcccgcgttcttatgacaaactacggttcgacccaagccatcctgattgcaagctggttgttagtcatgatgactatagcttaacttccaagctgccaagggagagaacatctgttgtaacaatactaaggaacccagttgaccgtgtatttagcacatatgagttttcagttgaagttgcagctagattccttgttcacccaaacttaacttctgcaaagttaatgactacccgtgtgttaaaaaagtctcgtgctgtcagtactttggacatctggccttggaagtacttggttccttggatgagagaagatctgttttccaggagagatgccaggggtatcgacaaagttcatagtagtaagaaggttaatgcatatgatgtggaggatatggttatgccgttacatcagtacatcaatgatccagttgcccatgagatcattcataatggggctacctttcagattactgggttaacgaacaattcatactttgatggagcacatgaggttcgacattgtgccagaaagcatccagatcttggtcgtattgtgcttgaagttgctaagaataggctggaccagatgctgtatgtaggacttacagaggatcatgaagagtcagcgaggttgtttgctcatatggtaggagcacaggtgcttttacaatctgggacattgagtttggatctcaaggaagatctgcacagtgagactgactcacacccatccatggtggagcccggggatgaagaagcaagcgaacatctgaataacacacatggttggcaaaataatgaagccctgaactctaccagcgacgaacaaggaaaaggaaatatgactgtgggtaaactgatggaagcttatgaaacttgcatcgctaaactgcggaagtcccaatctagccgtcgtaaaatatcactaaagaaagtggaggaagcaaacttctcaaaagaggcacggaagctggtccccgaggcaattttgaaacaaattatctcgctgaacagccttgacatggaactttatgaccatgctaagaaaatctttacccaggaacatctgatgctgaaagctcagcaatccatggcggggcagcacagacagttggcggaacaagaggatcccagtgatgtccagagcgcgtcccatggctaaccatactaactgttgaagtacaatttagataaacgaagaactgtactcattgccattgccagggaggaggaaggaaacacgataggatatgagacgaaccgttctcgtactgcggtggaactgtggaaatgaagaactgtactcattgccagtagcaagcctcatgtcatgtgctttgcgttgtctctttcaggagggctggatcggcacgatgtgcagcgacgggacttgctctccctgggtggtggtcttgctgggtctagggatcaccacgatcctagttttggccacattagctgtaacgacgagaaaaagaacgtctaaacttaagattattcaaaatgggcaatcgattttcgcgccacctttccgtctgcatgttaggagatggtctcgccatgctttcgcttctggtggaggtgccttgcctgtgctcgtcgacattgaattgcaagggattcctgcgcacctttgggatttggagacagcagaacttttgcttggggctcacggattggttcaaggtctatccacagtttcttcagagggagtggattatgcagatatgactgttttcagtgtgagtttttggtgcttctcacctgaggctttgccggatgttctgtttctccacgccgttgagccgcgcgttaatgtggaggtcgagtcctggtttccgcgtaccatggtgttcaagattgcagtgaaggttattcgttctggcgacatgattggtgctgaccagccccctcctttgttgccggatttgggtggggatgatggtgatcgggataatcacaggcggaggccacatatgcactatcacccatctccttccgctagggtctctgcgctctctcggcttggtccgcgcgtctcctcggcggtgccgggtggtggtccagtcgatgccatctctcccctgatggtcggggtggagaggatggcgcctgggtccaccctgtcctctggctcggtgatttccttcccagttgatgcccattctttcccggttttggcggttgatgaggtggttgctcctggatctcctgactccactgcccaggacgtggaatgggatccagttgacgcccattctctccccttgatctcggttgatgggatggtggctcctggggttcttgttggcactgttgattgtgggcctgctgttcagctggggtcttcggttctatctatgccagctgcaccgtctggttctgatattcaggtgaatgatgtccttgcaggcagtgtgactgtgaatgctcagtttgggatttctgtgcaaagaaatatttggactgttgatcccttgaacagaatgtcttcgtttttgctcagtaagatgattcatggctggaaagatgcttctccctgcctcaaggtttattccaggagaaagaagcttgttatagagccagttcaggatgaggagtgtgtgctttcttcacaactgctggagttcaagaatgatgtcactggtctgattaatagtttgctgcctcctcctcgaactaccaatagaaggaggaggactgtgcctgctaatttcattcccaggcgtagcaggaggtgtggccaagtttcctccagaattgggttctagttctactgcccaggtctgtagacaattgggtttttgtgatgagatggagaacatctctcttgaagatgccaacggttatgcaaggttattcaaaaatggactctctggtagccatgttgctgcagttgctgcgctttt

SEQ ID NO: 79412 - DNA, 3516 bp, Zea Mays
gagagcgaccggcactaccgcactagcgctgagttgtgctgaacagccgcgcgtgcaagcgaataaacaacgccgcgacgagaagagagaagagggcgggcatcggccagtgggggctctgaggccgagggaggcgaggaaagcggcgggtgccgggccgcccgcgccggtgccgagccgcccgcgccggtgccgaggccctcaccagtcaccaccccctcccctcttccgtctgtcccccgcttgccgccaccgccgctgcccgctcgcgatccttcccctttttaacgctcccgcggccccgcgtcgtgctcccttttgtcgccgctgccttcgtgcccgtactcgcgggttctcctcgctcctcaatctccgcgcctgggcgcggcgttcgccgccggatctgggcgcgggacggtgccccggacggtcgatggcgcgggcggcgctccggttgggcgaccgcgcgctcgcgctcctcgtcctcgtgtcagtggctctgcttccacttgtcagttccgacgatggacacaaacactgcgagggtgttgtcaggggctgggcggattcctccacggggcgcgtgaaggacggggacaaactgagcctcaaggatttgctcttcttcctccacattcctaggactggaggccgcacctactttcactgcttcctaaaaaagctgtatacaaatgcgcaggaatgcccgcgttcttatgacaaactacggttcgacccaagccatcctgattgcaagctggttgttagtcatgatgactatagcttaacttccaagctgccaagggagagaacatctgttgtaacaatactaaggaacccagttgaccgtgtatttagcacatatgagttttcagttgaagttgcagctagattccttgttcacccaaacttaacttctgcaaagttaatgactacccgtgtgttaaaaaagtctcgtgctgtcagtactttggacatctggccttggaagtacttggttccttggatgagagaagatctgttttccaggagagatgccaggggtatcgacaaagttcatagtagtaagaaggttaatgcatatgatgtggaggatatggttatgccgttacatcagtacatcaatgatccagttgcccatgagatcattcataatggggctacctttcagattactgggttaacgaacaattcatactttgatggagcacatgaggttcgacattgtgccagaaagcatccagatcttggtcgtattgtgcttgaagttgctaagaataggctggaccagatgctgtatgtaggacttacagaggatcatgaagagtcagcgaggttgtttgctcatatggtaggagcacaggtgcttttacaatctgggacattgagtttggatctcaaggaagatctgcacagtgagactgactcacacccatccatggtggagcccggggatgaagaagcaagcgaacatctgaataacacacatggttggcaaaataatgaagccctgaactctaccagcgacgaacaaggaaaaggaaatatgactgtgggtaaactgatggaagcttatgaaacttgcatcgctaaactgcggaagtcccaatctagccgtcgtaaaatatcactaaagaaagtggaggaagcaaacttctcaaaagaggcacggaagctggtccccgaggcaattttgaaacaaattatctcgctgaacagccttgacatggaactttatgaccatgctaagaaaatctttacccaggaacatctgatgctgaaagctcagcaatccatggcggggcagcacagacagttggcggaacaagagggaggaggaaggaaacacgataggatatgagacgaaccgttctcgtactgcggtggaactgtggaaatgaagaactgtactcattgccagtagcaagcctcatgtcatgtgctttgcgttgtctctttcaggagggctggatcggcacgatgtgcagcgacgggacttgctctccctgggtggtggtcttgctgggtctagggatcaccacgatcctagttttggccacattagctgtaacgacgagaaaaagaacgtctaaacttaagattattcaaaatgggcaatcgattttcgcgccacctttccgtctgcatgttaggagatggtctcgccatgctttcgcttctggtggaggtgccttgcctgtgctcgtcgacattgaattgcaagggattcctgcgcacctttgggatttggagacagcagaacttttgcttggggctcacggattggttcaaggtctatccacagtttcttcagagggagtggattatgcagatatgactgttttcagtgtgagtttttggtgcttctcacctgaggctttgccggatgttctgtttctccacgccgttgagccgcgcgttaatgtggaggtcgagtcctggtttccgcgtaccatggtgttcaagattgcagtgaaggttattcgttctggcgacatgattggtgctgaccagccccctcctttgttgccggatttgggtggggatgatggtgatcgggataatcacaggcggaggccacatatgcactatcacccatctccttccgctagggtctctgcgctctctcggcttggtccgcgcgtctcctcggcggtgccgggtggtggtccagtcgatgccatctctcccctgatggtcggggtggagaggatggcgcctgggtccaccctgtcctctggctcggtgatttccttcccagttgatgcccattctttcccggttttggcggttgatgaggtggttgctcctggatctcctgactccactgcccaggacgtggaatgggatccagttgacgcccattctctccccttgatctcggttgatgggatggtggctcctggggttcttgttggcactgttgattgtgggcctgctgttcagctggggtcttcggttctatctatgccagctgcaccgtctggttctgatattcaggtgaatgatgtccttgcaggcagtgtgactgtgaatgctcagtttgggatttctgtgcaaagaaatatttggactgttgatcccttgaacagaatgtcttcgtttttgctcagtaagatgattcatggctggaaagatgcttctccctgcctcaaggtttattccaggagaaagaagcttgttatagagccagttcaggatgaggagtgtgtgctttcttcacaactgctggagttcaagaatgatgtcactggtctgattaatagtttgctgcctcctcctcgaactaccaatagaaggaggaggactgtgcctgctaatttcattcccaggcgtagcaggaggtgtggccaagtttcctccagaattgggttctagttctactgcccaggtctgtagacaattgggtttttgtgatgagatggagaacatctctcttgaagatgccaacggttatgcaaggttattcaaaaatggactctctggtagccatgttgctgcagttgctgcgctttt

SEQ ID NO: 79413 - DNA, 2099 bp, Zea Mays
ggcgggcatcggccagtgggggctctgaggccgagggaggcgaggaaagcggcgggtgccgggccgcccgcgccggtgccgagccgcccgcgccggtgccgaggccctcaccagtcaccaccccctcccctcttccgtctgtcccccgcttgccgccaccgccgctgcccgctcgcgatccttcccctttttaacgctcccgcggccccgcgtcgtgctcccttttgtcgccgctgccttcgtgcccgtactcgcgggttctcctcgctcctcaatctccgcgcctgggcgcggcgttcgccgccggatctgggcgcgggacggtgccccggacggtcgatggcgcgggcggcgctccggttgggcgaccgcgcgctcgcgctcctcgtcctcgtgtcagtggctctgcttccacttgtcagttccgacgatggacacaaacactgcgagggtgttgtcaggggctgggcggattcctccacggggcgcgtgaaggacggggacaaactgagcctcaaggatttgctcttcttcctccacattcctaggactggaggccgcacctactttcactgcttcctaaaaaagctgtatacaaatgcgcaggaatgcccgcgttcttatgacaaactacggttcgacccaagccatcctgattgcaagctggttgttagtcatgatgactatagcttaacttccaagctgccaagggagagaacatctgttgtaacaatactaaggaacccagttgaccgtgtatttagcacatatgagttttcagttgaagttgcagctagattccttgttcacccaaacttaacttctgcaaagttaatgactacccgtgtgttaaaaaagtctcgtgctgtcagtactttggacatctggccttggaagtacttggttccttggatgagagaagatctgttttccaggagagatgccaggggtatcgacaaagttcatagtagtaagaaggttaatgcatatgatgtggaggatatggttatgccgttacatcagtacatcaatgatccagttgcccatgagatcattcataatggggctacctttcagattactgggttaacgaacaattcatactttgatggagcacatgaggttcgacattgtgccagaaagcatccagatcttggtcgtattgtgcttgaagttgctaagaataggctggaccagatgctgtatgtaggacttacagaggatcatgaagagtcagcgaggttgtttgctcatatggtaggagcacaggtgcttttacaatctgggacattgagtttggatctcaaggaagatctgcacagtgagactgactcacacccatccatggtggagcccggggatgaagaagcaagcgaacatctgaataacacacatggttggcaaaataatgaagccctgaactctaccagcgacgaacaaggaaaaggaaatatgactgtgggtaaactgatggaagcttatgaaacttgcatcgctaaactgcggaagtcccaatctagccgtcgtaaaatatcactaaagaaagtggaggaagcaaacttctcaaaagaggcacggaagctggtccccgaggcaattttgaaacaaattatctcgctgaacagccttgacatggaactttatgaccatgctaagaaaatctttacccaggaacatctgatgctgaaagctcagcaatccatggcggggcagcacagacagttggcggaacaagaggagggctggatcggcacgatgtgcagcgacgggacttgctctccctgggtggtggtcttgctgggtctagggatcaccacgatcctagttttggccacattagctgtaacgacgagaaaaagaacgtctaaacttaaggtttaaccagaacttttcatgagacaggtctctagattttggtgtacagtctgatgaatgccccttagcaatctttcggggcagaggtgctagcgtgcgcagaatcatcatgtactaactcgtgcggtcgtactggtatcttcacacaatttgagatgccgcggtggtagtgtggacgtgtagtctaaattgccactccataagaaaaaagcagcgacgttgtg

SEQ ID NO: 79414 - DNA, 2092 bp, Zea Mays
cgggcatcggccagtgggggctctgaggccgagggaggcgaggaaagcggcgggtgccgggccgcccgcgccggtgccgagccgcccgcgccggtgccgaggccctcaccagtcaccaccccctcccctcttccgtctgtcccccgcttgccgccaccgccgctgcccgctcgcgatccttcccctttttaacgctcccgcggccccgcgtcgtgctcccttttgtcgccgctgccttcgtgcccgtactcgcgggttctcctcgctcctcaatctccgcgcctgggcgcggcgttcgccgccggatctgggcgcgggacggtgccccggacggtcgatggcgcgggcggcgctccggttgggcgaccgcgcgctcgcgctcctcgtcctcgtgtcagtggctctgcttccacttgtcagttccgacgatggacacaaacactgcgagggtgttgtcaggggctgggcggattcctccacggggcgcgtgaaggacggggacaaactgagcctcaaggatttgctcttcttcctccacattcctaggactggaggccgcacctactttcactgcttcctaaaaaagctgtatacaaatgcgcaggaatgcccgcgttcttatgacaaactacggttcgacccaagccatcctgattgcaagctggttgttagtcatgatgactatagcttaacttccaagctgccaagggagagaacatctgttgtaacaatactaaggaacccagttgaccgtgtatttagcacatatgagttttcagttgaagttgcagctagattccttgttcacccaaacttaacttctgcaaagttaatgactacccgtgtgttaaaaaagtctcgtgctgtcagtactttggacatctggccttggaagtacttggttccttggatgagagaagatctgttttccaggagagatgccaggggtatcgacaaagttcatagtagtaagaaggttaatgcatatgatgtggaggatatggttatgccgttacatcagtacatcaatgatccagttgcccatgagatcattcataatggggctacctttcagattactgggttaacgaacaattcatactttgatggagcacatgaggttcgacattgtgccagaaagcatccagatcttggtcgtattgtgcttgaagttgctaaggctggaccagatgctgtatgtaggacttacagaggatcatgaagagtcagcgaggttgtttgctcatatggtaggagcacaggtgcttttacaatctgggacattgagtttggatctcaaggaagatctgcacagtgagactgactcacacccatccatggtggagcccggggatgaagaagcaagcgaacatctgaataacacacatggttggcaaaataatgaagccctgaactctaccagcgacgaacaaggaaaaggaaatatgactgtgggtaaactgatggaagcttatgaaacttgcatcgctaaactgcggaagtcccaatctagccgtcgtaaaatatcactaaagaaagtggaggaagcaaacttctcaaaagaggcacggaagctggtccccgaggcaattttgaaacaaattatctcgctgaacagccttgacatggaactttatgaccatgctaagaaaatctttacccaggaacatctgatgctgaaagctcagcaatccatggcggggcagcacagacagttggcggaacaagaggagggctggatcggcacgatgtgcagcgacgggacttgctctccctgggtggtggtcttgctgggtctagggatcaccacgatcctagttttggccacattagctgtaacgacgagaaaaagaacgtctaaacttaaggtttaaccagaacttttcatgagacaggtctctagattttggtgtacagtctgatgaatgccccttagcaatctttcggggcagaggtgctagcgtgcgcagaatcatcatgtactaactcgtgcggtcgtactggtatcttcacacaatttgagatgccgcggtggtagtgtggacgtgtagtctaaattgccactccataagaaaaaagcagcgacgttgtg

SEQ ID NO: 79415 - DNA, 1776 bp, Zea Mays
atcggccagtgggggctctgaggccgagggaggcgaggaaagcggcgggtgccgggccgcccgcgccggtgccgagccgcccgcgccggtgccgaggccctcaccagtcaccaccccctcccctcttccgtctgtcccccgcttgccgccaccgccgctgcccgctcgcgatccttcccctttttaacgctcccgcggccccgcgtcgtgctcccttttgtcgccgctgccttcgtgcccgtactcgcgggttctcctcgctcctcaatctccgcgcctgggcgcggcgttcgccgccggatctgggcgcgggacggtgccccggacggtcgatggcgcgggcggcgctccggttgggcgaccgcgcgctcgcgctcctcgtcctcgtgtcagtggctctgcttccacttgtcagttccgacgatggacacaaacactgcgagggtgttgtcaggggctgggcggattcctccacggggcgcgtgaaggacggggacaaactgagcctcaaggatttgctcttcttcctccacattcctaggactggaggccgcacctactttcactgcttcctaaaaaagctgtatacaaatgcgcaggaatgcccgcgttcttatgacaaactacggttcgacccaagccatcctgattgcaagctggttgttagtcatgatgactatagcttaacttccaagctgccaagggagagaacatctgttgtaacaatactaaggaacccagttgaccgtgtatttagcacatatgagttttcagttgaagttgcagctagattccttgttcacccaaacttaacttctgcaaagttaatgactacccgtgtgttaaaaaagtctcgtgctgtcagtactttggacatctggccttggaagtacttggttccttggatgagagaagatctgttttccaggagagatgccaggggtatcgacaaagttcatagtagtaagaaggttaatgcatatgatgtggaggatatggttatgccgttacatcagtacatcaatgatccagttgcccatgagatcattcataatggggctacctttcagattactgggttaacgaacaattcatactttgatggagcacatgaggttcgacattgtgccagaaagcatccagatcttggtcgtattgtgcttgaagttgctaagaataggctggaccagatgctgtatgtaggacttacagaggatcatgaagagtcagcgaggttgtttgctcatatggtaggagcacaggtgcttttacaatctgggacattgagtttggatctcaaggaagatctgcacagtgagactggatttgatttatttggtgatggagtatgtgcactccctgatcaaaatgaatactcacacccatccatggtggagcccggggatgaagaagcaagcgaacatctgatgactgtgggtaaactgatggaagcttatgaaacttgcatcgctaaactgcggaagtcccaatctagccgtcgtaaaatatcactaaagaaagtggaggaagcaaacttctcaaaagaggcacggaagctggtccccgaggcaattttgaaacaaattatctcgctgaacagccttgacatggaactttatgaccatgctaagaaaatctttacccaggaacatctgatgctgaaagctcagcaatccatggcggggcagcacagacagttggcggaacaagaggatcccagtgatgtccagagcgcgtcccatggctaaccatactaactgttgaagtacaatttag

SEQ ID NO: 79416 - DNA, 3556 bp, Zea Mays
gtgggggctctgaggccgagggaggcgaggaaagcggcgggtgccgggccgcccgcgccggtgccgagccgcccgcgccggtgccgaggccctcaccagtcaccaccccctcccctcttccgtctgtcccccgcttgccgccaccgccgctgcccgctcgcgatccttcccctttttaacgctcccgcggccccgcgtcgtgctcccttttgtcgccgctgccttcgtgcccgtactcgcgggttctcctcgctcctcaatctccgcgcctgggcgcggcgttcgccgccggatctgggcgcgggacggtgccccggacggtcgatggcgcgggcggcgctccggttgggcgaccgcgcgctcgcgctcctcgtcctcgtgtcagtggctctgcttccacttgtcagttccgacgatggacacaaacactgcgagggtgttgtcaggggctgggcggattcctccacggggcgcgtgaaggacggggacaaactgagcctcaaggatttgctcttcttcctccacattcctaggactggaggccgcacctactttcactgcttcctaaaaaagctgtatacaaatgcgcaggaatgcccgcgttcttatgacaaactacggttcgacccaagccatcctgattgcaagctggttgttagtcatgatgactatagcttaacttccaagctgccaagggagagaacatctgttgtaacaatactaaggaacccagttgaccgtgtatttagcacatatgagttttcagttgaagttgcagctagattccttgttcacccaaacttaacttctgcaaagttaatgactacccgtgtgttaaaaaagtctcgtgctgtcagtactttggacatctggccttggaagtacttggttccttggatgagagaagatctgttttccaggagagatgccaggggtatcgacaaagttcatagtagtaagaaggttaatgcatatgatgtggaggatatggttatgccgttacatcagtacatcaatgatccagttgcccatgagatcattcataatggggctacctttcagattactgggttaacgaacaattcatactttgatggagcacatgaggttcgacattgtgccagaaagcatccagatcttggtcgtattgtgcttgaagttgctaagaataggctggaccagatgctgtatgtaggacttacagaggatcatgaagagtcagcgaggttgtttgctcatatggtaggagcacaggtgcttttacaatctgggacattgagtttggatctcaaggaagatctgcacagtgagactggatttgatttatttggtgatggagtatgtgcactccctgatcaaaatgaatactcacacccatccatggtggagcccggggatgaagaagcaagcgaacatctgaataacacacatggttggcaaaataatgaagccctgaactctaccagcgacgaacaaggaaaaggaaatatgactgtgggtaaactgatggaagcttatgaaacttgcatcgctaaactgcggaagtcccaatctagccgtcgtaaaatatcactaaagaaagtggaggaagcaaacttctcaaaagaggcacggaagctggtccccgaggcaattttgaaacaaattatctcgctgaacagccttgacatggaactttatgaccatgctaagaaaatctttacccaggaacatctgatgctgaaagctcagcaatccatggcggggcagcacagacagttggcggaacaagaggatcccagtgatgtccagagcgcgtcccatggctaaccatactaactgttgaagtacaatttagataaacgaagaactgtactcattgccattgccagggaggaggaaggaaacacgataggatatgagacgaaccgttctcgtactgcggtggaactgtggaaatgaagaactgtactcattgccagtagcaagcctcatgtcatgtgctttgcgttgtctctttcaggagggctggatcggcacgatgtgcagcgacgggacttgctctccctgggtggtggtcttgctgggtctagggatcaccacgatcctagttttggccacattagctgtaacgacgagaaaaagaacgtctaaacttaagattattcaaaatgggcaatcgattttcgcgccacctttccgtctgcatgttaggagatggtctcgccatgctttcgcttctggtggaggtgccttgcctgtgctcgtcgacattgaattgcaagggattcctgcgcacctttgggatttggagacagcagaacttttgcttggggctcacggattggttcaaggtctatccacagtttcttcagagggagtggattatgcagatatgactgttttcagtgtgagtttttggtgcttctcacctgaggctttgccggatgttctgtttctccacgccgttgagccgcgcgttaatgtggaggtcgagtcctggtttccgcgtaccatggtgttcaagattgcagtgaaggttattcgttctggcgacatgattggtgctgaccagccccctcctttgttgccggatttgggtggggatgatggtgatcgggataatcacaggcggaggccacatatgcactatcacccatctccttccgctagggtctctgcgctctctcggcttggtccgcgcgtctcctcggcggtgccgggtggtggtccagtcgatgccatctctcccctgatggtcggggtggagaggatggcgcctgggtccaccctgtcctctggctcggtgatttccttcccagttgatgcccattctttcccggttttggcggttgatgaggtggttgctcctggatctcctgactccactgcccaggacgtggaatgggatccagttgacgcccattctctccccttgatctcggttgatgggatggtggctcctggggttcttgttggcactgttgattgtgggcctgctgttcagctggggtcttcggttctatctatgccagctgcaccgtctggttctgatattcaggtgaatgatgtccttgcaggcagtgtgactgtgaatgctcagtttgggatttctgtgcaaagaaatatttggactgttgatcccttgaacagaatgtcttcgtttttgctcagtaagatgattcatggctggaaagatgcttctccctgcctcaaggtttattccaggagaaagaagcttgttatagagccagttcaggatgaggagtgtgtgctttcttcacaactgctggagttcaagaatgatgtcactggtctgattaatagtttgctgcctcctcctcgaactaccaatagaaggaggaggactgtgcctgctaatttcattcccaggcgtagcaggaggtgtggccaagtttcctccagaattgggttctagttctactgcccaggtctgtagacaattgggtttttgtgatgagatggagaacatctctcttgaagatgccaacggttatgcaaggttattcaaaaatggactctctggtagccatgttgctgcagttgctgcgctttt

SEQ ID NO: 79417 - DNA, 2132 bp, Zea Mays
ggggctctgaggccgagggaggcgaggaaagcggcgggtgccgggccgcccgcgccggtgccgagccgcccgcgccggtgccgaggccctcaccagtcaccaccccctcccctcttccgtctgtcccccgcttgccgccaccgccgctgcccgctcgcgatccttcccctttttaacgctcccgcggccccgcgtcgtgctcccttttgtcgccgctgccttcgtgcccgtactcgcgggttctcctcgctcctcaatctccgcgcctgggcgcggcgttcgccgccggatctgggcgcgggacggtgccccggacggtcgatggcgcgggcggcgctccggttgggcgaccgcgcgctcgcgctcctcgtcctcgtgtcagtggctctgcttccacttgtcagttccgacgatggacacaaacactgcgagggtgttgtcaggggctgggcggattcctccacggggcgcgtgaaggacggggacaaactgagcctcaaggatttgctcttcttcctccacattcctaggactggaggccgcacctactttcactgcttcctaaaaaagctgtatacaaatgcgcaggaatgcccgcgttcttatgacaaactacggttcgacccaagccatcctgattgcaagctggttgttagtcatgatgactatagcttaacttccaagctgccaagggagagaacatctgttgtaacaatactaaggaacccagttgaccgtgtatttagcacatatgagttttcagttgaagttgcagctagattccttgttcacccaaacttaacttctgcaaagttaatgactacccgtgtgttaaaaaagtctcgtgctgtcagtactttggacatctggccttggaagtacttggttccttggatgagagaagatctgttttccaggagagatgccaggggtatcgacaaagttcatagtagtaagaaggttaatgcatatgatgtggaggatatggttatgccgttacatcagtacatcaatgatccagttgcccatgagatcattcataatggggctacctttcagattactgggttaacgaacaattcatactttgatggagcacatgaggttcgacattgtgccagaaagcatccagatcttggtcgtattgtgcttgaagttgctaagaataggctggaccagatgctgtatgtaggacttacagaggatcatgaagagtcagcgaggttgtttgctcatatggtaggagcacaggtgcttttacaatctgggacattgagtttggatctcaaggaagatctgcacagtgagactggatttgatttatttggtgatggagtatgtgcactccctgatcaaaatgaatactcacacccatccatggtggagcccggggatgaagaagcaagcgaacatctgaataacacacatggttggcaaaataatgaagccctgaactctaccagcgacgaacaaggaaaaggaaatatgactgtgggtaaactgatggaagcttatgaaacttgcatcgctaaactgcggaagtcccaatctagccgtcgtaaaatatcactaaagaaagtggaggaagcaaacttctcaaaagaggcacggaagctggtccccgaggcaattttgaaacaaattatctcgctgaacagccttgacatggaactttatgaccatgctaagaaaatctttacccaggaacatctgatgctgaaagctcagcaatccatggcggggcagcacagacagttggcggaacaagaggagggctggatcggcacgatgtgcagcgacgggacttgctctccctgggtggtggtcttgctgggtctagggatcaccacgatcctagttttggccacattagctgtaacgacgagaaaaagaacgtctaaacttaaggtttaaccagaacttttcatgagacaggtctctagattttggtgtacagtctgatgaatgccccttagcaatctttcggggcagaggtgctagcgtgcgcagaatcatcatgtactaactcgtgcggtcgtactggtatcttcacacaatttgagatgccgcggtggtagtgtggacgtgtagtctaaattgccactccataagaaaaaagcagcgacgttgtg

SEQ ID NO: 79418 - DNA, 1541 bp, Zea Mays
ggaaagcggcgggtgccgggccgcccgcgccggtgccgagccgcccgcgccggtgccgaggccctcaccagtcaccaccccctcccctcttccgtctgtcccccgcttgccgccaccgccgctgcccgctcgcgatccttcccctttttaacgctcccgcggccccgcgtcgtgctcccttttgtcgccgctgccttcgtgcccgtactcgcgggttctcctcgctcctcaatctccgcgcctgggcgcggcgttcgccgccggatctgggcgcgggacggtgccccggacggtcgatggcgcgggcggcgctccggttgggcgaccgcgcgctcgcgctcctcgtcctcgtgtcagtggctctgcttccacttgtcagttccgacgatggacacaaacactgcgagggtgttgtcaggggctgggcggattcctccacggggcgcgtgaaggacggggacaaactgagcctcaaggatttgctcttcttcctccacattcctaggactggaggccgcacctactttcactgcttcctaaaaaagctgtatacaaatgcgcaggaatgcccgcgttcttatgacaaactacggttcgacccaagccatcctgattgcaagctggttgttagtcatgatgactatagcttaacttccaagctgccaagggagagaacatctgttgtaacaatactaaggaacccagttgaccgtgtatttagcacatatgagttttcagttgaagttgcagctagattccttgttcacccaaacttaacttctgcaaagttaatgactacccgtgtgttaaaaaagtctcgtgctgtcagtactttggacatctggccttggaagtacttggttccttggatgagagaagatctgttttccaggagagatgccaggggtatcgacaaagttcatagtagtaagaaggttaatgcatatgatgtggaggatatggttatgccgttacatcagtacatcaatgatccagttgcccatgagatcattcataatggggctacctttcagattactgggttaacgaacaattcatactttgatggagcacatgaggttcgacattgtgccagaaagcatccagatcttggtcgtattgtgcttgaagttgctaagaataggctggaccagatgctgtatgtaggacttacagaggatcatgaagagtcagcgaggttgtttgctcatatggtaggagcacaggtgcttttacaatctgggacattgagtttggatctcaaggaagatctgcacagtgagactgactcacacccatccatggtggagcccggggatgaagaagcaagcgaacatctgaataacacacatggttggcaaaataatgaagccctgaactctaccagcgacgaacaaggaaaaggaaatatgactgtgggtaaactgatggaagcttatgaaacttgcatcgctaaactgcggaagtcccaatctagccgtcgtaaaatatcactaaagaaagtggaggaagcaaacttctcaaaagagttctgtttgcag

SEQ ID NO: 79419 - DNA, 1709 bp, Zea Mays
ggaaagcggcgggtgccgggccgcccgcgccggtgccgagccgcccgcgccggtgccgaggccctcaccagtcaccaccccctcccctcttccgtctgtcccccgcttgccgccaccgccgctgcccgctcgcgatccttcccctttttaacgctcccgcggccccgcgtcgtgctcccttttgtcgccgctgccttcgtgcccgtactcgcgggttctcctcgctcctcaatctccgcgcctgggcgcggcgttcgccgccggatctgggcgcgggacggtgccccggacggtcgatggcgcgggcggcgctccggttgggcgaccgcgcgctcgcgctcctcgtcctcgtgtcagtggctctgcttccacttgtcagttccgacgatggacacaaacactgcgagggtgttgtcaggggctgggcggattcctccacggggcgcgtgaaggacggggacaaactgagcctcaaggatttgctcttcttcctccacattcctaggactggaggccgcacctactttcactggaatgcccgcgttcttatgacaaactacggttcgacccaagccatcctgattgcaagctggttgttagtcatgatgactatagcttaacttccaagctgccaagggagagaacatctgttgtaacaatactaaggaacccagttgaccgtgtatttagcacatatgagttttcagttgaagttgcagctagattccttgttcacccaaacttaacttctgcaaagttaatgactacccgtgtgttaaaaaagtctcgtgctgtcagtactttggacatctggccttggaagtacttggttccttggatgagagaagatctgttttccaggagagatgccaggggtatcgacaaagttcatagtagtaagaaggttaatgcatatgatgtggaggatatggttatgccgttacatcagtacatcaatgatccagttgcccatgagatcattcataatggggctacctttcagattactgggttaacgaacaattcatactttgatggagcacatgaggttcgacattgtgccagaaagcatccagatcttggtcgtattgtgcttgaagttgctaagaataggctggaccagatgctgtatgtaggacttacagaggatcatgaagagtcagcgaggttgtttgctcatatggtaggagcacaggtgcttttacaatctgggacattgagtttggatctcaaggaagatctgcacagtgagactggatttgatttatttggtgatggagtatgtgcactccctgatcaaaatgaatactcacacccatccatggtggagcccggggatgaagaagcaagcgaacatctgatgactgtgggtaaactgatggaagcttatgaaacttgcatcgctaaactgcggaagtcccaatctagccgtcgtaaaatatcactaaagaaagtggaggaagcaaacttctcaaaagaggcacggaagctggtccccgaggcaattttgaaacaaattatctcgctgaacagccttgacatggaactttatgaccatgctaagaaaatctttacccaggaacatctgatgctgaaagctcagcaatccatggcggggcagcacagacagttggcggaacaagaggatcccagtgatgtccagagcgcgtcccatggctaaccatactaactgttgaagtacaatttag

SEQ ID NO: 79420 - DNA, 1651 bp, Zea Mays
ggaaagcggcgggtgccgggccgcccgcgccggtgccgagccgcccgcgccggtgccgaggccctcaccagtcaccaccccctcccctcttccgtctgtcccccgcttgccgccaccgccgctgcccgctcgcgatccttcccctttttaacgctcccgcggccccgcgtcgtgctcccttttgtcgccgctgccttcgtgcccgtactcgcgggttctcctcgctcctcaatctccgcgcctgggcgcggcgttcgccgccggatctgggcgcgggacggtgccccggacggtcgatggcgcgggcggcgctccggttgggcgaccgcgcgctcgcgctcctcgtcctcgtgtcagtggctctgcttccacttgtcagttccgacgatggacacaaacactgcgagggtgttgtcaggggctgggcggattcctccacggggcgcgtgaaggacggggacaaactgagcctcaaggatttgctcttcttcctccacattcctaggactggaggccgcacctactttcactggaatgcccgcgttcttatgacaaactacggttcgacccaagccatcctgattgcaagctggttgttagtcatgatgactatagcttaacttccaagctgccaagggagagaacatctgttgtaacaatactaaggaacccagttgaccgtgtatttagcacatatgagttttcagttgaagttgcagctagattccttgttcacccaaacttaacttctgcaaagttaatgactacccgtgtgttaaaaaagtctcgtgctgtcagtactttggacatctggccttggaagtacttggttccttggatgagagaagatctgttttccaggagagatgccaggggtatcgacaaagttcatagtagtaagaaggttaatgcatatgatgtggaggatatggttatgccgttacatcagtacatcaatgatccagttgcccatgagatcattcataatggggctacctttcagattactgggttaacgaacaattcatactttgatggagcacatgaggttcgacattgtgccagaaagcatccagatcttggtcgtattgtgcttgaagttgctaagaataggctggaccagatgctgtatgtaggacttacagaggatcatgaagagtcagcgaggttgtttgctcatatggtaggagcacaggtgcttttacaatctgggacattgagtttggatctcaaggaagatctgcacagtgagactgactcacacccatccatggtggagcccggggatgaagaagcaagcgaacatctgatgactgtgggtaaactgatggaagcttatgaaacttgcatcgctaaactgcggaagtcccaatctagccgtcgtaaaatatcactaaagaaagtggaggaagcaaacttctcaaaagaggcacggaagctggtccccgaggcaattttgaaacaaattatctcgctgaacagccttgacatggaactttatgaccatgctaagaaaatctttacccaggaacatctgatgctgaaagctcagcaatccatggcggggcagcacagacagttggcggaacaagagggaggaggaaggaaacacgataggatatgagacgaaccgttctcgtactgcggtgga

SEQ ID NO: 79421 - DNA, 1987 bp, Zea Mays
ggaaagcggcgggtgccgggccgcccgcgccggtgccgagccgcccgcgccggtgccgaggccctcaccagtcaccaccccctcccctcttccgtctgtcccccgcttgccgccaccgccgctgcccgctcgcgatccttcccctttttaacgctcccgcggccccgcgtcgtgctcccttttgtcgccgctgccttcgtgcccgtactcgcgggttctcctcgctcctcaatctccgcgcctgggcgcggcgttcgccgccggatctgggcgcgggacggtgccccggacggtcgatggcgcgggcggcgctccggttgggcgaccgcgcgctcgcgctcctcgtcctcgtgtcagtggctctgcttccacttgtcagttccgacgatggacacaaacactgcgagggtgttgtcaggggctgggcggattcctccacggggcgcgtgaaggacggggacaaactgagcctcaaggatttgctcttcttcctccacattcctaggactggaggccgcacctactttcactgcttcctaaaaaagctgtatacaaatgcgcaggaatgcccgcgttcttatgacaaactacggttcgacccaagccatcctgattgcaagctggttgttagtcatgatgactatagcttaacttccaagctgccaagggagagaacatctgttgtaacaatactaaggaacccagttgaccgtgtatttagcacatatgagttttcagttgaagttgcagctagattccttgttcacccaaacttaacttctgcaaagttaatgactacccgtgtgttaaaaaagtctcgtgctgtcagtactttggacatctggccttggaagtacttggttccttggatgagagaagatctgttttccaggagagatgccaggggtatcgacaaagttcatagtagtaagaaggttaatgcatatgatgtggaggatatggttatgccgttacatcagtacatcaatgatccagttgcccatgagatcattcataatggggctacctttcagattactgggttaacgaacaattcatactttgatggagcacatgaggttcgacattgtgccagaaagcatccagatcttggtcgtattgtgcttgaagttgctaagaataggctggaccagatgctgtatgtaggacttacagaggatcatgaagagtcagcgaggttgtttgctcatatggtaggagcacaggtgcttttacaatctgggacattgagtttggatctcaaggaagatctgcacagtgagactgactcacacccatccatggtggagcccggggatgaagaagcaagcgaacatctgatgactgtgggtaaactgatggaagcttatgaaacttgcatcgctaaactgcggaagtcccaatctagccgtcgtaaaatatcactaaagaaagtggaggaagcaaacttctcaaaagaggcacggaagctggtccccgaggcaattttgaaacaaattatctcgctgaacagccttgacatggaactttatgaccatgctaagaaaatctttacccaggaacatctgatgctgaaagctcagcaatccatggcggggcagcacagacagttggcggaacaagaggagggctggatcggcacgatgtgcagcgacgggacttgctctccctgggtggtggtcttgctgggtctagggatcaccacgatcctagttttggccacattagctgtaacgacgagaaaaagaacgtctaaacttaaggtttaaccagaacttttcatgagacaggtctctagattttggtgtacagtctgatgaatgccccttagcaatctttcggggcagaggtgctagcgtgcgcagaatcatcatgtactaactcgtgcggtcgtactggtatcttcacacaatttgagatgccgcggtggtagtgtggacgtgtagtctaaattgccactccataagaaaaaagcagcgacgttgtg

SEQ ID NO: 79422 - DNA, 1760 bp, Zea Mays
ggaaagcggcgggtgccgggccgcccgcgccggtgccgagccgcccgcgccggtgccgaggccctcaccagtcaccaccccctcccctcttccgtctgtcccccgcttgccgccaccgccgctgcccgctcgcgatccttcccctttttaacgctcccgcggccccgcgtcgtgctcccttttgtcgccgctgccttcgtgcccgtactcgcgggttctcctcgctcctcaatctccgcgcctgggcgcggcgttcgccgccggatctgggcgcgggacggtgccccggacggtcgatggcgcgggcggcgctccggttgggcgaccgcgcgctcgcgctcctcgtcctcgtgtcagtggctctgcttccacttgtcagttccgacgatggacacaaacactgcgagggtgttgtcaggggctgggcggattcctccacggggcgcgtgaaggacggggacaaactgagcctcaaggatttgctcttcttcctccacattcctaggactggaggccgcacctactttcactgcttcctaaaaaagctgtatacaaatgcgcaggaatgcccgcgttcttatgacaaactacggttcgacccaagccatcctgattgcaagctggttgttagtcatgatgactatagcttaacttccaagctgccaagggagagaacatctgttgtaacaatactaaggaacccagttgaccgtgtatttagcacatatgagttttcagttgaagttgcagctagattccttgttcacccaaacttaacttctgcaaagttaatgactacccgtgtgttaaaaaagtctcgtgctgtcagtactttggacatctggccttggaagtacttggttccttggatgagagaagatctgttttccaggagagatgccaggggtatcgacaaagttcatagtagtaagaaggttaatgcatatgatgtggaggatatggttatgccgttacatcagtacatcaatgatccagttgcccatgagatcattcataatggggctacctttcagattactgggttaacgaacaattcatactttgatggagcacatgaggttcgacattgtgccagaaagcatccagatcttggtcgtattgtgcttgaagttgctaagaataggctggaccagatgctgtatgtaggacttacagaggatcatgaagagtcagcgaggttgtttgctcatatggtaggagcacaggtgcttttacaatctgggacattgagtttggatctcaaggaagatctgcacagtgagactgactcacacccatccatggtggagcccggggatgaagaagcaagcgaacatctgaataacacacatggttggcaaaataatgaagccctgaactctaccagcgacgaacaaggaaaaggaaatatgactgtgggtaaactgatggaagcttatgaaacttgcatcgctaaactgcggaagtcccaatctagccgtcgtaaaatatcactaaagaaagtggaggaagcaaacttctcaaaagaggcacggaagctggtccccgaggcaattttgaaacaaattatctcgctgaacagccttgacatggaactttatgaccatgctaagaaaatctttacccaggaacatctgatgctgaaagctcagcaatccatggcggggcagcacagacagttggcggaacaagaggttaaaatttagagaccattaccgctcccagtggcaggtgtcgatcaggtctcccccaggccccag

SEQ ID NO: 79423 - DNA, 1329 bp, Zea Mays
cccacctctggctcggcttccaaatccaaacggccgtgggctcgcctcaggccacttcggtccctcctcgagctccatccgatcctccctccccgtcgtgccggcatcgcgcgcagggaggaccggccggacggccggcccgcccgcccgccgccatgccgggatcgcccaaggtcttcttcgcctcctccgcctcgcgccgctccgggtcgctgcgccggctgctctcgacgccggtcttctccgcggcctgcctcctcttcggcctcgccggcttcgtcgccgccgcgctcgccctctcgcgctccccgtccgtcactcacagccgctgccccgattcctcgcgcccgctctccgtctcagtcgcgtgggaccgcagcccaggggatggctccgcagggggctccgcggagctcccggcctcgctcgccactggatcgcgcggccgccacaaggtcatggccttcgtcgggatcttcaccgggttcggctccatcggccgccgccgcgcgctgcgccggacatggctacccgcggatcgccagggtctacttcggttggaggaagctactggtctggcattccggttcgtgattggaaaaagcaattcaaagaacaagatggccgctcttaatagagaagttgaagaatatgatgattttgtgcttttagatctcgaagaggagtatagcaggctcccgtacaaaacgttagctttctttaaggctgcctatgcattgtttgattctgatttctatgttaaagcggatgatgacatttacttgcgaccagatagactttccttgcttctggctaaagagcggtcacatccacaaacatacattggatgcatgaagaaggggcctgtttttactgatcctaagttgaaatggtatgagccccaatccttcttactcggatcagaatactttcttcatgcatatgggccaatttatgctttatcagctgacgtggtggctagcttggttgctttgaggaacaacagtttccgtatgtttagcaacgaggacgttacaattggatcgtggatgcttgctatgaacgtcaaccatgagaacacacatgcgctctgtgaacctgactgcacggagtcttcagttgctgtttgggacattccaaaatgctcagtggagccgcgatcgacgtttggaacgttcatcctgtaccgtagcaaaaaaggaattttgttgtatagaaactagaaggaatggatgcatcggcgattgatagacaatgcatacacctagctgtgatcggctggaattagggatattccctgaggttctcttttttggagtaaaatctgag

SEQ ID NO: 79424 - DNA, 1370 bp, Zea Mays
cccacctctggctcggcttccaaatccaaacggccgtgggctcgcctcaggccacttcggtccctcctcgagctccatccgatcctccctccccgtcgtgccggcatcgcgcgcagggaggaccggccggacggccggcccgcccgcccgccgccatgccgggatcgcccaaggtcttcttcgcctcctccgcctcgcgccgctccgggtcgctgcgccggctgctctcgacgccggtcttctccgcggcctgcctcctcttcggcctcgccggcttcgtcgccgccgcgctcgccctctcgcgctccccgtccgtcactcacagccgctgccccgattcctcgcgcccgctctccgtctcagtcgcgtgggaccgcagcccaggggatggctccgcagggggctccgcggagctcccggcctcgctcgccactggatcgcgcggccgccacaaggtcatggccttcgtcgggatcttcaccgggttcggctccatcggccgccgccgcgcgctgcgccggacatggctacccgcggatcgccagggtctacttcggttggaggaagctactggtctggcattccggttcgtgattggaaaaagcaattcaaagaacaagatggccgctcttaatagagaagttgaagaatatgatgattttgtgcttttagatctcgaagaggagtatagcaggctcccgtacaaaacgttagctttctttaaggctgcctatgcattgtttgattctgatttctatgttaaagcggatgatgacatttacttgcgaccagatagactttccttgcttctggctaaagagcggtcacatccacaaacatacattggatgcatgaagaaggggcctgtttttactgatcctaagttgaaatggtatgagccccaatccttcttactcggatcagaatactttcttcatgcatatgggccaatttatgctttatcagctgacgtggtggctagcttggttgctttgaggaacaacagtttccgtatgtttagcaacgaggacgttacaattggatcgtggatgcttgctatgaacgtcaaccatgagaacacacatgcgctctgtgaacctgactgcacggagtcttcagttgctgtttgggacattccaaaatgctcagtgctcatgttcaccggtcaaccagccttcgctgtccggacaccgaaaggtttgttgtgatggtgtagcggcgatatggatgcaaagaaacagatgcttggagggctcttatgatatatcttctgcaaggacttggtgatggtgcgttggaggcttggagccaagcgcaaagaccctatcacgggccctcctgacgggcgatacggatagcgctttgttcag

SEQ ID NO: 79425 - DNA, 1744 bp, Zea Mays
cacctctggctcggcttccaaatccaaacggccgtgggctcgcctcaggccacttcggtccctcctcgagctccatccgatcctccctccccgtcgtgccggcatcgcgcgcagggaggaccggccggacggccggcccgcccgcccgccgccatgccgggatcgcccaaggtcttcttcgcctcctccgcctcgcgccgctccgggtcgctgcgccggctgctctcgacgccggtcttctccgcggcctgcctcctcttcggcctcgccggcttcgtcgccgccgcgctcgccctctcgcgctccccgtccgtcactcacagccgctgccccgattcctcgcgcccgctctccgtctcagtcgcgtgggaccgcagcccaggggatggctccgcagggggctccgcggagctcccggcctcgctcgccactggatcgcgcggccgccacaaggtcatggccttcgtcgggatcttcaccgggttcggctccatcggccgccgccgcgcgctgcgccggacatggctacccgcggatcgccagggtctacttcggttggaggaagctactggtctggcattccggttcgtgattggaaaaagcaattcaaagaacaagatggccgctcttaatagagaagttgaagaatatgatgattttgtgcttttagatctcgaagaggagtatagcaggctcccgtacaaaacctttctttaaggctgcctatgcattgtttgattctgatttctatgttaaagcggatgatgacatttacttgcgaccagatagactttccttgcttctggctaaagagcggtcacatccacaaacatacattggatgcatgaagaaggggcctgtttttactgatcctaagttgaaatggtatgagccccaatccttcttactcggatcagaatactttcttcatgcatatgggccaatttatgctttatcagctgacgtggtggctagcttggttgctttgaggaacaacagtttccgtatgtttagcaacgaggacgttacaattggatcgtggatgcttgctatgaacgtcaaccatgagaacacacatgcgctctgtgaacctgactgcacggagtcttcagttgctgtttgggacattccaaaatgctcagggttacggaggtagtacgagtggtaggtttggggtccaggaccaggacctcgacgcttgggcgccgtcgggcggttggatggggaggcgaggtactgttcaagcggatgaacagcgccacgcggatgaacagtgctgttcactgggtggcctgcgagggtttgggggcgacggcttgggttaggggcgttggggaggtcggccgcagggatttccccacggccaggaagagagaagggatttccttctaatctcttgtttaccttcaattgatacaatctttctccttatatagagagggttacttgatatctaagcactagatctaatcttatctctaattctaatcttatcccaaactagccttatctttatcatctaattttatctctaattctaatcttatctcaaactagtcttatctttatctaacctaccttaggcgccctggcactttcacattgtacttgtacattagaatcttttatcacatgttacatatgaaggccaaaaatagtaagcatcaattaaactaaactgtaaataggttctacaggtactactgttagttcataaacgataaataattttaggggtgctttt

SEQ ID NO: 79426 - DNA, 1486 bp, Zea Mays
acctctggctcggcttccaaatccaaacggccgtgggctcgcctcaggccacttcggtccctcctcgagctccatccgatcctccctccccgtcgtgccggcatcgcgcgcagggaggaccggccggacggccggcccgcccgcccgccgccatgccgggatcgcccaaggtcttcttcgcctcctccgcctcgcgccgctccgggtcgctgcgccggctgctctcgacgccggtcttctccgcggcctgcctcctcttcggcctcgccggcttcgtcgccgccgcgctcgccctctcgcgctccccgtccgtcactcacagccgctgccccgattcctcgcgcccgctctccgtctcagtcgcgtgggaccgcagcccaggggatggctccgcagggggctccgcggagctcccggcctcgctcgccactggatcgcgcggccgccacaaggtcatggccttcgtcgggatcttcaccgggttcggctccatcggccgccgccgcgcgctgcgccggacatggctacccgcggatcgccagggtctacttcggttggaggaagctactggtctggcattccggttcgtgattggaaaaagcaattcaaagaacaagatggccgctcttaatagagaagttgaagaatatgatgattttgtgcttttagatctcgaagaggagtatagcaggctcccgtacaaaacgttagctttctttaaggctgcctatgcattgtttgattctgatttctatgttaaagcggatgatgacatttacttgcgaccagatagactttccttgcttctggctaaagagcggtcacatccacaaacatacattggatgcatgaagaaggggcctgtttttactgatcctaagttgaaatggtatgagccccaatccttcttactcggatcagaatactttcttcatgcatatgggccaatttatgctttatcagctgacgtggtggctagcttggttgctttgaggaacaacagtttccgtatgtttagcaacgaggacgttacaattggatcgtggatgcttgctatgaacgtcaaccatgagaacacacatgcgctctgtgaacctgactgcacggagtcttcagttgctgtttgggacattccaaaatgctcagggctatgccacccagaggtaaaaatgctagagcttcatcaaagaaaagaatgcacaggtggtccaaccgttgcagccgaggtgtccgagtccgaggactgatgatttctcggttggaacacaaactaacggatccgatagttgacctccgccctcactcatggagccgcgatcgacgtttggaacgttcatcctgtaccgtagcaaaaaaggaattttgttgtatagaaactagaaggaatggatgcatcggcgattgatagacaatgcatacacctagctgtgatcggctggaattagggatattccctgaggttctcttttttggagtaaaatctgag

SEQ ID NO: 79427 - DNA, 1524 bp, Zea Mays
acctctggctcggcttccaaatccaaacggccgtgggctcgcctcaggccacttcggtccctcctcgagctccatccgatcctccctccccgtcgtgccggcatcgcgcgcagggaggaccggccggacggccggcccgcccgcccgccgccatgccgggatcgcccaaggtcttcttcgcctcctccgcctcgcgccgctccgggtcgctgcgccggctgctctcgacgccggtcttctccgcggcctgcctcctcttcggcctcgccggcttcgtcgccgccgcgctcgccctctcgcgctccccgtccgtcactcacagccgctgccccgattcctcgcgcccgctctccgtctcagtcgcgtgggaccgcagcccaggggatggctccgcagggggctccgcggagctcccggcctcgctcgccactggatcgcgcggccgccacaaggtcatggccttcgtcgggatcttcaccgggttcggctccatcggccgccgccgcgcgctgcgccggacatggctacccgcggatcgccagggtctacttcggttggaggaagctactggtctggcattccggttcgtgattggaaaaagcaattcaaagaacaagatggccgctcttaatagagaagttgaagaatatgatgattttgtgcttttagatctcgaagaggagtatagcaggctcccgtacaaaacctttctttaaggctgcctatgcattgtttgattctgatttctatgttaaagcggatgatgacatttacttgcgaccagatagactttccttgcttctggctaaagagcggtcacatccacaaacatacattggatgcatgaagaaggggcctgtttttactgatcctaagttgaaatggtatgagccccaatccttcttactcggatcagaatactttcttcatgcatatgggccaatttatgctttatcagctgacgtggtggctagcttggttgctttgaggaacaacagtttccgtatgtttagcaacgaggacgttacaattggatcgtggatgcttgctatgaacgtcaaccatgagaacacacatgcgctctgtgaacctgactgcacggagtcttcagttgctgtttgggacattccaaaatgctcagggctatgccacccagaggtaaaaatgctagagcttcatcaaagaaaagaatgcacaggtggtccaaccgttgcagccgaggtgtccgagtccgaggactgatgatttctcggttggaacacaaactaacggatccgatagttgacctccgccctcactcagtagatgcgtttggagtattcgtttgattcattcatttatcagtggagccgcgatcgacgtttggaacgttcatcctgtaccgtagcaaaaaaggaattttgttgtatagaaactagaaggaatggatgcatcggcgattgatagacaatgcatacacctagctgtgatcggctggaattagggatattccctgaggttctcttttttggagtaaaatctgag

SEQ ID NO: 79428 - DNA, 1805 bp, Zea Mays
acctctggctcggcttccaaatccaaacggccgtgggctcgcctcaggccacttcggtccctcctcgagctccatccgatcctccctccccgtcgtgccggcatcgcgcgcagggaggaccggccggacggccggcccgcccgcccgccgccatgccgggatcgcccaaggtcttcttcgcctcctccgcctcgcgccgctccgggtcgctgcgccggctgctctcgacgccggtcttctccgcggcctgcctcctcttcggcctcgccggcttcgtcgccgccgcgctcgccctctcgcgctccccgtccgtcactcacagccgctgccccgattcctcgcgcccgctctccgtctcagtcgcgtgggaccgcagcccaggggatggctccgcagggggctccgcggagctcccggcctcgctcgccactggatcgcgcggccgccacaaggtcatggccttcgtcgggatcttcaccgggttcggctccatcggccgccgccgcgcgctgcgccggacatggctacccgcggatcgccagggtctacttcggttggaggaagctactggtctggcattccggttcgtgattggaaaaagcaattcaaagaacaagatggccgctcttaatagagaagttgaagaatatgatgattttgtgcttttagatctcgaagaggagtatagcaggctcccgtacaaaacgttagctttctttaaggctgcctatgcattgtttgattctgatttctatgttaaagcggatgatgacatttacttgcgaccagatagactttccttgcttctggctaaagagcggtcacatccacaaacatacattggatgcatgaagaaggggcctgtttttactgatcctaagttgaaatggtatgagccccaatccttcttactcggatcagaatactttcttcatgcatatgggccaatttatgctttatcagctgacgtggtggctagcttggttgctttgaggaacaacagtttccgtatgtttagcaacgaggacgttacaattggatcgtggatgcttgctatgaacgtcaaccatgagaacacacatgcgctctgtgaacctgactgcacggagtcttcagttgctgtttgggacattccaaaatgctcagggctatgccacccagaggtaaaaatgctagagcttcatcaaagaaaagaatgcacaggtggtccaaccgttgcagccgaggtgtccgagtccgaggactgatgatttctcggttggaacacaaactaacggatccgatagttgacctccgccctcactcagtagatgcgtttggagtattcgtttgattcattcatttatcagtggagccgcgatcgacgtttggaacgttcatcctgtaccgtagcaaaaaaggaattttgttgtatagaaactagaaggaatggatgcatcggcgattgatagacaatgcatacacctagctgtgatcggctggaattagggatattccctgaggttctcttttttggagtaaaatctgagccgtctgcttcgcctgatccatccatagctaagtgagcaaagctgagccttgaggtgctcatgttcaccggtcaaccagccttcgctgtccggacaccgaaaggtttgttgtgatggtgtagcggcgatatggatgcaaagaaacagatgcttggagggctcttatgatatatcttctgcaaggacttggtgatggtgcgttggaggcttggagccaagcgcaaagaccctatcacgggccctcctgacgggcgatacggatagcgctttgttcag

SEQ ID NO: 79429 - DNA, 811 bp, Zea Mays
ggtagaactgctacaggaacagcaaggaaactgacatttttagattaagaaacaccagaagatttttttccgtatgtttagcaacgaggacgttacaattggatcgtggatgcttgctatgaacgtcaaccatgagaacacacatgcgctctgtgaacctgactgcacggagtcttcagttgctgtttgggacattccaaaatgctcagggttacggaggtagtacgagtggtaggtttggggtccaggaccaggacctcgacgcttgggcgccgtcgggcggttggatggggaggcgaggtactgttcaagcggatgaacagcgccacgcggatgaacagtgctgttcactgggtggcctgcgagggtttgggggcgacggcttgggttaggggcgttggggaggtcggccgcagggatttccccacggccaggaagagagaagggatttccttctaatctcttgtttaccttcaattgatacaatctttctccttatatagagagggttacttgatatctaagcactagatctaatcttatctctaattctaatcttatcccaaactagccttatctttatcatctaattttatctctaattctaatcttatctcaaactagtcttatctttatctaacctaccttaggcgccctggcactttcacattgtacttgtacattagaatcttttatcacatgttacatatgaaggccaaaaatagtaagcatcaattaaactaaactgtaaataggttctacaggtactactgttagttcataaacgataaataattttaggggtgctttt

SEQ ID NO: 79430 - DNA, 1526 bp, Zea Mays
gctaaaatagacccaaatctcgcagcaacgaattcgcatttcccccacctccacccccactttcccttccgtccccttctcctcgtcgcgatccaaatccgcggccatggacggcggggggcagcccccggacaccgagatgtcggaggccggcgcgggcggcggagggcagccgccgcagcagccactgccgccggtgggcgggggcgtgatgttggacaacatccaggcgacgctcagccacggcggccgcttcatccagtacaacatcttcggcaacgtgttcgaggtcaccgccaagtacaagccccccgtcctccccatcggcaagggcgcctacggcatcgtctgctcggcgctcaactccgagacggcggagcaggtggccatcaagaagatcgccaacgccttcgacaacaagatcgatgccaagcgcacgctccgcgagatcaagctgctccgccacatggaccacgagaatattgttgcaataagggatatcatacctcctgcgcagagggctgcattcaatgatgtgtatattgcatatgaattgatggatactgatctgcatcaaattattcgttcaaatcaagctttgtcagaggagcactgtcagatggtatagagcaccagagcttttgttgaactcctcagaatatactgctgccatcgatgtgtggtctgtgggctgtatatttatggaactgatggaccgcaaacccttgtttcctggaagagaccatgtccatcagctacgtcttctaatggagctcattggcacgccaaatgagggtgatcttgattttgtaaatgaaaatgcaagaagatatatccgccaacttcctcgtcaccctagacagtccttacctgaaaaatttccacatgtacaacccttagcaattgacctggtggaaaagatgctgacttttgatcctagacagagaataactgttgaaggcgcacttgcacacccttacttggcatcacttcatgacataagtgatgagccaggctgctcaatgcccttcagctttgacttcgagcagcatgcattgtctgaagaacaaatgaaggatcttatctaccaagaggctcttgcattcaaccctgattatcagtagccaaagttcaatttcagccggtgattggcttcattgacatggagattttttccccacctgatgtcagtgcaaaaagtcaccaactccgattgctagctgtaaataactgccttacctgaagatactccattcctctgattaaaagctggtgacggtgtcattaagggtagaaaagaacgagcttgtgaaggtcaaatttctgcgaagccatggatttctgtgcttacaatatgttgttttcaatcggactttccttcctttttcttgtcaaaaacgtctcgatgttgtctgtgagaggtagttcgtgaacgatggctgcctgaattcagtggttgtcatcaaagttaacatttctggtcaacttaagattaagacttcgtggcttcttgcttgttttttttt

SEQ ID NO: 79431 - DNA, 1524 bp, Zea Mays
gctaaaatagacccaaatctcgcagcaacgaattcgcatttcccccacctccacccccactttcccttccgtccccttctcctcgtcgcgatccaaatccgcggccatggacggcggggggcagcccccggacaccgagatgtcggaggccggcgcgggcggcggagggcagccgccgcagcagccactgccgccggtgggcgggggcgtgatgttggacaacatccaggcgacgctcagccacggcggccgcttcatccagtacaacatcttcggcaacgtgttcgaggtcaccgccaagtacaagccccccgtcctccccatcggcaagggcgcctacggcatcgtctgctcggcgctcaactccgagacggcggagcaggtggccatcaagaagatcgccaacgccttcgacaacaagatcgatgccaagcgcacgctccgcgagatcaagctgctccgccacatggaccacgagaatattgttgcaataagggatatcatacctcctgcgcagagggctgcattcaatgatgtgtatattgcatatgaattgatggatactgatctgcatcaaattattcgttcaaatcaagctttgtcagaggagcactgtcagtattttctttatcaaattcttcgtggcttgaagtatatacattcagcaaatgttcttcaccgtgacttgaagcctagcaatcttcttttgaatgcaaactgtgacctcaagatatgtgattttgggcttgctcgcaccacctcagaaactgattttatgactgaatatgttgtcacaagatggtatagagcaccagagcttttgttgaactcctcagaatatactgctgccatcgatgtgtggtctgtgggctgtatatttatggaactgatggaccgcaaacccttgtttcctggaagagaccatgtccatcagctacgtcttctaatggagttgaaggcgcacttgcacacccttacttggcatcacttcatgacataagtgatgagccaggctgctcaatgcccttcagctttgacttcgagcagcatgcattgtctgaagaacaaatgaaggatcttatctaccaagaggctcttgcattcaaccctgattatcagtagccaaagttcaatttcagccggtgattggcttcattgacatggagattttttccccacctgatgtcagtgcaaaaagtcaccaactccgattgctagctgtaaataactgccttacctgaagatactccattcctctgattaaaagctggtgacggtgtcattaagggtagaaaagaacgagcttgtgaaggtcaaatttctgcgaagccatggatttctgtgcttacaatatgttgttttcaatcggactttccttcctttttcttgtcaaaaacgtctcgatgttgtctgtgagaggtagttcgtgaacgatggctgcctgaattcagtggttgtcatcaaagttaacatttctggtcaacttaagattaagacttcgtggcttcttgcttgttttttttt

SEQ ID NO: 79432 - DNA, 1260 bp, Zea Mays
gtatgtctttggctactacggggtggctcaaataaaattgttgcaataagggatatcatacctcctgcgcagagggctgcattcaatgatgtgtatattgcatatgaattgatggatactgatctgcatcaaattattcgttcaaatcaagctttgtcagaggagcactgtcagtattttctttatcaaattcttcgtggcttgaagtatatacattcagcaaatgttcttcaccgtgacttgaagcctagcaatcttcttttgaatgcaaactgtgacctcaagatatgtgattttgggcttgctcgcaccacctcagaaactgattttatgactgaatatgttgtcacaagatggtatagagcaccagagcttttgttgaactcctcagaatatactgctgccatcgatgtgtggtctgtgggctgtatatttatggaactgatggaccgcaaacccttgtttcctggaagagaccatgtccatcagctacgtcttctaatggagctcattggcacgccaaatgagggtgatcttgattttgtaaatgaaaatgcaagaagatatatccgccaacttcctcgtcaccctagacagtccttacctgaaaaatttccacatgtacaacccttagcaattgacctggtggaaaagatgctgacttttgatcctagacagagaataactgttgaaggcgcacttgcacacccttacttggcatcacttcatgacataagtgatgagccaggctgctcaatgcccttcagctttgacttcgagcagcatgcattgtctgaagaacaaatgaaggatcttatctaccaagaggctcttgcattcaaccctgattatcagtagccaaagttcaatttcagccggtgattggcttcattgacatggagattttttccccacctgatgtcagtgcaaaaagtcaccaactccgattgctagctgtaaataactgccttacctgaagatactccattcctctgattaaaagctggtgacggtgtcattaagggtagaaaagaacgagcttgtgaaggtcaaatttctgcgaagccatggatttctgtgcttacaatatgttgttttcaatcggactttccttcctttttcttgtcaaaaacgtctcgatgttgtctgtgagaggtagttcgtgaacgatggctgcctgaattcagtggttgtcatcaaagttaacatttctggtcaacttaagattaagacttcgtggcttcttgcttgttttttttt

SEQ ID NO: 79433 - DNA, 4145 bp, Zea Mays
aaaatgacattttttaatttgtttttacagaaccacgtagattgttacagcgcacaggaccattcattaattgccacttaatccggtcggtgttcaactggactcagctcaaaaatgggagggaaaaaaacatccctgcaaaattctctcgattctagtttatcgtccaaactcatgcaaatatctgaattctgcatcaactcccttatcatacactcttatttttaaaaggaaaagcaactagtaaagatcaccgataattgtcggatacacaagcacggcagctacccttgctacttccgtgatcatccatcgcacagcaccaccccggcatcaactccactttgttcaagtaaatcagcacctctctgtattcatctgatgctcccacagctcaccaaattcaccgttaatcctcaattagcctgttgttcagctgcacctcgaaccggagccaagactcggctcgcatttctgtgttcatcatatcactctctggtgcgggatagtagtcctcccgtaactgcatgtccctcagatttggcaccttcaagaaaaaggtcaggaaatgctcatgcgtggtgccatggacgaagagcttcctgagtccaacgcagccctggagcagccccacggcgggcagtgttaggctacgctggttcacttccttgtcttggggaggccaataatccagctcatacaaagtcattagtgaatctataccctgcaaataaaatcgctcccacagagagagatccatttgacctgctggtgcagtaagagcatagccaactgcctcactcagatccaacttcatcttggccagcactgggaaacctgcaagatcactcaggccaaataatgggccagggcgtgcacatgtccggcaatcaccctccactttaattgagatctcctctagaacagggcagctatcaagcccagcagagatgagtggggagagtacctcaccggcagggaaccagagggagagtgaacgcagcatctcccagctgactagatcatccaattccatgtacctacatttcttcgaagcagactcatatgatacttcaccaccgagatcgtcatcttcatgattgcatccggctatgccgttggccacactctcaggctgttcaacttccttccagacacagctgatctcaagactctcaatgcgatcacggatcggacttagagcagtgaggcatgctgccgtgtccagaagccggcagtttaagatactgacttctttgattgtgggccgaagagcagttgctagtctcctgatcccagctggtgtgacaagatcacagccatggatggcaaacttagcaagcctcccgcacccacggcctatggcagcaaggctggcgtcagtgagatccaaacagcccttgatgcatagcgactccagcgaaccgcacacagcaactccgtcgaggtgcagccaagatgccttgcacaagccctggaagccccccagcgtcaagaacttgatccgtgggcacctgcgggcaagcgcctccatcgccggcgctgtctcaagcacattatgccgcatgtcaagcgtgaaatcctccagcgccggtagtgcagcgaagaaggaaaccagccctgcgacggtgattgccgcgtcctctcgttggccggtggccgccggctcgaaaggttcccggagccgcaggatcgccagcttggggcacctggcggcgatggtgagaagcgcgtcgtcgctgacgaagtcaatataccgagggttgaacacacagggcgccacgagcttctggagactggggcaggatccggcgatggcctccagctcggcggcgtggaacccgtccgtggcgcccgcgaggccgaggtcgagctccgtgagcgccgcggcggctgccgggtgcgctgcaagcgccggctcgatgtcctccgtccagcagtagaactcggagaggtcgagcgtcctgagcgcggggcagtcctcgaggagaggctcgagatccgcgcctgcgtcgaggccgggcgggcgctggtgccagcgcacgagcttgacactgcggaggccggacctccagtgcggggtgaggctggcgagcgtggtggggtcgcggcaatagacggcgagcgaggacacggcggggaagcagtaggcgaggcgcgccgcgatgaaggcgttctgctctgcgacctcctccgccgtcacggacggtgcgacggcgtcggcggacggcgccgcggaggagaggaacgggtggccccacggcgacaccagcgagaggtcgagccgctccagcgccgggaagcagaaagtcggcctgaggaagagaaacgcgttcgaccgtgggtccccgcgcagcgagagcgcggcgcgcgtggcccgctccgccgcgaggagccggtggcacgccagcgcggcgcggtgccgggaccgcgcgtcgtcgaggaagcccaggatgtggagcagcagaggctctggcaggtctaggatgggagagcccgccgcggccgccgcgtcttcctcagccatgcgatgcgacgcggcgcggcgatgaggggtgggggtgggacgggatgggatgggggatgcaccgccgcgtccggcaaagtcgtctaccccttttttcctttcccttgcgcgggcgggggggcagttgggggagaggagagggaggaagggagggggatgtggcctgcgggtgaaggggcgggcggagtggggacgggaagctgcacagcgaagtgatatactagtcgacagctctatctttttttcctttttatttttgtctgtatatataatgatgaataattatcttatcctatccgcatcgacctattttttttcccttttggattggaaatataaataatcccccctttctctttccgtcgctctcctatgctctctggcctctgcgtatgcgcctaggcgagcccgtgcgctggttggcctcccggacgcggccgcggcgggcgatggggtcgtcggcgccggtgagggcggcgggaggcacaagggatcccggcgagaacccggcggtggggaggctgcgggagctcttcacaggcgacgcggcagggatacgatgtggtcgctcttgcaagccctgaacgttttgttgttggcttggatatttctgatatggctgttaagaaggctaagcagtggtcatcctctttgcccaatgcagattattttacttttctggctgaagatttcttcaagtggataccaagtgaacaattcgaccttatatttgattacacgttcttttgtgcacttgacccgagcttaagggtggcttgggcagagacagttaatcggcttctaaaaccagatggagagcttcttaccttgatttatctgataagtgatcaagagggaggaccaccgtacaataatacagttgctgagtaagagtattcatccccttgccatcatctatcagaaggtactggaaccactgggtttgaagtctgttcttatggaagacaatgagctagccattaaaccacggaagggatgtgagaaaattgggcggtggaagagatgcgcacaccaatcatctctgtgagagaaagcagtggtattttcctaaacaaagaaataaaagaagaatagaccatgtagctgcctcaattatcggatacttcggtgctcctgctccgtcacctttagtcgtcaatgaaattctagcttcaattggggagatgcatagagatctcagttgcctagaggtgtcgcctttagtggctacctgagtacctgtgccactacattcattgcttttaatatggttcagtcgtgaattgtttggatgtaattgcttaattatgaattctgtttgatcgagtagttttgcatggattgtgctggttttggtaagccttgtgcttactaataccatttgaccttcttttctcttctcttgatgaaaaacatgtgttacgggaaaaaaagaatatatggaaggatcaacttcttacatttattagacctacatcagcattttagacttgctttttgtgtctgatgagacttcctgaaacatgtatgcatactgcccaagcccaagaagcatgactaggatgctcgacctcaatgtactggaattataatccttggtttcgaaacagaaatgcag

SEQ ID NO: 79434 - DNA, 4276 bp, Zea Mays
aaaatgacattttttaatttgtttttacagaaccacgtagattgttacagcgcacaggaccattcattaattgccacttaatccggtcggtgttcaactggactcagctcaaaaatgggagggaaaaaaacatccctgcaaaattctctcgattctagtttatcgtccaaactcatgcaaatatctgaattctgcatcaactcccttatcatacactcttatttttaaaaggaaaagcaactagtaaagatcaccgataattgtcggatacacaagcacggcagctacccttgctacttccgtgatcatccatcgcacagcaccaccccggcatcaactccactttgttcaagtaaatcagcacctctctgtattcatctgatgctcccacagctcaccaaattcaccgttaatcctcaattagcctgttgttcagctgcacctcgaaccggagccaagactcggctcgcatttctgtgttcatcatatcactctctggtgcgggatagtagtcctcccgtaactgcatgtccctcagatttggcaccttcaagaaaaaggtcaggaaatgctcatgcgtggtgccatggacgaagagcttcctgagtccaacgcagccctggagcagccccacggcgggcagtgttaggctacgctggttcacttccttgtcttggggaggccaataatccagctcatacaaagtcattagtgaatctataccctgcaaataaaatcgctcccacagagagagatccatttgacctgctggtgcagtaagagcatagccaactgcctcactcagatccaacttcatcttggccagcactgggaaacctgcaagatcactcaggccaaataatgggccagggcgtgcacatgtccggcaatcaccctccactttaattgagatctcctctagaacagggcagctatcaagcccagcagagatgagtggggagagtacctcaccggcagggaaccagagggagagtgaacgcagcatctcccagctgactagatcatccaattccatgtacctacatttcttcgaagcagactcatatgatacttcaccaccgagatcgtcatcttcatgattgcatccggctatgccgttggccacactctcaggctgttcaacttccttccagacacagctgatctcaagactctcaatgcgatcacggatcggacttagagcagtgaggcatgctgccgtgtccagaagccggcagtttaagatactgacttctttgattgtgggccgaagagcagttgctagtctcctgatcccagctggtgtgacaagatcacagccatggatggcaaacttagcaagcctcccgcacccacggcctatggcagcaaggctggcgtcagtgagatccaaacagcccttgatgcatagcgactccagcgaaccgcacacagcaactccgtcgaggtgcagccaagatgccttgcacaagccctggaagccccccagcgtcaagaacttgatccgtgggcacctgcgggcaagcgcctccatcgccggcgctgtctcaagcacattatgccgcatgtcaagcgtgaaatcctccagcgccggtagtgcagcgaagaaggaaaccagccctgcgacggtgattgccgcgtcctctcgttggccggtggccgccggctcgaaaggttcccggagccgcaggatcgccagcttggggcacctggcggcgatggtgagaagcgcgtcgtcgctgacgaagtcaatataccgagggttgaacacacagggcgccacgagcttctggagactggggcaggatccggcgatggcctccagctcggcggcgtggaacccgtccgtggcgcccgcgaggccgaggtcgagctccgtgagcgccgcggcggctgccgggtgcgctgcaagcgccggctcgatgtcctccgtccagcagtagaactcggagaggtcgagcgtcctgagcgcggggcagtcctcgaggagaggctcgagatccgcgcctgcgtcgaggccgggcgggcgctggtgccagcgcacgagcttgacactgcggaggccggacctccagtgcggggtgaggctggcgagcgtggtggggtcgcggcaatagacggcgagcgaggacacggcggggaagcagtaggcgaggcgcgccgcgatgaaggcgttctgctctgcgacctcctccgccgtcacggacggtgcgacggcgtcggcggacggcgccgcggaggagaggaacgggtggccccacggcgacaccagcgagaggtcgagccgctccagcgccgggaagcagaaagtcggcctgaggaagagaaacgcgttcgaccgtgggtccccgcgcagcgagagcgcggcgcgcgtggcccgctccgccgcgaggagccggtggcacgccagcgcggcgcggtgccgggaccgcgcgtcgtcgaggaagcccaggatgtggagcagcagaggctctggcaggtctaggatgggagagcccgccgcggccgccgcgtcttcctcagccatgcgatgcgacgcggcgcggcgatgaggggtgggggtgggacgggatgggatgggggatgcaccgccgcgtccggcaaagtcgtctaccccttttttcctttcccttgcgcgggcgggggggcagttgggggagaggagagggaggaagggagggggatgtggcctgcgggtgaaggggcgggcggagtggggacgggaagctgcacagcgaagtgatatactagtcgacagctctatctttttttcctttttatttttgtctgtatatataatgatgaataattatcttatcctatccgcatcgacctattttttttcccttttggattggaaatataaataatcccccctttctctttccgtcgctctcctatgctctctggcctctgcgtatgcgcctaggcgagcccgtgcgctggttggcctcccggacgcggccgcggcgggcgatggggtcgtcggcgccggtgagggcggcgggaggcacaagggatcccggcgagaacccggcggtggggaggctgcgggagctcttcacaggcgacgcggcagatgggtgggagaagtcctgggagtttggtgtgaccccatgggatttgggaaagccaacacctgtcattgaacatcttgctagatcaggaacactcccaaaagggagagctttggttcctggatgtggaatgggatacgatgtggtcgctcttgcaagccctgaacgttttgttgttggcttggatatttctgatatggctgttaagaaggctaagcagtggtcatcctctttgcccaatgcagattattttacttttctggctgaagatttcttcaagtggataccaagtgaacaattcgaccttatatttgattacacgttcttttgtgcacttgacccgagcttaagggtggcttgggcagagacagttaatcggcttctaaaaccagatggagagcttcttaccttgatttatctgataagtgatcaagagggaggaccaccgtacaataatacagttgctgagtaagagtattcatccccttgccatcatctatcagaaggtactggaaccactgggtttgaagtctgttcttatggaagacaatgagctagccattaaaccacggaagggatgtgagaaaattgggcggtggaagagatgcgcacaccaatcatctctgtgagagaaagcagtggtattttcctaaacaaagaaataaaagaagaatagaccatgtagctgcctcaattatcggatacttcggtgctcctgctccgtcacctttagtcgtcaatgaaattctagcttcaattggggagatgcatagagatctcagttgcctagaggtgtcgcctttagtggctacctgagtacctgtgccactacattcattgcttttaatatggttcagtcgtgaattgtttggatgtaattgcttaattatgaattctgtttgatcgagtagttttgcatggattgtgctggttttggtaagccttgtgcttactaataccatttgaccttcttttctcttctcttgatgaaaaacatgtgttacgggaaaaaaagaatatatggaaggatcaacttcttacatttattagacctacatcagcattttagacttgctttttgtgtctgatgagacttcctgaaacatgtatgcatactgcccaagcccaagaagcatgactaggatgctcgacctcaatgtactggaattataatccttggtttcgaaacagaaatgcag

SEQ ID NO: 79435 - DNA, 4862 bp, Zea Mays
aaaatgacattttttaatttgtttttacagaaccacgtagattgttacagcgcacaggaccattcattaattgccacttaatccggtcggtgttcaactggactcagctcaaaaatgggagggaaaaaaacatccctgcaaaattctctcgattctagtttatcgtccaaactcatgcaaatatctgaattctgcatcaactcccttatcatacactcttatttttaaaaggaaaagcaactagtaaagatcaccgataattgtcggatacacaagcacggcagctacccttgctacttccgtgatcatccatcgcacagcaccaccccggcatcaactccactttgttcaagtaaatcagcacctctctgtattcatctgatgctcccacagctcaccaaattcaccgttaatcctcaattagcctgttgttcagctgcacctcgaaccggagccaagactcggctcgcatttctgtgttcatcatatcactctctggtgcgggatagtagtcctcccgtaactgcatgtccctcagatttggcaccttcaagaaaaaggtcaggaaatgctcatgcgtggtgccatggacgaagagcttcctgagtccaacgcagccctggagcagccccacggcgggcagtgttaggctacgctggttcacttccttgtcttggggaggccaataatccagctcatacaaagtcattagtgaatctataccctgcaaataaaatcgctcccacagagagagatccatttgacctgctggtgcagtaagagcatagccaactgcctcactcagatccaacttcatcttggccagcactgggaaacctgcaagatcactcaggccaaataatgggccagggcgtgcacatgtccggcaatcaccctccactttaattgagatctcctctagaacagggcagctatcaagcccagcagagatgagtggggagagtacctcaccggcagggaaccagagggagagtgaacgcagcatctcccagctgactagatcatccaattccatgtacctacatttcttcgaagcagactcatatgatacttcaccaccgagatcgtcatcttcatgattgcatccggctatgccgttggccacactctcaggctgttcaacttccttccagacacagctgatctcaagactctcaatgcgatcacggatcggacttagagcagtgaggcatgctgccgtgtccagaagccggcagtttaagatactgacttctttgattgtgggccgaagagcagttgctagtctcctgatcccagctggtgtgacaagatcacagccatggatggcaaacttagcaagcctcccgcacccacggcctatggcagcaaggctggcgtcagtgagatccaaacagcccttgatgcatagcgactccagcgaaccgcacacagcaactccgtcgaggtgcagccaagatgccttgcacaagccctggaagccccccagcgtcaagaacttgatccgtgggcacctgcgggcaagcgcctccatcgccggcgctgtctcaagcacattatgccgcatgtcaagcgtgaaatcctccagcgccggtagtgcagcgaagaaggaaaccagccctgcgacggtgattgccgcgtcctctcgttggccggtggccgccggctcgaaaggttcccggagccgcaggatcgccagcttggggcacctggcggcgatggtgagaagcgcgtcgtcgctgacgaagtcaatataccgagggttgaacacacagggcgccacgagcttctggagactggggcaggatccggcgatggcctccagctcggcggcgtggaacccgtccgtggcgcccgcgaggccgaggtcgagctccgtgagcgccgcggcggctgccgggtgcgctgcaagcgccggctcgatgtcctccgtccagcagtagaactcggagaggtcgagcgtcctgagcgcggggcagtcctcgaggagaggctcgagatccgcgcctgcgtcgaggccgggcgggcgctggtgccagcgcacgagcttgacactgcggaggccggacctccagtgcggggtgaggctggcgagcgtggtggggtcgcggcaatagacggcgagcgaggacacggcggggaagcagtaggcgaggcgcgccgcgatgaaggcgttctgctctgcgacctcctccgccgtcacggacggtgcgacggcgtcggcggacggcgccgcggaggagaggaacgggtggccccacggcgacaccagcgagaggtcgagccgctccagcgccgggaagcagaaagtcggcctgaggaagagaaacgcgttcgaccgtgggtccccgcgcagcgagagcgcggcgcgcgtggcccgctccgccgcgaggagccggtggcacgccagcgcggcgcggtgccgggaccgcgcgtcgtcgaggaagcccaggatgtggagcagcagaggctctggcaggtctaggatgggagagcccgccgcggccgccgcgtcttcctcagccatgcgatgcgacgcggcgcggcgatgaggggtgggggtgggacgggatgggatgggggatgcaccgccgcgtccggcaaagtcgtctaccccttttttcctttcccttgcgcgggcgggggggcagttgggggagaggagagggaggaagggagggggatgtggcctgcgggtgaaggggcgggcggagtggggacgggaagctgcacagcgaagtgatatactagtcgacagctctatctttttttcctttttatttttgtctgtatatataatgatgaataattatcttatcctatccgcatcgacctattttttttcccttttggattggaaatataaataatcccccctttctctttccgtcgctctcctatgctctctggcctctgcgtatgcgcctaggcgagcccgtgcgctggttggcctcccggacgcggccgcggcgggcgatggggtcgtcggcgccggtgagggcggcgggaggcacaagggatcccggcgagaacccggcggtggggaggctgcgggagctcttcacaggcgacgcggcagatgggtgggagaagtcctgggagtttggtgtgaccccatgggatttgggaaagccaacacctgtcattgaacatcttgctagatcaggaacactcccaaaagggagagctttggttcctggatgtggaatggtaaattatttcattcttctggcagatggttccaccagatactactgtttccctcctagtttctctccagtaaccaagtctgactaaaatatgactattactttcaccttaggacaccagtcagtataaattataatgtgcctagttttctccatatatcctttgtagtcattgagagccgatgtgatgtgccttgacaataacagtacccaacttgccatagtacaagacattagcaatatcagccttttgattgagattttatgtgtaatggtaaactgtacttaggggtgataagggatcacgattcaaatgtttcttcacaaaaagttagggaccttaataaattttagttcaaaaatgaatagaaatagagcataatcttaatccgattcgatccttagattttatagtgtaaaatttagagctcattacgacccctaactgtactatactacacaccattttacagtgcatgacagtactgtaagcaggaccccactttgctggcattataataatatattacaaactggaacttagattttagcttttattaccagattgagttgcttctgtataacagggatacgatgtggtcgctcttgcaagccctgaacgttttgttgttggcttggatatttctgatatggctgttaagaaggctaagcagtggtcatcctctttgcccaatgcagattattttacttttctggctgaagatttcttcaagtggataccaagtgaacaattcgaccttatatttgattacacgttcttttgtgcacttgacccgagcttaagggtggcttgggcagagacagttaatcggcttctaaaaccagatggagagcttcttaccttgatttatctgataagtgatcaagagggaggaccaccgtacaataatacagttgctgagtaagagtattcatccccttgccatcatctatcagaaggtactggaaccactgggtttgaagtctgttcttatggaagacaatgagctagccattaaaccacggaagggatgtgagaaaattgggcggtggaagagatgcgcacaccaatcatctctgtgagagaaagcagtggtattttcctaaacaaagaaataaaagaagaatagaccatgtagctgcctcaattatcggatacttcggtgctcctgctccgtcacctttagtcgtcaatgaaattctagcttcaattggggagatgcatagagatctcagttgcctagaggtgtcgcctttagtggctacctgagtacctgtgccactacattcattgcttttaatatggttcagtcgtgaattgtttggatgtaattgcttaattatgaattctgtttgatcgagtagttttgcatggattgtgctggttttggtaagccttgtgcttactaataccatttgaccttcttttctcttctcttgatgaaaaacatgtgttacgggaaaaaaagaatatatggaaggatcaacttcttacatttattagacctacatcagcattttagacttgctttttgtgtctgatgagacttcctgaaacatgtatgcatactgcccaagcccaagaagcatgactaggatgctcgacctcaatgtactggaattataatccttggtttcgaaacagaaatgcag

SEQ ID NO: 79436 - DNA, 4005 bp, Zea Mays
aaaatgacattttttaatttgtttttacagaaccacgtagattgttacagcgcacaggaccattcattaattgccacttaatccggtcggtgttcaactggactcagctcaaaaatgggagggaaaaaaacatccctgcaaaattctctcgattctagtttatcgtccaaactcatgcaaatatctgaattctgcatcaactcccttatcatacactcttatttttaaaaggaaaagcaactagtaaagatcaccgataattgtcggatacacaagcacggcagctacccttgctacttccgtgatcatccatcgcacagcaccaccccggcatcaactccactttgttcaagtaaatcagcacctctctgtattcatctgatgctcccacagctcaccaaattcaccgttaatcctcaattagcctgttgttcagctgcacctcgaaccggagccaagactcggctcgcatttctgtgttcatcatatcactctctggtgcgggatagtagtcctcccgtaactgcatgtccctcagatttggcaccttcaagaaaaaggtcaggaaatgctcatgcgtggtgccatggacgaagagcttcctgagtccaacgcagccctggagcagccccacggcgggcagtgttaggctacgctggttcacttccttgtcttggggaggccaataatccagctcatacaaagtcattagtgaatctataccctgcaaataaaatcgctcccacagagagagatccatttgacctgctggtgcagtaagagcatagccaactgcctcactcagatccaacttcatcttggccagcactgggaaacctgcaagatcactcaggccaaataatgggccagggcgtgcacatgtccggcaatcaccctccactttaattgagatctcctctagaacagggcagctatcaagcccagcagagatgagtggggagagtacctcaccggcagggaaccagagggagagtgaacgcagcatctcccagctgactagatcatccaattccatgtacctacatttcttcgaagcagactcatatgatacttcaccaccgagatcgtcatcttcatgattgcatccggctatgccgttggccacactctcaggctgttcaacttccttccagacacagctgatctcaagactctcaatgcgatcacggatcggacttagagcagtgaggcatgctgccgtgtccagaagccggcagtttaagatactgacttctttgattgtgggccgaagagcagttgctagtctcctgatcccagctggtgtgacaagatcacagccatggatggcaaacttagcaagcctcccgcacccacggcctatggcagcaaggctggcgtcagtgagatccaaacagcccttgatgcatagcgactccagcgaaccgcacacagcaactccgtcgaggtgcagccaagatgccttgcacaagccctggaagccccccagcgtcaagaacttgatccgtgggcacctgcgggcaagcgcctccatcgccggcgctgtctcaagcacattatgccgcatgtcaagcgtgaaatcctccagcgccggtagtgcagcgaagaaggaaaccagccctgcgacggtgattgccgcgtcctctcgttggccggtggccgccggctcgaaaggttcccggagccgcaggatcgccagcttggggcacctggcggcgatggtgagaagcgcgtcgtcgctgacgaagtcaatataccgagggttgaacacacagggcgccacgagcttctggagactggggcaggatccggcgatggcctccagctcggcggcgtggaacccgtccgtggcgcccgcgaggccgaggtcgagctccgtgagcgccgcggcggctgccgggtgcgctgcaagcgccggctcgatgtcctccgtccagcagtagaactcggagaggtcgagcgtcctgagcgcggggcagtcctcgaggagaggctcgagatccgcgcctgcgtcgaggccgggcgggcgctggtgccagcgcacgagcttgacactgcggaggccggacctccagtgcggggtgaggctggcgagcgtggtggggtcgcggcaatagacggcgagcgaggacacggcggggaagcagtaggcgaggcgcgccgcgatgaaggcgttctgctctgcgacctcctccgccgtcacggacggtgcgacggcgtcggcggacggcgccgcggaggagaggaacgggtggccccacggcgacaccagcgagaggtcgagccgctccagcgccgggaagcagaaagtcggcctgaggaagagaaacgcgttcgaccgtgggtccccgcgcagcgagagcgcggcgcgcgtggcccgctccgccgcgaggagccggtggcacgccagcgcggcgcggtgccgggaccgcgcgtcgtcgaggaagcccaggatgtggagcagcagaggctctggcaggtctaggatgggagagcccgccgcggccgccgcgtcttcctcagccatgcgatgcgacgcggcgcggcgatgaggggtgggggtgggacgggatgggatgggggatgcaccgccgcgtccggcaaagtcgtctaccccttttttcctttcccttgcgcgggcgggggggcagttgggggagaggagagggaggaagggagggggatgtggcctgcgggtgaaggggcgggcggagtggggacgggaagctgcacagcgaagtgatatactagtcgacagctctatctttttttcctttttatttttgtctgtatatataatgatgaataattatcttatcctatccgcatcgacctattttttttcccttttggattggaaatataaataatcccccctttctctttccgtcgctctcctatgctctctggcctctgcgtatgcgcctaggcgagcccgtgcgctggttggcctcccggacgcggccgcggcgggcgatggggtcgtcggcgccggtgagggcggcgggaggcacaagggatcccggcgagaacccggcggtggggaggctgcgggagctcttcacaggcgacgcggcagattattttacttttctggctgaagatttcttcaagtggataccaagtgaacaattcgaccttatatttgattacacgttcttttgtgcacttgacccgagcttaagggtggcttgggcagagacagttaatcggcttctaaaaccagatggagagcttcttaccttgatttatctgataagtgatcaagagggaggaccaccgtacaataatacagttgctgactatcagaaggtactggaaccactgggtttgaagtctgttcttatggaagacaatgagctagccattaaaccacggaagggatgtgagaaaattgggcggtggaagagatgcgcacaccaatcatctctgtgagagaaagcagtggtattttcctaaacaaagaaataaaagaagaatagaccatgtagctgcctcaattatcggatacttcggtgctcctgctccgtcacctttagtcgtcaatgaaattctagcttcaattggggagatgcatagagatctcagttgcctagaggtgtcgcctttagtggctacctgagtacctgtgccactacattcattgcttttaatatggttcagtcgtgaattgtttggatgtaattgcttaattatgaattctgtttgatcgagtagttttgcatggattgtgctggttttggtaagccttgtgcttactaataccatttgaccttcttttctcttctcttgatgaaaaacatgtgttacgggaaaaaaagaatatatggaaggatcaacttcttacatttattagacctacatcagcattttagacttgctttttgtgtctgatgagacttcctgaaacatgtatgcatactgcccaagcccaagaagcatgactaggatgctcgacctcaatgtactggaattataatccttggtttcgaaacagaaatgcag

SEQ ID NO: 79437 - DNA, 4117 bp, Zea Mays
aaaatgacattttttaatttgtttttacagaaccacgtagattgttacagcgcacaggaccattcattaattgccacttaatccggtcggtgttcaactggactcagctcaaaaatgggagggaaaaaaacatccctgcaaaattctctcgattctagtttatcgtccaaactcatgcaaatatctgaattctgcatcaactcccttatcatacactcttatttttaaaaggaaaagcaactagtaaagatcaccgataattgtcggatacacaagcacggcagctacccttgctacttccgtgatcatccatcgcacagcaccaccccggcatcaactccactttgttcaagtaaatcagcacctctctgtattcatctgatgctcccacagctcaccaaattcaccgttaatcctcaattagcctgttgttcagctgcacctcgaaccggagccaagactcggctcgcatttctgtgttcatcatatcactctctggtgcgggatagtagtcctcccgtaactgcatgtccctcagatttggcaccttcaagaaaaaggtcaggaaatgctcatgcgtggtgccatggacgaagagcttcctgagtccaacgcagccctggagcagccccacggcgggcagtgttaggctacgctggttcacttccttgtcttggggaggccaataatccagctcatacaaagtcattagtgaatctataccctgcaaataaaatcgctcccacagagagagatccatttgacctgctggtgcagtaagagcatagccaactgcctcactcagatccaacttcatcttggccagcactgggaaacctgcaagatcactcaggccaaataatgggccagggcgtgcacatgtccggcaatcaccctccactttaattgagatctcctctagaacagggcagctatcaagcccagcagagatgagtggggagagtacctcaccggcagggaaccagagggagagtgaacgcagcatctcccagctgactagatcatccaattccatgtacctacatttcttcgaagcagactcatatgatacttcaccaccgagatcgtcatcttcatgattgcatccggctatgccgttggccacactctcaggctgttcaacttccttccagacacagctgatctcaagactctcaatgcgatcacggatcggacttagagcagtgaggcatgctgccgtgtccagaagccggcagtttaagatactgacttctttgattgtgggccgaagagcagttgctagtctcctgatcccagctggtgtgacaagatcacagccatggatggcaaacttagcaagcctcccgcacccacggcctatggcagcaaggctggcgtcagtgagatccaaacagcccttgatgcatagcgactccagcgaaccgcacacagcaactccgtcgaggtgcagccaagatgccttgcacaagccctggaagccccccagcgtcaagaacttgatccgtgggcacctgcgggcaagcgcctccatcgccggcgctgtctcaagcacattatgccgcatgtcaagcgtgaaatcctccagcgccggtagtgcagcgaagaaggaaaccagccctgcgacggtgattgccgcgtcctctcgttggccggtggccgccggctcgaaaggttcccggagccgcaggatcgccagcttggggcacctggcggcgatggtgagaagcgcgtcgtcgctgacgaagtcaatataccgagggttgaacacacagggcgccacgagcttctggagactggggcaggatccggcgatggcctccagctcggcggcgtggaacccgtccgtggcgcccgcgaggccgaggtcgagctccgtgagcgccgcggcggctgccgggtgcgctgcaagcgccggctcgatgtcctccgtccagcagtagaactcggagaggtcgagcgtcctgagcgcggggcagtcctcgaggagaggctcgagatccgcgcctgcgtcgaggccgggcgggcgctggtgccagcgcacgagcttgacactgcggaggccggacctccagtgcggggtgaggctggcgagcgtggtggggtcgcggcaatagacggcgagcgaggacacggcggggaagcagtaggcgaggcgcgccgcgatgaaggcgttctgctctgcgacctcctccgccgtcacggacggtgcgacggcgtcggcggacggcgccgcggaggagaggaacgggtggccccacggcgacaccagcgagaggtcgagccgctccagcgccgggaagcagaaagtcggcctgaggaagagaaacgcgttcgaccgtgggtccccgcgcagcgagagcgcggcgcgcgtggcccgctccgccgcgaggagccggtggcacgccagcgcggcgcggtgccgggaccgcgcgtcgtcgaggaagcccaggatgtggagcagcagaggctctggcaggtctaggatgggagagcccgccgcggccgccgcgtcttcctcagccatgcgatgcgacgcggcgcggcgatgaggggtgggggtgggacgggatgggatgggggatgcaccgccgcgtccggcaaagtcgtctaccccttttttcctttcccttgcgcgggcgggggggcagttgggggagaggagagggaggaagggagggggatgtggcctgcgggtgaaggggcgggcggagtggggacgggaagctgcacagcgaagtgatatactagtcgacagctctatctttttttcctttttatttttgtctgtatatataatgatgaataattatcttatcctatccgcatcgacctattttttttcccttttggattggaaatataaataatcccccctttctctttccgtcgctctcctatgctctctggcctctgcgtatgcgcctaggcgagcccgtgcgctggttggcctcccggacgcggccgcggcgggcgatggggtcgtcggcgccggtgagggcggcgggaggcacaagggatcccggcgagaacccggcggtggggaggctgcgggagctcttcacaggcgacgcggcagggatacgatgtggtcgctcttgcaagccctgaacgttttgttgttggcttggatatttctgatatggctgttaagaaggctaagcagtggtcatcctctttgcccaatgcagattattttacttttctggctgaagatttcttcaagtggataccaagtgaacaattcgaccttatatttgattacacgttcttttgtgcacttgacccgagcttaagggtggcttgggcagagacagttaatcggcttctaaaaccagatggagagcttcttaccttgatttatctgataagtgatcaagagggaggaccaccgtacaataatacagttgctgactatcagaaggtactggaaccactgggtttgaagtctgttcttatggaagacaatgagctagccattaaaccacggaagggatgtgagaaaattgggcggtggaagagatgcgcacaccaatcatctctgtgagagaaagcagtggtattttcctaaacaaagaaataaaagaagaatagaccatgtagctgcctcaattatcggatacttcggtgctcctgctccgtcacctttagtcgtcaatgaaattctagcttcaattggggagatgcatagagatctcagttgcctagaggtgtcgcctttagtggctacctgagtacctgtgccactacattcattgcttttaatatggttcagtcgtgaattgtttggatgtaattgcttaattatgaattctgtttgatcgagtagttttgcatggattgtgctggttttggtaagccttgtgcttactaataccatttgaccttcttttctcttctcttgatgaaaaacatgtgttacgggaaaaaaagaatatatggaaggatcaacttcttacatttattagacctacatcagcattttagacttgctttttgtgtctgatgagacttcctgaaacatgtatgcatactgcccaagcccaagaagcatgactaggatgctcgacctcaatgtactggaattataatccttggtttcgaaacagaaatgcag

SEQ ID NO: 79438 - DNA, 1072 bp, Zea Mays
gagatttcagtcctgaaagttatgaatgaacatgttgtattttgtgagcatcaggtcacgtgattgccattggacaaaaacgtgataaaagtgttaatacttcctattcgatatgttttgtccattcggtgtcattactctaataggaaagacaaagcagagacatggagaagttgaacacaagtattacagcagtacaacactggacaacaaaattaatctctaagcatggtcttgaaaccattagcttctttgaatggtattccattgctttgttcaccatgacgggaatttcttacacagcttcatattacagataagtgatcaagagggaggaccaccgtacaataatacagttgctgagtaagactatcagaaggtactggaaccactgggtttgaagtctgttcttatggaagacaatgagctagccattaaaccacggaagggatgtgagaaaattgggcggtggaagagatgcgcacaccaatcatctctgtgagagaaagcagtggtattttcctaaacaaagaaataaaagaagaatagaccatgtagctgcctcaattatcggatacttcggtgctcctgctccgtcacctttagtcgtcaatgaaattctagcttcaattggggagatgcatagagatctcagttgcctagaggtgtcgcctttagtggctacctgagtacctgtgccactacattcattgcttttaatatggttcagtcgtgaattgtttggatgtaattgcttaattatgaattctgtttgatcgagtagttttgcatggattgtgctggttttggtaagccttgtgcttactaataccatttgaccttcttttctcttctcttgatgaaaaacatgtgttacgggaaaaaaagaatatatggaaggatcaacttcttacatttattagacctacatcagcattttagacttgctttttgtgtctgatgagacttcctgaaacatgtatgcatactgcccaagcccaagaagcatgactaggatgctcgacctcaatgtactggaattataatccttggtttcgaaacagaaatgcag

SEQ ID NO: 79439 - DNA, 1094 bp, Zea Mays
gagatttcagtcctgaaagttatgaatgaacatgttgtattttgtgagcatcaggtcacgtgattgccattggacaaaaacgtgataaaagtgttaatacttcctattcgatatgttttgtccattcggtgtcattactctaataggaaagacaaagcagagacatggagaagttgaacacaagtattacagcagtacaacactggacaacaaaattaatctctaagcatggtcttgaaaccattagcttctttgaatggtattccattgctttgttcaccatgacgggaatttcttacacagcttcatattacagataagtgatcaagagggaggaccaccgtacaataatacagttgctgagtaagagtattcatccccttgccatcatctatcagaaggtactggaaccactgggtttgaagtctgttcttatggaagacaatgagctagccattaaaccacggaagggatgtgagaaaattgggcggtggaagagatgcgcacaccaatcatctctgtgagagaaagcagtggtattttcctaaacaaagaaataaaagaagaatagaccatgtagctgcctcaattatcggatacttcggtgctcctgctccgtcacctttagtcgtcaatgaaattctagcttcaattggggagatgcatagagatctcagttgcctagaggtgtcgcctttagtggctacctgagtacctgtgccactacattcattgcttttaatatggttcagtcgtgaattgtttggatgtaattgcttaattatgaattctgtttgatcgagtagttttgcatggattgtgctggttttggtaagccttgtgcttactaataccatttgaccttcttttctcttctcttgatgaaaaacatgtgttacgggaaaaaaagaatatatggaaggatcaacttcttacatttattagacctacatcagcattttagacttgctttttgtgtctgatgagacttcctgaaacatgtatgcatactgcccaagcccaagaagcatgactaggatgctcgacctcaatgtactggaattataatccttggtttcgaaacagaaatgcag

SEQ ID NO: 79440 - DNA, 1387 bp, Zea Mays
ggcaaagctctggttcttcttttaacgcaagaaagaaagaaagaaaaggggcaggaagaaatcgagcctcactcgatccatcgcctcgccgcagcacacacgaggccggcggcgccatggccatgaagctggacatgtccgcgctcgagaccaacttcgccaacctgaccgcctccgccggcgacgacacgtacttctccgccgaggcccccgacgtgccgtccatggtgctccccatctgcgacgacttcgacggcttccaggcggccaccaaggatatggtgaagaataagaaggggacgaccacgcttgccttcatcttcgacaagggcgtcatcgtcgccgctgattccagggccagcatgggcggttatatatcctcacaaaccgtgaggaaaattattgaaataaatccttacatgctggggacaatggctggaggtgctgctgattgccaattttggcataggaacctaggaaccaagtgtcgtctccatgagctttcaaacaagcgaaggatctctattgctggtgcttccaaactgttggctaacatcctttattcatatcgtgggatgggactgtcgattggtacaatgatcgctggatgggatgagaagggtcctggcttgtactatgttgacagtgagggtgcgcggctcgtggggaacaggttctctgttggctctggttcactgtatgcttatgttaccgcttcagcatgtcagttgaggaagccgccgaattagcgcgacgggctatttatggggcaacattccgtgatgcagcaagtggtggttgtgttagtgtttaccacgttggccctgatggttggacgaagctttctggggatgatgtcggggagctgcactaccactactacccggttcagaaaactccggttgaacaggagatggccgatgcgcctactgcttctgcttaaacctgttgctgagaagaccttgagcggagccgcatgtatccatgaaccatgaattgtagaagcgccatgtttatgaacgaacttggacatgtttgtctcacatcgttagatcactctttgtgttctgttgattgatatcttaaatttgcgcaacagtccttttgagatttttttagatctgtgctatgttgactccagctgtctgcaatcagatctcgttctccgtacgtggacagtagaattcatgcacttctttttgaggctaaatttttaagtcttcaacgcttttttaataccaatttcagtctttctcttctctcactacaggctggttttcttaagctatctctaacatctcttctaaaatatagtgttacatggctatatgcatgcctttacacatgtttaaactatctactccactggtgttggataagtttttta

SEQ ID NO: 79441 - DNA, 2106 bp, Zea Mays
atggagaattttccacttcatcaacgtgtagaggcgtcaatggagatttttccaccggtacgacttcctgaaaaaatcctagtgaaattcacaggtccaaatccatgctatggtgtcgctcagatcatatgccaatggctgcaggtacaaggtttacgtggaggggaacgcgtggtcggtgagcgagaagtacatcctggcgtgcgactcgccggtgctgttcgtgacgacgctcttccaggaaggacatcctgtgtccagggggctcgtcgccggcaatcactactggcccccatcaaccgggagcacatgtgcaagtccatcaacttcgccgttggctggggcaacgagcacccagtgcaggcgcaactcatcggcgagcagggcagccggtttgtgagggaggagctgagcatggactacgtctacgactacatgatgcacctgctcaccgagtacgccggactgctccggtacaagcccgccgtgccggagaaggccgtggagatatgcacggagtccgtggcctgccctgcccagagcctgcaccgggactgcatgatggattccatggagagtcacgttgcaggcttcgacctatgcacactgccaccgccgttcaccgacgaggaggccaaggcaatagccgacagggaagcggaggtcttgaggaaggtagagaagatggaggactaggcggcaagctagatagctgaaatctgacatcaaacaatttgatgcaaatgaggaaaacgagaagtttaatacaggtgcacaggaaaaaatagtcgatgttaaaagcattgtgaaataagtttgtacctgtaagtgcaaaccacctgtatacatccattgccattgatgttccactttcttcaagctcctcattttccgtggatttcacgctttcatttttcattttcctttttctgtcttcaagtgagaagcaagaaacgaatatgacatccagtttcacggtatattttttttcactcccaattctcaaagttgaatcatcaggtatacaggtagataccatatgcattggttttccatgcactgaactatctctgtccctttagacgtgcaattcttcatcctgcagaagagcaaacacttggatgttcttgtatcaaaacaaggcgatttacccaaaaacggggaaacgcataattagaagagtcgattgccagaaaatcattttttccctgtgttgtcaactttaactagataaatctatgatacagagaatgataccagaatacgttaaacatgctattttgttttagtccctaaggaaaaaaaaggatagtggaagcacaagactagagagtagactgccccgttagaaaacaaatggattagatttaaggtggttataacaatatatataattagttagaaggcacgaagcagtgtcttctgccctatcatgaaatcaagtattgctgtgaagtaagatgaacctgttaggcatgtttgtttgggcttcccggaagcttttagacctctgtttctagacctttcaaaacgcttttaaacgctaaaaagctcctggaagccaaaaacaagaagctcagtacagtgagctttggggcatttggcttatgggagcagtttggcttttggaaagtccaaaatctaatagtctaaaaatgaccaaaagctcaaacaaatcaacgggtagtccacaggaatgcgaatgccactagttgtcaacccaataggcataaaaaagatatccagcgtctggtcatgaaataattagttacttacagcatttcctttgacaatgcttcgtcagcctttacttttcaaatgtattatatttattgttgactatgaaatggagtttcacattattaggtagaccctcatcgcgcaattgtaaatcctttttagaaatataacaaacacagcactgatttttaaaacttgtattaaaaaaagacgggtaacagaagggataaatgtgtgttgaataaagatcagaccaccttagtgagttcactaactacatatatcaagatcttttattatagtgtctaaaagtaagacaataagtaatacatcataaaatatcagtacaaccttttctaacctaat

SEQ ID NO: 79442 - DNA, 3154 bp, Zea Mays
ataaaactttatgagtttatagtgattaaaaacatggacttattatctatgtgtttgcactaacacctactccctcagtactaaattaaaatttgttttatattattaatagattcatacaatacttagtataaaatgagtttttcattcataataagtatggagatgtgtatgaaagtggatcaaatatgatggagttaggtccggagtgctataactgacatctacacttgagtacagtacaggtgatggcgggttgttttcctacaaatccaaggacctttctgcgaaatgtttttcgtggatcgctctccgagcagcaatcccgtgtaggttttaataagaagaagaaataccccgcgacccacgtcaattcgagttatttgagattgtaacaatctcgtcgcgtggcttcgccactttattactccgcagccgcgcatcgccattttggtattctgaagctcacagccgcgccacattgggacagttattctcccgcgctctgttaccttccattaggtaaggtaaaagtcaaaattgtccctgctgtttacacgaggccggtgaaaacctaactccccctcactcctctcttcttccacggggctctccttctacggcgccgccactactttgtgctcgctcctcctccgagagcacgattcctccaatggctactccggctagagggaaaaaattcaattgaacttgtgtcaaatttctgtccattcaaatttctgttttcagtcaactgttttcagtccatttggacagaagctggtaactgtagaaattggacagcttcattttctgcctgtaaacagcttgatttcgacagcttcattttctacctgaaaacagcttgatttggacaaatgaacctgtgtccaaatgaagctgaagcttggctgtggctgaatcaagaaaacaacatttcagtcgttgtccaaaagaatctgaagctgggttgtgtccaaaggaacaacttgatttggacagcttgattttcagttttcagtccattctataaatcagaatttcagtccattcaaccagagataacagaatttcgctaaacagaaaatcagcttcatttggacagagaaaacagctaactagagataacagggggtggcggcgcggccatctggctgctggcagggggtggcgcggccatctggctggagctgctggcagggggtggcgcggacggctgctgggagatggcagcgctcgcagctggaagcaggcggcgtcgcaggcatatggtggtagccggctgcgcgaccacctggtagcgaggcccctagtggcacacggcggcgcgagttctgttttctggtggcaggaagaacacccgagcgcaagaacaccctggggtagattagtccgaagaattgaaaaacagacgttaacagagcgcgggggaataactgtcccaatctggcgcggctgtgagctccagaataccaaaatggcgatgcgcggctgtggagtaataatgtggcgaagccgcgcgacgagattgaataactccgtcccttccggccttccctctatctttcgctcgctctcggcgacagctgggcgaccgtcgtcgccgccgcccttctctaggtgcccaggtcttcgccggtccctttgccgcctcttcgccgccgatgagcaccagccaggttgtttaggagacttaattactgtaatttgggttggtttgaaggaagaaaagaagttgaaccatggggaagagaaagtcagctgctaagccacctcctaagaagcggatggacaagcttgacactgtcttttcctgcccattctgcaaccacgggagtagtgttgagtgccaaatgtgagtatcattttccaagctttcctatttagcttttgatgctagatttagtatcacattcagaattttttacttgatttctctcttttatccagtgacatgaagaatctgattggcgaagcatcttgtagaatctgtcaggaaaacttcagcacaactgttaatggtatgccaaacctatgtataaaactgtaccggttgctcctaatttcacttctatgaactgtactaatttgcatcacaaagggtttggtctcaaacaactcatgaactcattttcttattattgggctgatggacaaggcaacatgaaatttttcatggtacctgtgaacagagcatagcctacaaactgcagaaccattcccatttcatcttgtagtcttgtcttgctaataatggactttgtgggctgtctgttccctgtgtaattcatttgaccatgatagttcttgatcatgtgatatcatagaatgtgtcaaaaactgcatcacatcaaattaaaactggatagaacactatacataggtaatagtataattaaatgttaagaagtatttctttatgtttattttaattactaattgtcttatgtgatctcttttcttgccgcactcactgaacctattgatatgtaagtcaatcctgtcaatccttgcaaattagtgaaaaatctgtgatgtttatcctcaactggaactgagctggaatccttttcttttcctcacagatatagtgaatggattgacgagtgtgagcgtgtcaacactgttgaaggcgacgatgatgcgtgagcttgccccatgcgatgaaactgttacctacaatcgtaatgtaatgtgctggtattctcgaatgccatagcccatagtcagccatggcttggaataacgtagtggctgactgatatgccagtaggcaccttatctagtacttacagaactaaaaaaagtttgtactatacatatatggacaaccttataagtggctatgtgtgtacctatcctaacgcttatcccagatggtgtatcagcgtttttctgtgagattgttttcaagcaaggggttgttcattcattgggtcttctcaggaaaaagagaattatgctgcagttaaccagatggccgctgttgcgtcgacaatatagggtaaaacaaatgcaaccactgcagcgaaagatattcatagatagaattgttttcagttcattcaacgctgaaagcagtttcggtctggaggctgagctttggatcattggatggcagctttgacacctggagtaccgctcattagttttt

SEQ ID NO: 79443 - DNA, 1124 bp, Zea Mays
cggcgcgagttctgttttctggtggcaggaagaacacccgagcgcaagaacaccctggggtagattagtccgaagaattgaaaaacagacgttaacagagcgcgggggaataactgtcccaatctggcgcggctgtgagctccagaataccaaaatggcgatgcgcggctgtggagtaataatgtggcgaagccgcgcgacgagattgaataactccgtcccttccggccttccctctatctttcgctcgctctcggcgacagctgggcgaccgtcgtcgccgccgcccttctctaggtgcccaggtcttcgccggtccctttgccgcctcttcgccgccgatgagcaccagccagaaaagaagttgaaccatggggaagagaaagtcagctgctaagccacctcctaagaagcggatggacaagcttgacactgtcttttcctgcccattctgcaaccacgggagtagtgttgagtgccaaattgacatgaagaatctgattggcgaagcatcttgtagaatctgtcaggaaaacttcagcacaactgttaatgatatagtgaatggattgacgagtgtgagcgtgtcaacactgttgaaggcgacgatgatgcgtgagcttgccccatgcgatgaaactgttacctacaatcgtaatgtaatgtgctggtattctcgaatgccatagcccatagtcagccatggcttggaataacgtagtggctgactgatatgccagtaggcaccttatctagtacttacagaactaaaaaaagtttgtactatacatatatggacaaccttataagtggctatgtgtgtacctatcctaacgcttatcccagatggtgtatcagcgtttttctgtgagattgttttcaagcaaggggttgttcattcattgggtcttctcaggaaaaagagaattatgctgcagttaaccagatggccgctgttgcgtcgacaatatagggtaaaacaaatgcaaccactgcagcgaaagatattcatagatagaattgttttcagttcattcaacgctgaaagcagtttcggtctggaggctgagctttggatcattggatggcagctttgacacctggagtaccgctcattagttttt

SEQ ID NO: 79444 - DNA, 1219 bp, Zea Mays
ctatacactctgttattatatatgttgtcttcttggcgcatgtatgagatgcacccggctttgttctttaaaaccgggtgttacagacagtcaggcctcaccaaatcagtgacaatggtaggtggggctcatatctgatgtggagcaatgttcaatggcgaggaggacagtcagcctcaccaaatcggtgacaatggtgggtggagctcttatctgatgtggagtggtgttcaatggcaaggaggacagtggacctcgcaaatcggtgacaatggtgggtggcaagggcccgatgcatggcagtcgaagcccttttggtcggcgatatacggtctagggcatctcttttgcggcagtggtggcaggctagcctactacaagacacagttcggtctggtttcttctttaacgcttatgattagcattttaccttgacacttgatgcatgcagtggttttaacttagaattcaaaaattaatttgctgctttaattgtaattaggctcggtttggaatatgaaatcagcctacaggtctatatttgacaaagttgcatcagtcccgcgtcatcttctgcttcgtttgctccactaatggtttttgtccatcatctgccctcccacatccgcctaccgccattcaaacacccgcaccctcgcaccacatgcgactatgaagtttgccattttttcagaaagaaaaagtgccccccccaaacacaaacaatgctatatttttacttgaacaaatatacgcatgtacatgatatgaatatgatgttataggtctgactacagtaaggtttaataaaactatttgatgaaattaattttgtatagcattaaccgaatcatcatgcatacacaagtgtttaccgtagcaatgcatgagcactcaactagtgagacataatgtgcggctcacttactatgaatgaaatcagtagcttgattaatatccacaagtgaaggagcaaacatataatctcttgtaggaataacaaggtgatcgatcccacgtgactgtaaatttcagcagaggagcatttaggtcacagcgtatttctgattgaaaatagattgggtcagcagttctgttcccggtggcatatgcaaggtttaatgaaactttgaattaaggatccgtgaaacaacataaatttttcagcatgaaaagggaaaataacttacatgtcacttgccttatacatagatgatgg

SEQ ID NO: 79445 - DNA, 50 bp, Zea Mays
tgccagattggagatcgagcgaattggcgagtggaaagattgggattcgc

SEQ ID NO: 79446 - DNA, 2235 bp, Zea Mays
gcacatccctccccatcccgtgcccccgtctccatccccactcctccaacggccgcgtcgttctcgttcgcccgccggcatcccattcgctcgtctcctcccctccgccggtcgctgtcaccccgcgtcgtcacgcgcccccggccgccgccatcactgtcatcgttccccctcctaaagccacccgtacgccagccgcaatggatttttgcaccgcatctgcatcctctcgccatggcgccgccgcccgcgtcgcctgctgactcggcccctgatccaaggccgaccgccagcgcgcccgtgcccatcaccgtgccgagcccgcgtgaccacgcgcaccaccaccacctggtagatcgtcgggacacgccgcggggccgcgcgtgggaaccggagcggaaccggcgcggagaggcgatggacggtgctgcagcggtcaagctggtacccggtgaggccgggtacgtcttagaagacgtgccgcacgtgtcggactacctccccgatctcccgacctactcaaatccattacaagataacccggcatactctgttgtgaagcagtactttgtaaacccagatgacaccgtctgccagaagattgttgttcacaaggatgggcccagaggtaaccatttccgtcgtgctggacctcgccaaaaggtatattttgaaccggatgaggtccacgcatgcattgtcacttgtggaggattgtgccctggacttaatactgtgattagggaaattgtatgtggcttatctgacatgtatggtgtcaccaagatacttgggattcagggtgggtacagaggcttctatgctcgcaataccatcaccttgactccaaagagtgtaaatgacattcacaaaaggggtggaactattcttggatcatctcgaggaggtcatgacaccgtgaagatagttgacagcatccaagatcgtgacataaatcaggtctatgtaattggtggagatggtactcaaaggggtgctggagtgattttcgaagaagttagaagacgcggtctcaaagtttctgttgctggcattccaaagactattgacaatgacatccctgtaattgacaagtcatttggtttcgacacagcagtcgaggaggctcaacgtgcaataaatgctgctcatgtggaggctgtaagtgctgagaatggtataggtcttgtcaagctaatgggtcggcacagtggttttattgcacattatgctactctggctagcagggacgtggattgttgcttgatcccagaatcaccgttctatttggaaggcgaaggcggactttttagatacatagaaaaacgtttgaaggacaatggtcatatggttatcgttgttgctgagggtgctggacagaaacttattgctgaaaccatgcagtcaattgggaaagatgcttcaggcaacgagctgcttcttgatgttggcctttggttatctcagaagataaatgaacatttcaagaaaaacaagatgaccattaatctgaagtacatagatgtttcttctactgcagatccaacgtacatgatacgtgccatcccaagcaatgcttctgataacgtctattgcacactgctggctcacagcgtggtccatggagccatggctggatatactggttttaccattggccaagtgaatggtcggcactgctacatcccattctataggataacagagaagcagaacagagtttcgataaccgacaggatgtgggcaaggcttctctcgtcgacgaaccagccaagcttcctttgcaacaaagtcgtcgaggaggcaaagaaggaacatgaaagagcaacgcgacttttagatggctcgccttcccatcgaaaaggttgacgtcgagaaggttgcggcttccaacttgggtcctactaccaactgaggtcgactgccgctgatatgtgcggcggatgaaccttttgcttaccacggtttcagtagctacggcgaccggtgtttctctcactccagttttttctatcaaaaaggaacacattatccctttctaataatttaatagtgttaaatactatcactatgtacagtttggctggcacatgtctgactataataacatgccattttcattgttgttcaagtatattcttttgtaattttgtgtaagaataagttcatagacccccaaagaaagttattataattttatgacagaaatctaagaaccacagtactggactagaa

SEQ ID NO: 79447 - DNA, 3589 bp, Zea Mays
gcacatccctccccatcccgtgcccccgtctccatccccactcctccaacggccgcgtcgttctcgttcgcccgccggcatcccattcgctcgtctcctcccctccgccggtcgctgtcaccccgcgtcgtcacgcgcccccggccgccgccatcactgtcatcgttccccctcctaaagccacccgtacgccagccgcaatggatttttgcaccgcatctgcatcctctcgccatggcgccgccgcccgcgtcgcctgctgactcggcccctgatccaaggccgaccgccagcgcgcccgtgcccatcaccgtgccgagcccgcgtgaccacgcgcaccaccaccacctggtagatcgtcgggacacgccgcggggccgcgcgtgggaaccggagcggaaccggcgcggagaggcgatggacggtgctgcagcggtcaagctggtacccggtgaggccgggtacgtcttagaagacgtgccgcacgtgtcggactacctccccgatctcccgacctactcaaatccattacaagataacccggcatactctgttgtgaagcagtactttgtaaacccagatgacaccgtctgccagaagattgttgttcacaaggatgggcccagaggtaaccatttccgtcgtgctggacctcgccaaaaggtatattttgaaccggatgaggtccacgcatgcattgtcacttgtggaggattgtgccctggacttaatactgtgattagggaaattgtatgtggcttatctgacatgtatggtgtcaccaagatacttgggattcagggtgggtacagaggcttctatgctcgcaataccatcaccttgactccaaagagtgtaaatgacattcacaaaaggggtggaactattcttggatcatctcgaggaggtcatgacaccgtgaagatagttgacagcatccaagatcgtgacataaatcaggtctatgtaattggtggagatggtactcaaaggggtgctggagtgattttcgaagaagttagaagacgcggtctcaaagtttctgttgctggcattccaaagactattgacaatgacatccctgtaattgacaagtcatttggtttcgacacagcagtcgaggaggctcaacgtgcaataaatgctgctcatgtggaggctgtaagtgctgagaatggtataggtcttgtcaagctaatgggtcggcacagtgaagcaaaagagcctccagctgaataggttaaacattctgactagcacttctcagctcctgaagacctgagttggactcttcgttggagtgaatttcaggatgaggttttattgcacattatgctactctggctagcagggacgtggattgttgcttgatcccagaatcaccgttctatttggaaggcgaaggcggactttttagatacatagaaaaacgtttgaaggacaatggtcatatggttatcgttgttgctgagggtgctggacagaaacttattgctgaaaccatgcagtcaattgggaaagatgcttcaggcaacgagctgcttcttgatgttggcctttggttatctcagaagataaatgaacatttcaagaaaaacaagatgaccattaatctgaagtacatagatccaacgtacatgatacgtgccatcccaagcaatgcttctgataacgtctattgcacactgctggctcacagcgtggtccatggagccatggctggatatactggttttaccattggccaagtgaatggtcggcactgctacatcccattctatagcacgctgggttgcgcgcgtggcgtggcccgtgacgactcaaaaaggcccatgtggaaacagaaagttccgtcagcggtgaccggtgagcagtcgcgttttagcgggacgtttgtcccacctcggaagcggaagacggggaggcagggggaggcgggcataagaaacggcggtgggctacctgctgaagacatctttgcgcttggggcaatgacgcagcttatgaggtcataccgaggcgcgtcaattgctggttgaaaactatttccaaaccccctctttggcccactgggccactgagaatttctggaagggctccttttcctcggagaagcaatcttgagtcctggcctgggtcttcgctgccagcacgcttgtggccaagaaacgttgggggcagtttggacctcggagcagcagcatccatggcgggagaggaggccgggaggaggggcgttccctctctgctgaacccgccgtccgcttccagcgaggggcagcaggagcacatcgcctctgatgtcacacagctcatcggatggacacctctggtcgagctcaagcgaatcgccgccaaggaaggggtatgcgcgcgcatcgtcggcaaggtggaggcgtaccagcctctgtgctccgtcaaggatcgcagcgctctgagaatgatcgaagacgcagaggagagggggctgatctcgcccggcaccacgacgctcgtggagccgacgagcggcaacctggggctgggcctggtcctcgtcgccctccgcaagggctacaggttcgtcgcggtcatgccaggccagtactcgctcgacaagcagatcctgctgacatacatgggcgcagagctgtacgtaacagatccatccctggggttcccgggcataaccgccaaggtcgaggagctcaagaaggagctgcccaacgtgcacgtcctcgaccagttctccaacagagcgaatcctgaagcgcatgttagatggactgggcctgagatctggaaggacaccgccggtaaggtggacatattcgtggccggttcaggctcgggaggcacggtgtctggcgtcggcaagtacctcaagacgcagaaccccagcgtcaaggtcatctgcgttgagcctgccgagagcccagttgtttcaggcggggaaccaggcagccacaagatccagggaatagggccgggattcataccggaagtgctggacacctcggtcatcgacgaggccgtcacggtgaccaccgaggaggcgatggcgggcgcccggaggctggccagggaggagggcctgctcgtcggcatctcttccggggccaacctggcggcctgcttgaaggtcgcggcgcgagaagagagcaaggggaagatgattgtcaccgtgtttccgagcgggggcgagaggtacatgacctccgacctgttcgccgccgccagagaggagtgtattgccatgacgttttgatctttttttaccccctccccccagaaaaaaggggaaaacaaatacgcgtgtatctttatcttcacatggtattggtttaccatgcatgtacatttaaaaatatttttccccgaaacggaatagaacagctgcgtgcttgtttacacatcaagtcgatctctcctgaaccgatggtgaaaacagtggcggagcccggatccggaaaagttctaactactacaacaaaaaaaccggtagtatattatcaccgaggtctaatctaatttaggaaccccattttcttaaggtatctccatttttctaagagaaattagctaattttttccttagaaaaaataagaa

SEQ ID NO: 79448 - DNA, 402 bp, Zea Mays
gggaactcgaagatgagtttcgtgtgtttggagttctgcgaaggtaagaatggatggagagttgaactatctcgtaattctagtggtcgtggtggtcgtgatcggtatggtggatctgagtcgaagtgctatgaatgtggtgagactggacactttgcacgtgaatgtcatctgcgcattgcctctggaggtctaggcagtggaagacggcgcagtcgtagcaggagcaggagccgcagcggcagccctagataccgcaggagcaggagccgcagccgcatatcagtagatgaagcacatgctttcatatatatgaacatcttcttaaccatgttctttttctttctttttagctgtcatgcaaaccaatgggtttgattattttgcaagagtacagttcag

SEQ ID NO: 79449 - DNA, 1386 bp, Zea Mays
ataaacaatcatgtttatttgtttaatctgccttcttcatctacttgccatgtttaatttgcaaatggatttgagtagctatattacatgttttcatgtcctggaattgctactgttcattgctgttataattacatatggcatttatctgagttatatgcttgttttatttggaattagtatatttaatctatttaaatatgtagaaagcatgtcacttatttctctaaatttacaacaccatgtcctggaaatatgtctgtgtggtgtggagaatgctgacaccattcagaccaaagtgtccaaaagaaaaaaggaagatcaaaatgtcatggcaatgcactcctctcgcacatctgcaaagaggtcggagttgatgtatctctcgccgccacttgggaacacagtgacgatcatcttgcccttgttctcctgtctcgaagcgaccttcaaacaagctgccaggtttgctccggaagaaatgcccacgagcaggccctcttccctggccagcctcctcgcattcgccatggcctcctcggtgctcacggtgacggtctcgtcgatgaccgaggtgtccagaacttcaggtagaaaccctgggcctactccctggattttatgcttgccaggcgcgccacctgaaatcactgggctttctgcaggctcaacgcagatgatcttgacgcctggcttttgcatcttcagatacttcccgacgccagaaacagtgcctcctgtgcctgaaccggctacgaatacatccaccttgcctgccgtgtccttccagatctcaggcccggtcaatctgaagtgggcttcagaattcgctttgttcgtgacttggttcagaacatgtacatttggcagctgttttcggagctgttcaactttgtcaaacatgcccggaaagccaagggccggatctgttaagtatagctccgcgcccatgaacctcagcaagatctgcttgtcaagcgagtatttagccggcatgactgcaatgagcctgtaacctctctgaatagcgaagaggaccaaccctaaccccatgttaccactcgtcggctccaccagtgttgtgactccaggcgaaatcaatcccctctcctcagcatcctctatcattcttcacaggaaggaaaattggaagagaagtgtcagcgcaggcgtgcgtctcgtgtcactcttcagaagaaaacagaaagaactgcagcgctcgacacacacagacatattctgttgggtttgcagccggagaagagaaagggaaaggaaaaggatgggacctcaaagcagagcggtccttgatggagcaaagtggctggtaagcctccatcttgccgacgatccgcgcatcgatcccagcctcgctggcgattcgct

SEQ ID NO: 79450 - DNA, 465 bp, Zea Mays
aacgaataggtccatcgccgcgcgacagcccactccagccgcgcccagccccgtgaacatccttcctctatcctataccctccagctccagccgccgccagccgtggaggtggagccgcccacgcccagaccccggagcaccgctggagctcgcagcgccgctcgcccggagcacggaggccggaccgccggacggccggagcactgccgtaggtcgcaggcccctcgccccaccggcgcccgaagtccagccgccgactcgccgactcgcaggttgtccagccgccggccgccgactcgtcgttgtccagccgccgaccgtcgactcgttgttgtccagccgccgactggtcgttgtccagccgccgaccacgcggtgaccgtgagcccgtgagcctgtgaccgtgagcacgtgagccaaggagaggtcgtgctccgccactggggagggaggtggtggggaat

SEQ ID NO: 79451 - DNA, 679 bp, Zea Mays
ggccacgaagatgtcgactttgcctgccgtatccttccagatctcaggccctaatcacagacgaacagagatgctcctgtgcaaagatcggcactaccagtccatctaaagtgcgcttcagggttcgccgcgtttgcgaactggtcaagaacgtgcgcgttgggtatttctttcctgagctgttccagcttgtcgagctgtccctggaagccaagcgcaggatctgaaaaaaaaaacagcatggcatttgatgttagatttcagaacatggtaaagccgagccggccagtcctgcaaacgcgaaaccaacggacatcgatggcgatgagctgcaaccttcacttccttaccggttaacaccaaatcggcccccaggtaccgcagcaggatctgcttgtcgagcgagtactcggcgggcatgaccgcgacgaacctgtagcctcgggccagatcgatgtacgccagggctatgcccatgttgccgctcgtcggctcgaccagcgtcgtggcgccaggcgagatcagccctctctcctctgcgtcctcgatcattctgtgaagaacatgacagccacacgactggacattggtagaaaaaaaaatgaccagcgtcgtaggagctcgaaccatagatagtaggtaatacctcagagcgctgcggtccttgacggagcagagg

SEQ ID NO: 79452 - DNA, 3004 bp, Zea Mays
tccagtaccacgctgcagttccctttccgttcctccgtttctcgccagtcgccaccgtgtgtctattactccattccctcccgccgctccgctccacgaaaatggcgcctccgctcgaagacctcacccgggtactcgccgagctcgcctcgggcctcgcccagcctcctgctggcggcggtacattctcatccaccgactccctcccggcctccatctcctccctcgccgccgccctcaaccccagcggcgacggggccgccgcctcatccggaaccggggttctggacgccgcgctctccctcatgtgcttcgacccgctagaggtgaatagtgcccgcgtcaactgccttgtccgcaccctcgtctccgtgctctcggcgtcagtctcgtgctgcgtggtccgtcccgatggggacgctgctgaggagatgctctgtgtcgggagttccgtgtcgcccctggactgccgcgagctgctccggtcgtgtgcagccctcgtggagaaattgggggattgtggcgatagaaggcattcctacgatctgttgtatgctgttgtgaaaactatcctgctatcccctcactaccagtgtctttccccgttaccatattataaggaagaggaagaaagagtatctcatatgggaaccattgctgcggagttaataaaccattcttctgatcatatccttcctagtgaccactcaatcccaccaaggttgctttcatggcatcttgatccattaattcttaggcatgatctctcagcaatgctccaggaggtaattagaaggcccttgctttgcctgagaaaggaattgtataatcggatggaatggcgtatcatcataatttgcctggtttgctgcccaacaatatttatggagatgagatcactattacacttctggcttctagcaacgtaacttcacaccttaagcactcatgaaatgctctgtactcttgtttgcactgagtttgatttctctcggtctcggtcaatgggcttctacacatacttttaatcttacagatagaactgcagagcagcaaaggttgagtggcttgccacatcatgacactccaccaaatagttatttcagaaacttcgatatgactaaagcatagacaaggcaaaattaggaatgcaccaaacaggtcgttggttaaagttatcttaggaaagtgggttgaaacagatttcatgatgaacactaccaaaccatctctgcagagcttattccacatttatcacttaattttttaattccaattttaaccttacatttttaaagaactaaaattgactgaatttttagttatttattttttgtatcattgcttgttgtaccctaaatgatattttaccaacagtactattatgaatgttacatttacacatctttatgtattgtctgaactggttagtggttatacattgtgggctcactgtttaaggactgcttcttgtaaaatctctttattcatcctttatttgtgcaggggtttgggttctgtgctagaacttaacaatgcattggtatcatcagcattagacattcttctcaagcctatgtcatggggaatatccatagaattagggcagagatttcccttttctcatgcttacttcccaagccaacaaagtgacttgcttgcgatactaactggacccttatcttataaaggttttttggacctagtttcttatattagtgccttggttcatttggacaacacaagaactagatgctcttcgcagaaaaacttacaattacaaccatcgaagggattggtaaaatacaattctgcttggtacatgattattagtttccctatttggttcagttatgcaactgctttacttttccacagagaaggctcacaagattatttatcagaaacattatccaaagagataactgctgaatcaataagtgatgtcagtcttgttcagagggcagccttttacctttcttggctgctatgcccttataatcatgatcaacgcgagatgctatcaaacaatattttggaaatatcacattcttgggctaggaacaacaaaaagtgcgtaagctaccaaagtactgtgaataataggaggaaactgcgaatacccacagctgcggactctgagaaattccatgtgccagtcaacactataagctcccttgttaaagaatttgatgatcgctgtgtaaaatgttgtagcccaactgcctttcctcaagcacaagttggaaatctatcggacctccatcccttatactttaacctgttgcatcagtggattcctttgggagtattgcttgtatcacctagttgtgttaacgagcagaactgtgacatcctcctgcgctacacaagcactgggcaggttctggagtcaaatggagcacgagtaaaaacaaaagatgatgccactaatgatggtttcttaggcagctgcattggtactgctgagagatgggcattgactggagcatatctcatctttggctggcttgacgtagttgaggatatggccccattgatatttgattgcgaagataaatgtcatagttttgtcagccaactcagaaacaagacaggcccatacctgctcaagtgcgtgaagtcattatttaagacgttggaacagccaaatcaagataaagattttgtgattgatcttcataataggttgttaaactgggataagaacgtgcaaggctgtgagatatttggggatgttatccttgaaatgaacaagaagtttaatcttcctttgtagtagtgaccagggattctatgcagctcttaaatatttgaacgtacttaaaagattgtcttaatatgagcgtatgagaaacggctgtatgaaccttagtttttggcttttgttgagtttcaactctagcctattctaaaagatttttgttgttgtcgttttaaatatctaaaatgaatgtcggattctttgcctctgtactctccttttataaattgtttgcaattt

SEQ ID NO: 79453 - DNA, 2238 bp, Zea Mays
tccagtaccacgctgcagttccctttccgttcctccgtttctcgccagtcgccaccgtgtgtctattactccattccctcccgccgctccgctccacgaaaatggcgcctccgctcgaagacctcacccgggtactcgccgagctcgcctcgggcctcgcccagcctcctgctggcggcggtacattctcatccaccgactccctcccggcctccatctcctccctcgccgccgccctcaaccccagcggcgacggggccgccgcctcatccggaaccggggttctggacgccgcgctctccctcatgtgcttcgacccgctagaggtgaatagtgcccgcgtcaactgccttgtccgcaccctcgtctccgtgctctcggcgtcagtctcgtgctgcgtggtccgtcccgatggggacgctgctgaggagatgctctgtgtcgggagttccgtgtcgcccctggactgccgcgagctgctccggtcgtgtgcagccctcgtggagaaattgggggattgtggcgatagaaggcattcctacgatctgttgtatgctgttgtgaaaactatcctgctatcccctcactaccagtgtctttccccgttaccatattataaggaagaggaagaaagagtatctcatatgggaaccattgctgcggagttaataaaccattcttctgatcatatccttcctagtgaccactcaatcccaccaaggttgctttcatggcatcttgatccattaattcttaggcatgatctctcagcaatgctccaggaggtaattagaaggcccttgctttgcctgagaaaggaattgtataatcggatggaatggcgtatcatcataatttgcctggtttgctgcccaacaatatttatggagatgagatcactattacacttctggcttctagcaacgttttttggacctagtttcttatattagtgccttggttcatttggacaacacaagaactagatgctcttcgcagaaaaacttacaattacaaccatcgaagggattggtaaaatacaattctgcttggtacatgattattagtttccctatttggttcagttatgcaactgctttacttttccacagagaaggctcacaagattatttatcagaaacattatccaaagagataactgctgaatcaataagtgatgtcagtcttgttcagagggcagccttttacctttcttggctgctatgcccttataatcatgatcaacgcgagatgctatcaaacaatattttggaaatatcacattcttgggctaggaacaacaaaaagtgcgtaagctaccaaagtactgtgaataataggaggaaactgcgaatacccacagctgcggactctgagaaattccatgtgccagtcaacactataagctcccttgttaaagaatttgatgatcgctgtgtaaaatgttgtagcccaactgcctttcctcaagcacaagttggaaatctatcggacctccatcccttatactttaacctgttgcatcagtggattcctttgggagtattgcttgtatcacctagttgtgttaacgagcagaactgtgacatcctcctgcgctacacaagcactgggcaggttctggagtcaaatggagcacgagtaaaaacaaaagatgatgccactaatgatggtttcttaggcagctgcattggtactgctgagagatgggcattgactggagcatatctcatctttggctggcttgacgtagttgaggatatggccccattgatatttgattgcgaagataaatgtcatagttttgtcagccaactcagaaacaagacaggcccatacctgctcaagtgcgtgaagtcattatttaagacgttggaacagccaaatcaagataaagattttgtgattgatcttcataataggttgttaaactgggataagaacgtgcaaggctgtgagatatttggggatgttatccttgaaatgaacaagaagtttaatcttcctttgtagtagtgaccagggattctatgcagctcttaaatatttgaacgtacttaaaagattgtcttaatatgagcgtatgagaaacggctgtatgaaccttagtttttggcttttgttgagtttcaactctagcctattctaaaagatttttgttgttgtcgttttaaatatctaaaatgaatgtcggattctttgcctctgtactctccttttataaattgtttgcaattt

SEQ ID NO: 79454 - DNA, 2295 bp, Zea Mays
gttcctccgtttctcgccagtcgccaccgtgtgtctattactccattccctcccgccgctccgctccacgaaaatggcgcctccgctcgaagacctcacccgggtactcgccgagctcgcctcgggcctcgcccagcctcctgctggcggcggtacattctcatccaccgactccctcccggcctccatctcctccctcgccgccgccctcaaccccagcggcgacggggccgccgcctcatccggaaccggggttctggacgccgcgctctccctcatgtgcttcgacccgctagaggtgaatagtgcccgcgtcaactgccttgtccgcaccctcgtctccgtgctctcggcgtcagtctcgtgctgcgtggtccgtcccgatggggacgctgctgaggagatgctctgtgtcgggagttccgtgtcgcccctggactgccgcgagctgctccggtcgtgtgcagccctcgtggagaaattgggggattgtggcgtgtagatagaaggcattcctacgatctgttgtatgctgttgtgaaaactatcctgctatcccctcactaccagtgtctttccccgttaccatattataaggaagaggaagaaagagtatctcatatgggaaccattgctgcggagttaataaaccattcttctgatcatatccttcctagtgaccactcaatcccaccaaggttgctttcatggcatcttgatccattaattcttaggcatgatctctcagcaatgctccaggagatgagatcactattacacttctggcttctagcaacgggtttgggttctgtgctagaacttaacaatgcattggtatcatcagcattagacattcttctcaagcctatgtcatggggaatatccatagaattagggcagagatttcccttttctcatgcttacttcccaagccaacaaagtgacttgcttgcgatactaactggacccttatcttataaaggttttttggacctagtttcttatattagtgccttggttcatttggacaacacaagaactagatgctcttcgcagaaaaacttacaattacaaccatcgaagggattggtaaaatacaattctgcttggtacatgattattagtttccctatttggttcagttatgcaactgctttacttttccacagagaaggctcacaagattatttatcagaaacattatccaaagagataactgctgaatcaataagtgatgtcagtcttgttcagagggcagccttttacctttcttggctgctatgcccttataatcatgatcaacgcgagatgctatcaaacaatattttggaaatatcacattcttgggctaggaacaacaaaaagtgcgtaagctaccaaagtactgtgaataataggaggaaactgcgaatacccacagctgcggactctgagaaattccatgtgccagtcaacactataagctcccttgttaaagaatttgatgatcgctgtgtaaaatgttgtagcccaactgcctttcctcaagcacaagttggaaatctatcggacctccatcccttatactttaacctgttgcatcagtggattcctttgggagtattgcttgtatcacctagttgtgttaacgagcagaactgtgacatcctcctgcgctacacaagcactgggcaggttctggagtcaaatggagcacgagtaaaaacaaaagatgatgccactaatgatggtttcttaggcagctgcattggtactgctgagagatgggcattgactggagcatatctcatctttggctggcttgacgtagttgaggatatggccccattgatatttgattgcgaagataaatgtcatagttttgtcagccaactcagaaacaagacaggcccatacctgctcaagtgcgtgaagtcattatttaagacgttggaacagccaaatcaagataaagattttgtgattgatcttcataataggttgttaaactgggataagaacgtgcaaggctgtgagatatttggggatgttatccttgaaatgaacaagaagtttaatcttcctttgtagtagtgaccagggattctatgcagctcttaaatatttgaacgtacttaaaagattgtcttaatatgagcgtatgagaaacggctgtatgaaccttagtttttggcttttgttgagtttcaactctagcctattctaaaagatttttgttgttgtcgttttaaatatctaaaatgaatgtcggattctttgcctctgtactctccttttataaattgtttgcaattt

SEQ ID NO: 79455 - DNA, 2251 bp, Zea Mays
ctccgtttctcgccagtcgccaccgtgtgtctattactccattccctcccgccgctccgctccacgaaaatggcgcctccgctcgaagacctcacccgggtactcgccgagctcgcctcgggcctcgcccagcctcctgctggcggcggtacattctcatccaccgactccctcccggcctccatctcctccctcgccgccgccctcaaccccagcggcgacggggccgccgcctcatccggaaccggggttctggacgccgcgctctccctcatgtgcttcgacccgctagaggtgaatagtgcccgcgtcaactgccttgtccgcaccctcgtctccgtgctctcggcgtcagtctcgtgctgcgtggtccgtcccgatggggacgctgctgaggagatgctctgtgtcgggagttccgtgtcgcccctggactgccgcgagctgctccggtcgtgtgcagccctcgtggagaaattgggggattgtggcgatagaaggcattcctacgatctgttgtatgctgttgtgaaaactatcctgctatcccctcactaccagtgtctttccccgttaccatattataaggaagaggaagaaagagtatctcatatgggaaccattgctgcggagttaataaaccattcttctgatcatatccttcctagtgaccactcaatcccaccaaggttgctttcatggcatcttgatccattaattcttaggcatgatctctcagcaatgctccaggaggggtttgggttctgtgctagaacttaacaatgcattggtatcatcagcattagacattcttctcaagcctatgtcatggggaatatccatagaattagggcagagatttcccttttctcatgcttacttcccaagccaacaaagtgacttgcttgcgatactaactggacccttatcttataaaggttttttggacctagtttcttatattagtgccttggttcatttggacaacacaagaactagatgctcttcgcagaaaaacttacaattacaaccatcgaagggattggtaaaatacaattctgcttggtacatgattattagtttccctatttggttcagttatgcaactgctttacttttccacagagaaggctcacaagattatttatcagaaacattatccaaagagataactgctgaatcaataagtgatgtcagtcttgttcagagggcagccttttacctttcttggctgctatgcccttataatcatgatcaacgcgagatgctatcaaacaatattttggaaatatcacattcttgggctaggaacaacaaaaagtgcgtaagctaccaaagtactgtgaataataggaggaaactgcgaatacccacagctgcggactctgagaaattccatgtgccagtcaacactataagctcccttgttaaagaatttgatgatcgctgtgtaaaatgttgtagcccaactgcctttcctcaagcacaagttggaaatctatcggacctccatcccttatactttaacctgttgcatcagtggattcctttgggagtattgcttgtatcacctagttgtgttaacgagcagaactgtgacatcctcctgcgctacacaagcactgggcaggttctggagtcaaatggagcacgagtaaaaacaaaagatgatgccactaatgatggtttcttaggcagctgcattggtactgctgagagatgggcattgactggagcatatctcatctttggctggcttgacgtagttgaggatatggccccattgatatttgattgcgaagataaatgtcatagttttgtcagccaactcagaaacaagacaggcccatacctgctcaagtgcgtgaagtcattatttaagacgttggaacagccaaatcaagataaagattttgtgattgatcttcataataggttgttaaactgggataagaacgtgcaaggctgtgagatatttggggatgttatccttgaaatgaacaagaagtttaatcttcctttgtagtagtgaccagggattctatgcagctcttaaatatttgaacgtacttaaaagattgtcttaatatgagcgtatgagaaacggctgtatgaaccttagtttttggcttttgttgagtttcaactctagcctattctaaaagatttttgttgttgtcgttttaaatatctaaaatgaatgtcggattctttgcctctgtactctccttttataaattgtttgcaattt

SEQ ID NO: 79456 - DNA, 2368 bp, Zea Mays
cgtttctcgccagtcgccaccgtgtgtctattactccattccctcccgccgctccgctccacgaaaatggcgcctccgctcgaagacctcacccgggtactcgccgagctcgcctcgggcctcgcccagcctcctgctggcggcggtacattctcatccaccgactccctcccggcctccatctcctccctcgccgccgccctcaaccccagcggcgacggggccgccgcctcatccggaaccggggttctggacgccgcgctctccctcatgtgcttcgacccgctagaggtgaatagtgcccgcgtcaactgccttgtccgcaccctcgtctccgtgctctcggcgtcagtctcgtgctgcgtggtccgtcccgatggggacgctgctgaggagatgctctgtgtcgggagttccgtgtcgcccctggactgccgcgagctgctccggtcgtgtgcagccctcgtggagaaattgggggattgtggcgatagaaggcattcctacgatctgttgtatgctgttgtgaaaactatcctgctatcccctcactaccagtgtctttccccgttaccatattataaggaagaggaagaaagagtatctcatatgggaaccattgctgcggagttaataaaccattcttctgatcatatccttcctagtgaccactcaatcccaccaaggttgctttcatggcatcttgatccattaattcttaggcatgatctctcagcaatgctccaggaggtaattagaaggcccttgctttgcctgagaaaggaattgtataatcggatggaatggcgtatcatcataatttgcctggtttgctgcccaacaatatttatggagatgagatcactattacacttctggcttctagcaacgggtttgggttctgtgctagaacttaacaatgcattggtatcatcagcattagacattcttctcaagcctatgtcatggggaatatccatagaattagggcagagatttcccttttctcatgcttacttcccaagccaacaaagtgacttgcttgcgatactaactggacccttatcttataaaggttttttggacctagtttcttatattagtgccttggttcatttggacaacacaagaactagatgctcttcgcagaaaaacttacaattacaaccatcgaagggattggtacatgattattagtttccctatttggttcagttatgcaactgctttacttttccacagagaaggctcacaagattatttatcagaaacattatccaaagagataactgctgaatcaataagtgatgtcagtcttgttcagagggcagccttttacctttcttggctgctatgcccttataatcatgatcaacgcgagatgctatcaaacaatattttggaaatatcacattcttgggctaggaacaacaaaaagtgcgtaagctaccaaagtactgtgaataataggaggaaactgcgaatacccacagctgcggactctgagaaattccatgtgccagtcaacactataagctcccttgttaaagaatttgatgatcgctgtgtaaaatgttgtagcccaactgcctttcctcaagcacaagttggaaatctatcggacctccatcccttatactttaacctgttgcatcagtggattcctttgggagtattgcttgtatcacctagttgtgttaacgagcagaactgtgacatcctcctgcgctacacaagcactgggcaggttctggagtcaaatggagcacgagtaaaaacaaaagatgatgccactaatgatggtttcttaggcagctgcattggtactgctgagagatgggcattgactggagcatatctcatctttggctggcttgacgtagttgaggatatggccccattgatatttgattgcgaagataaatgtcatagttttgtcagccaactcagaaacaagacaggcccatacctgctcaagtgcgtgaagtcattatttaagacgttggaacagccaaatcaagataaagattttgtgattgatcttcataataggttgttaaactgggataagaacgtgcaaggctgtgagatatttggggatgttatccttgaaatgaacaagaagtttaatcttcctttgtagtagtgaccagggattctatgcagctcttaaatatttgaacgtacttaaaagattgtcttaatatgagcgtatgagaaacggctgtatgaaccttagtttttggcttttgttgagtttcaactctagcctattctaaaagatttttgttgttgtcgttttaaatatctaaaatgaatgtcggattctttgcctctgtactctccttttataaattgtttgcaattt

SEQ ID NO: 79457 - DNA, 2068 bp, Zea Mays
gccagtcgccaccgtgtgtctattactccattccctcccgccgctccgctccacgaaaatggcgcctccgctcgaagacctcacccgggtactcgccgagctcgcctcgggcctcgcccagcctcctgctggcggcggtacattctcatccaccgactccctcccggcctccatctcctccctcgccgccgccctcaaccccagcggcgacggggccgccgcctcatccggaaccggggttctggacgccgcgctctccctcatgtgcttcgacccgctagaggtgaatagtgcccgcgtcaactgccttgtccgcaccctcgtctccgtgctctcggcgtcagtctcgtgctgcgtggtccgtcccgatggggacgctgctgaggagatgctctgtgtcgggagttccgtgtcgcccctggactgccgcgagctgctccggtcgtgtgcagccctcgtggagaaattgggggattgtggcgatagaaggcattcctacgatctgttgtatgctgttgtgaaaactatcctgctatcccctcactaccagtgtctttccccgttaccatattataaggaagaggaagaaagagtatctcatatgggaaccattgctgcggagttaataaaccattcttctgatcatatccttcctagtgaccactcaatcccaccaaggttgctttcatggcatcttgatccattaattcttaggcatgatctctcagcaatgctccaggaggtaattagaaggcccttgctttgcctgagaaaggaattgtataatcggatggaatggcgtatcatcataatttgcctggtttgctgcccaacaatatttatggagatgagatcactattacacttctggcttctagcaacgtacatgattattagtttccctatttggttcagttatgcaactgctttacttttccacagagaaggctcacaagattatttatcagaaacattatccaaagagataactgctgaatcaataagtgatgtcagtcttgttcagagggcagccttttacctttcttggctgctatgcccttataatcatgatcaacgcgagatgctatcaaacaatattttggaaatatcacattcttgggctaggaacaacaaaaagtgcgtaagctaccaaagtactgtgaataataggaggaaactgcgaatacccacagctgcggactctgagaaattccatgtgccagtcaacactataagctcccttgttaaagaatttgatgatcgctgtgtaaaatgttgtagcccaactgcctttcctcaagcacaagttggaaatctatcggacctccatcccttatactttaacctgttgcatcagtggattcctttgggagtattgcttgtatcacctagttgtgttaacgagcagaactgtgacatcctcctgcgctacacaagcactgggcaggttctggagtcaaatggagcacgagtaaaaacaaaagatgatgccactaatgatggtttcttaggcagctgcattggtactgctgagagatgggcattgactggagcatatctcatctttggctggcttgacgtagttgaggatatggccccattgatatttgattgcgaagataaatgtcatagttttgtcagccaactcagaaacaagacaggcccatacctgctcaagtgcgtgaagtcattatttaagacgttggaacagccaaatcaagataaagattttgtgattgatcttcataataggttgttaaactgggataagaacgtgcaaggctgtgagatatttggggatgttatccttgaaatgaacaagaagtttaatcttcctttgtagtagtgaccagggattctatgcagctcttaaatatttgaacgtacttaaaagattgtcttaatatgagcgtatgagaaacggctgtatgaaccttagtttttggcttttgttgagtttcaactctagcctattctaaaagatttttgttgttgtcgttttaaatatctaaaatgaatgtcggattctttgcctctgtactctccttttataaattgtttgcaattt

SEQ ID NO: 79458 - DNA, 2198 bp, Zea Mays
ctccattccctcccgccgctccgctccacgaaaatggcgcctccgctcgaagacctcacccgggtactcgccgagctcgcctcgggcctcgcccagcctcctgctggcggcggtacattctcatccaccgactccctcccggcctccatctcctccctcgccgccgccctcaaccccagcggcgacggggccgccgcctcatccggaaccggggttctggacgccgcgctctccctcatgtgcttcgacccgctagaggtgaatagtgcccgcgtcaactgccttgtccgcaccctcgtctccgtgctctcggcgtcagtctcgtgctgcgtggtccgtcccgatggggacgctgctgaggagatgctctgtgtcgggagttccgtgtcgcccctggactgccgcgagctgctccggtcgtgtgcagccctcgtggagaaattgggggattgtggcgatagaaggcattcctacgatctgttgtatgctgttgtgaaaactatcctgctatcccctcactaccagtgtctttccccgttaccatattataaggaagaggaagaaagagtatctcatatgggaaccattgctgcggagttaataaaccattcttctgatcatatccttcctagtgaccactcaatcccaccaaggttgctttcatggcatcttgatccattaattcttaggcatgatctctcagcaatgctccaggagatgagatcactattacacttctggcttctagcaacgtaacttcacaccttaagcactcatgaaatgctctgtactcttgtttgcactgagtttgatttctctcggtctcggtcaatgggcttctacacatacttttaatcttacagatagaactgcagagcagcaaaggttttttggacctagtttcttatattagtgccttggttcatttggacaacacaagaactagatgctcttcgcagaaaaacttacaattacaaccatcgaagggattggtaaaatacaattctgcttggtacatgattattagtttccctatttggttcagttatgcaactgctttacttttccacagagaaggctcacaagattatttatcagaaacattatccaaagagataactgctgaatcaataagtgatgtcagtcttgttcagagggcagccttttacctttcttggctgctatgcccttataatcatgatcaacgcgagatgctatcaaacaatattttggaaatatcacattcttgggctaggaacaacaaaaagtgcgtaagctaccaaagtactgtgaataataggaggaaactgcgaatacccacagctgcggactctgagaaattccatgtgccagtcaacactataagctcccttgttaaagaatttgatgatcgctgtgtaaaatgttgtagcccaactgcctttcctcaagcacaagttggaaatctatcggacctccatcccttatactttaacctgttgcatcagtggattcctttgggagtattgcttgtatcacctagttgtgttaacgagcagaactgtgacatcctcctgcgctacacaagcactgggcaggttctggagtcaaatggagcacgagtaaaaacaaaagatgatgccactaatgatggtttcttaggcagctgcattggtactgctgagagatgggcattgactggagcatatctcatctttggctggcttgacgtagttgaggatatggccccattgatatttgattgcgaagataaatgtcatagttttgtcagccaactcagaaacaagacaggcccatacctgctcaagtgcgtgaagtcattatttaagacgttggaacagccaaatcaagataaagattttgtgattgatcttcataataggttgttaaactgggataagaacgtgcaaggctgtgagatatttggggatgttatccttgaaatgaacaagaagtttaatcttcctttgtagtagtgaccagggattctatgcagctcttaaatatttgaacgtacttaaaagattgtcttaatatgagcgtatgagaaacggctgtatgaaccttagtttttggcttttgttgagtttcaactctagcctattctaaaagatttttgttgttgtcgttttaaatatctaaaatgaatgtcggattctttgcctctgtactctccttttataaattgtttgcaattt

SEQ ID NO: 79459 - DNA, 2941 bp, Zea Mays
ctccattccctcccgccgctccgctccacgaaaatggcgcctccgctcgaagacctcacccgggtactcgccgagctcgcctcgggcctcgcccagcctcctgctggcggcggtacattctcatccaccgactccctcccggcctccatctcctccctcgccgccgccctcaaccccagcggcgacggggccgccgcctcatccggaaccggggttctggacgccgcgctctccctcatgtgcttcgacccgctagaggtgaatagtgcccgcgtcaactgccttgtccgcaccctcgtctccgtgctctcggcgtcagtctcgtgctgcgtggtccgtcccgatggggacgctgctgaggagatgctctgtgtcgggagttccgtgtcgcccctggactgccgcgagctgctccggtcgtgtgcagccctcgtggagaaattgggggattgtggcgtgtagatagaaggcattcctacgatctgttgtatgctgttgtgaaaactatcctgctatcccctcactaccagtgtctttccccgttaccatattataaggaagaggaagaaagagtatctcatatgggaaccattgctgcggagttaataaaccattcttctgatcatatccttcctagtgaccactcaatcccaccaaggttgctttcatggcatcttgatccattaattcttaggcatgatctctcagcaatgctccaggaggtaattagaaggcccttgctttgcctgagaaaggaattgtataatcggatggaatggcgtatcatcataatttgcctggtttgctgcccaacaatatttatggagatgagatcactattacacttctggcttctagcaacgtaacttcacaccttaagcactcatgaaatgctctgtactcttgtttgcactgagtttgatttctctcggtctcggtcaatgggcttctacacatacttttaatcttacagatagaactgcagagcagcaaaggttgagtggcttgccacatcatgacactccaccaaatagttatttcagaaacttcgatatgactaaagcatagacaaggcaaaattaggaatgcaccaaacaggtcgttggttaaagttatcttaggaaagtgggttgaaacagatttcatgatgaacactaccaaaccatctctgcagagcttattccacatttatcacttaattttttaattccaattttaaccttacatttttaaagaactaaaattgactgaatttttagttatttattttttgtatcattgcttgttgtaccctaaatgatattttaccaacagtactattatgaatgttacatttacacatctttatgtattgtctgaactggttagtggttatacattgtgggctcactgtttaaggactgcttcttgtaaaatctctttattcatcctttatttgtgcaggggtttgggttctgtgctagaacttaacaatgcattggtatcatcagcattagacattcttctcaagcctatgtcatggggaatatccatagaattagggcagagatttcccttttctcatgcttacttcccaagccaacaaagtgacttgcttgcgatactaactggacccttatcttataaaggttttttggacctagtttcttatattagtgccttggttcatttggacaacacaagaactagatgctcttcgcagaaaaacttacaattacaaccatcgaagggattggtaaaatacaattctgcttggtacatgattattagtttccctatttggttcagttatgcaactgctttacttttccacagagaaggctcacaagattatttatcagaaacattatccaaagagataactgctgaatcaataagtgatgtcagtcttgttcagagggcagccttttacctttcttggctgctatgcccttataatcatgatcaacgcgagatgctatcaaacaatattttggaaatatcacattcttgggctaggaacaacaaaaagtgcgtaagctaccaaagtactgtgaataataggaggaaactgcgaatacccacagctgcggactctgagaaattccatgtgccagtcaacactataagctcccttgttaaagaatttgatgatcgctgtgtaaaatgttgtagcccaactgcctttcctcaagcacaagttggaaatctatcggacctccatcccttatactttaacctgttgcatcagtggattcctttgggagtattgcttgtatcacctagttgtgttaacgagcagaactgtgacatcctcctgcgctacacaagcactgggcaggttctggagtcaaatggagcacgagtaaaaacaaaagatgatgccactaatgatggtttcttaggcagctgcattggtactgctgagagatgggcattgactggagcatatctcatctttggctggcttgacgtagttgaggatatggccccattgatatttgattgcgaagataaatgtcatagttttgtcagccaactcagaaacaagacaggcccatacctgctcaagtgcgtgaagtcattatttaagacgttggaacagccaaatcaagataaagattttgtgattgatcttcataataggttgttaaactgggataagaacgtgcaaggctgtgagatatttggggatgttatccttgaaatgaacaagaagtttaatcttcctttgtagtagtgaccagggattctatgcagctcttaaatatttgaacgtacttaaaagattgtcttaatatgagcgtatgagaaacggctgtatgaaccttagtttttggcttttgttgagtttcaactctagcctattctaaaagatttttgttgttgtcgttttaaatatctaaaatgaatgtcggattctttgcctctgtactctccttttataaattgtttgcaattt

SEQ ID NO: 79460 - DNA, 2030 bp, Zea Mays
ctccattccctcccgccgctccgctccacgaaaatggcgcctccgctcgaagacctcacccgggtactcgccgagctcgcctcgggcctcgcccagcctcctgctggcggcggtacattctcatccaccgactccctcccggcctccatctcctccctcgccgccgccctcaaccccagcggcgacggggccgccgcctcatccggaaccggggttctggacgccgcgctctccctcatgtgcttcgacccgctagaggtgaatagtgcccgcgtcaactgccttgtccgcaccctcgtctccgtgctctcggcgtcagtctcgtgctgcgtggtccgtcccgatggggacgctgctgaggagatgctctgtgtcgggagttccgtgtcgcccctggactgccgcgagctgctccggtcgtgtgcagccctcgtggagaaattgggggattgtggcgatagaaggcattcctacgatctgttgtatgctgttgtgaaaactatcctgctatcccctcactaccagtgtctttccccgttaccatattataaggaagaggaagaaagagtatctcatatgggaaccattgctgcggagttaataaaccattcttctgatcatatccttcctagtgaccactcaatcccaccaaggttgctttcatggcatcttgatccattaattcttaggcatgatctctcagcaatgctccaggaggttttttggacctagtttcttatattagtgccttggttcatttggacaacacaagaactagatgctcttcgcagaaaaacttacaattacaaccatcgaagggattggtaaaatacaattctgcttggtacatgattattagtttccctatttggttcagttatgcaactgctttacttttccacagagaaggctcacaagattatttatcagaaacattatccaaagagataactgctgaatcaataagtgatgtcagtcttgttcagagggcagccttttacctttcttggctgctatgcccttataatcatgatcaacgcgagatgctatcaaacaatattttggaaatatcacattcttgggctaggaacaacaaaaagtgcgtaagctaccaaagtactgtgaataataggaggaaactgcgaatacccacagctgcggactctgagaaattccatgtgccagtcaacactataagctcccttgttaaagaatttgatgatcgctgtgtaaaatgttgtagcccaactgcctttcctcaagcacaagttggaaatctatcggacctccatcccttatactttaacctgttgcatcagtggattcctttgggagtattgcttgtatcacctagttgtgttaacgagcagaactgtgacatcctcctgcgctacacaagcactgggcaggttctggagtcaaatggagcacgagtaaaaacaaaagatgatgccactaatgatggtttcttaggcagctgcattggtactgctgagagatgggcattgactggagcatatctcatctttggctggcttgacgtagttgaggatatggccccattgatatttgattgcgaagataaatgtcatagttttgtcagccaactcagaaacaagacaggcccatacctgctcaagtgcgtgaagtcattatttaagacgttggaacagccaaatcaagataaagattttgtgattgatcttcataataggttgttaaactgggataagaacgtgcaaggctgtgagatatttggggatgttatccttgaaatgaacaagaagtttaatcttcctttgtagtagtgaccagggattctatgcagctcttaaatatttgaacgtacttaaaagattgtcttaatatgagcgtatgagaaacggctgtatgaaccttagtttttggcttttgttgagtttcaactctagcctattctaaaagatttttgttgttgtcgttttaaatatctaaaatgaatgtcggattctttgcctctgtactctccttttataaattgtttgcaattt

SEQ ID NO: 79461 - DNA, 2585 bp, Zea Mays
ctccattccctcccgccgctccgctccacgaaaatggcgcctccgctcgaagacctcacccgggtactcgccgagctcgcctcgggcctcgcccagcctcctgctggcggcggtacattctcatccaccgactccctcccggcctccatctcctccctcgccgccgccctcaaccccagcggcgacggggccgccgcctcatccggaaccggggttctggacgccgcgctctccctcatgtgcttcgacccgctagaggtgaatagtgcccgcgtcaactgccttgtccgcaccctcgtctccgtgctctcggcgtcagtctcgtgctgcgtggtccgtcccgatggggacgctgctgaggagatgctctgtgtcgggagttccgtgtcgcccctggactgccgcgagctgctccggtcgtgtgcagccctcgtggagaaattgggggattgtggcggtgagatttttgttaccggtctctcttccgacacattgcaatcgggcatgtctaatgtcacaggaagtgcccatcgatttccgtggtcagatgatgtgacattcataatgtttaggagtatctgtgagccgtttcacagctgataaatcagcttataaatgatatgttctccctgtaggttgtttatctgtttttttcttaatgttgacacttttatttcttcagtgtagatagaaggcattcctacgatctgttgtatgctgttgtgaaaactatcctgctatcccctcactaccagtgtctttccccgttaccatattataaggaagaggaagaaagagtatctcatatgggaaccattgctgcggagttaataaaccattcttctgatcatatccttcctagtgaccactcaatcccaccaaggttgctttcatggcatcttgatccattaattcttaggcatgatctctcagcaatgctccaggaggtaattagaaggcccttgctttgcctgagaaaggaattgtataatcggatggaatggcgtatcatcataatttgcctggtttgctgcccaacaatatttatggagatgagatcactattacacttctggcttctagcaacgggtttgggttctgtgctagaacttaacaatgcattggtatcatcagcattagacattcttctcaagcctatgtcatggggaatatccatagaattagggcagagatttcccttttctcatgcttacttcccaagccaacaaagtgacttgcttgcgatactaactggacccttatcttataaaggttttttggacctagtttcttatattagtgccttggttcatttggacaacacaagaactagatgctcttcgcagaaaaacttacaattacaaccatcgaagggattggtaaaatacaattctgcttggtacatgattattagtttccctatttggttcagttatgcaactgctttacttttccacagagaaggctcacaagattatttatcagaaacattatccaaagagataactgctgaatcaataagtgatgtcagtcttgttcagagggcagccttttacctttcttggctgctatgcccttataatcatgatcaacgcgagatgctatcaaacaatattttggaaatatcacattcttgggctaggaacaacaaaaagtgcgtaagctaccaaagtactgtgaataataggaggaaactgcgaatacccacagctgcggactctgagaaattccatgtgccagtcaacactataagctcccttgttaaagaatttgatgatcgctgtgtaaaatgttgtagcccaactgcctttcctcaagcacaagttggaaatctatcggacctccatcccttatactttaacctgttgcatcagtggattcctttgggagtattgcttgtatcacctagttgtgttaacgagcagaactgtgacatcctcctgcgctacacaagcactgggcaggttctggagtcaaatggagcacgagtaaaaacaaaagatgatgccactaatgatggtttcttaggcagctgcattggtactgctgagagatgggcattgactggagcatatctcatctttggctggcttgacgtagttgaggatatggccccattgatatttgattgcgaagataaatgtcatagttttgtcagccaactcagaaacaagacaggcccatacctgctcaagtgcgtgaagtcattatttaagacgttggaacagccaaatcaagataaagattttgtgattgatcttcataataggttgttaaactgggataagaacgtgcaaggctgtgagatatttggggatgttatccttgaaatgaacaagaagtttaatcttcctttgtagtagtgaccagggattctatgcagctcttaaatatttgaacgtacttaaaagattgtcttaatatgagcgtatgagaaacggctgtatgaaccttagtttttggcttttgttgagtttcaactctagcctattctaaaagatttttgttgttgtcgttttaaatatctaaaatgaatgtcggattctttgcctctgtactctccttttataaattgtttgcaattt

SEQ ID NO: 79462 - DNA, 2067 bp, Zea Mays
ctcagtcgttaatccccgacccaaaccaccactcaccgagacaccgcagtcgccttcgccctctcaagattgagatggacgccaccccgccatccaagaaggccaagacgacggccgcgccgccgccgcgcaagctgcgggaggccgccgctctggcggacgaggtccggacgccggataaggccgcgaagaagatgacgccggcggcggcgttcgagcagatcccgacgccggagaagccggaggagatgccgagggcgcgcggccgcagcgtggcgttctccgtcaaggagatccgccgggcggcgctcgggctgcggcggcccgcggcgcaggccgaggcggcggtggaggatgatctcgagtccgtcgagcgggagctcggtgttggcgccggggctggccggagtcccgtcaagcgcaaggcggaggtcaagctgccggagagttatgagatgctcttcgagttcttcaactgcctggagagctctacccgactgctccgtatgaaggggtccaaggccacgttccccaacatctgttctagcattcagaatttgaccgagcggagatttacccacagccatcttgcacagctcaagtacataatgccagaggcgatcgtcatcaacaagatccttttgcgtgacgacacgacatgctgcatgtaccctgatcttcaggtgaacctcctagttggtgctgttgagaacgtccttaagcaaaagggagaaactgcatacctggcattaagaaggacctttaggcagaggctcgtggaattctacagggagcaccctgagggagatgacattccagagcacgagctgccacacccattcaaccgagcgagatcgagcttgccccaggacgaacaaaggactgctcctgaatcttcgtccccactcaagccatctgatgtcaatggacagcagcagaccgctgctgtgatgtcgcacatgtcacagtcgttcaagaggaggttctcgcagagatctccgatcggctctgcaacagccagtgcacccagtccactggtgaaggctgcttccactgctccatcaccactgagcagaaactccctctttggctgtgttgattctggcagcacttgtggtgatgaaaaatcatcaagtgccaaagaagacttctgcaagtccggtgtttcagaaaacacccctgcaaagtttgcctccacaccagcgaggctaatggcgcctacgccaggcctcaagacgccaaagagaccaatctctgccacaggttatgataccccgcctctgagaacggcgaagagatcagctcgcgcgaagctgtttaccactccaacaaagaataacagtacgggtggagagagccaaagcgcaagcgtatctggcgctagcgccgacgacgacttgctcagcttccttccacagtccctccttcagtcggtgaaggagaaggaagacagggctttggtagagaaagaatccggtttcgccgatcaggtcagaaggcagaagctgatcgcctccctgcccagcaccttcgacgtcgtgttcctcatctaccagtcgaggcagcggtcagtgatgacaaagcaggagctagtccacaagatcatcgcgagcagtcctaagatagctgacagaagtgaagttgaggggcatctgacgctgttgaaggagctcgttccagactggttctccgagaaaaccgcacgcagcggggatgctctgtgctggtcgatgccactttgagccagtcggagattcggcagagactgtacgctgctgctgctgctgctgagtaggaccggatgcgaagaggacgagcagcggaaaagagcactcagccaagggccgtcagtttctagtgttgttgtgatagaagccttagcttagatgaaaatggatgacttatgtatagtgaagccattctgacaactgatggttcctcactctgaaacacccactgaaattaagacgagtccatttgtctactgaatgatgactggctggcctctttgtaaacccctctcctgcctgaagtagcaatgagatgacaaaaatgtcttggtctgct

SEQ ID NO: 79463 - DNA, 1177 bp, Zea Mays
cccaaacacgctgcgtggatgcgaccaaagtagcatccaggcctgctcgattcgaggcccagattaacttttctacgtccagaatggtccggactccggactgcgtttccgtttactccggctcacgctcaccccgcctgctctctcattctcgacgatggctgggcgaccgccgccgtcctacgccaggtatcccgcgcttcaaggcggcaggcccttcgccggcgaagagcacccatcagattcccgagttgtttatcccagttatcttgcacccgagggctccgtagcatcttattatgcttcaagacctgttctacctgttggatcagatgttcttagaaacgatgtaatttctcaaccaagaacgcatggttatgatggtccagcaagagtgaccaatcctgctttggctggcctgactggactacctgctggagttacggcacgggggcctagtgctctggaagacccgtctttggctggtctgagtggattagctccagtccgggcaacaggcggagctacggcacgagggtctggtgctttggaagacccgtctttggctggtctgagtggactagctccagccagggcactgggacctagagctttgaaagaagaactggatgtagttgggagaagttcttcagtaggcagaggtgctagcattccagatgttgagcaccacagctcaattccaaactttgatggaccctcagaaaatgaatccaacattctttttgttgattgtcttcctactgattgcacaaggagagaagtagctcatttgtttcgttgttttcctggcttcaaggacatcagagtagtgcacaaggaacccagacgtattaagaggaatgtgcacattatgaagacaaaaacaagaaactacacaagccacaaggggtcctcagctgcagatatgagattcttagcacccatttctaccaacaacttggtgatatccttgactaggcaaatgagttctgccccaaccttttccatctgttgaaatagtagagatccttggttccttgcattgctctctttccatattatgaagatgattgtccttattacttctaggtagggcaggaaaataagcttgaggctcgcgagccggctcgagctcggagcggctcgcgagcctcgagccagccttttgggcttgttc

SEQ ID NO: 79464 - DNA, 1202 bp, Zea Mays
gccaagcatccaaaccctaactatcctaggctgtttgtctgttggtattcggatctggtataattacaaattcccgagttgtttatcccagttatcttgcacccgagggctccgtagcatcttattatgcttcaagacctgttctacctgttggatcagatgttcttagaaacgatgtaatttctcaaccaagaacgcatggttatgatggtccagcaagagtgaccaatcctgctttggctggcctgactggactacctgctggagttacggcacgggggcctagtgctctggaagacccgtctttggctggtctgagtggattagctccagtccgggcaacaggcggagctacggcacgagggtctggtgctttggaagacccgtctttggctggtctgagtggactagctccagccagggcactgggacctagagctttgaaagaagaactggatgtagttgggagaagttcttcagtaggcagaggtgctagcattccagatgttgagcaccacagctcaattccaaactttgatggaccctcagaaaatgaatccaacattctttttgttgattgtcttcctactgattgcacaaggagagaagtagctcatttgtttcgttgttttcctggcttcaaggacatcagagtagtgcacaaggaacccagacgtgtaagtgcttgccttctcaatgcatcatctcttctcacttggaaaatggtttaattcttctttgctagaatgctacttgcccattcttttgtgaatccgagcatttgcattgaattcatgtttttgaacttggcttatgtttaagatatggtttatatatcacactcattttgaaaacaaaagagccacgtttattagattaagaggaatgtgcacattatgaagacaaaaacaagaaactacacaagccacaaggggtcctcagctgcagatatgagattcttagcacccatttctaccaacaacttggtgatatccttgactaggcaaatgagttctgccccaaccttttccatctgttgaaatagtagagatccttggttccttgcattgctctctttccatattatgaagatgattgtccttattacttctaggtagggcaggaaaataagcttgaggctcgcgagccggctcgagctcggagcggctcgcgagcctcgagccagccttttgggcttgttc

SEQ ID NO: 79465 - DNA, 1891 bp, Zea Mays
cttcaccaaagccgcctcgtctggatctctctcactcctttcgcgcacaaggttttcaatggcattgaccggtagaacacgtgcccggacgccaattatctcgccctttcagatttgagaacaacaaggaggaaaagtaaacgcaagttcaggaaaggggagcctcaaaaggagagggagagtgagagggaggggaagtgcgctgcagtgctgcgcagctgcgctggggagaagagaagaaggtgccaaccacttcccaaggagaccgccagctctgctgctgcacgaccgaccagcccgtccactcgcctcgccttcctccgagccccggcgaggaagaggaacccggcgccgccggacgcacttccgatggcgacgccacggaagccgatcaagctcacgctgccgtcccacgagaccaccatcggcaagttcctgacgcacagcgggacgttcacggacggggatctgcgcgtcaacaaggacggcctccgcatcgtctcgcggagggagggaggcgaggctcctcctatagagccgttggatagtcaactgagcttagatgatctagacgttataaaagtgatatcgggaaaggtagcagcggaaatgtgcaattggtccgccacaaatttactggccagttttttgctctgaaggttattcaactaaatattgatgagagtatacgcaaacagattgccaaggagttgaagataaacttatcaacacagtgccaatatgttgttgtgttctatcagtgtttctatttcaatggtgccatttctattgttttggaatacatggatggtggctcccttgcagatttcctgaagactgttaaaaccattccagaggcctacctcgctgctatctgtacgcagatgctaaaaggactgatctatttgcataacgagaagcgcgttatacaccgagatctgaaaccatcaaatatattgataaatcataggggtgaagtaaaaatatcagattttggtgtgagtgccattatatctagttcctcttcgcaacgagatacatttattggcacacgcaactacatggcgccagaaagaatcgatggaaagaaacatggttctatgagtgatatctggagtttgggactagtgatactggaatgtgcaaccggcatctttccatttcctccttgtgaaagcttctacgaacttctcgtggctgttgttgatcaaccgccaccttctgcgccgccggatcagttttcaccagaattcttctccagaaggatgctaatgacaggtcatcagcccaagccttattggaccatccgttcctgagcatgtatgatgacctgcatgtagatcttgcttcgtacttcacgacagcaggatctcctctcgccaccttcaattccaggcaactctaatttttttgtcctccttattacgcgaacggtgtggcgacaaatttctctttttggacaaggcttggattgtgtactgagctgtaatgatcttgtgtgtgtcaggtcggtgattggctccatcactttacatatatgacatacatgtacagccttttaggataaaaatgagcactgaagttttgcctatctgtatatcggcagcaaacgtttggtcatgtttgtttcaccttgtaatgtattgactcagatatgggattggtcattgtctcatttggtgtatgagtcaagtccagattttcttgtatcctgattttttttttgtttagggttagtttgggaacctaattttcccaatagattttcatttttccaaggaaaattagtccattttcccttgagaaaattgaaatccccttgggaaaacggtgttcccaaactagtccttaaaggctcgagacactctggtatatataggagaacccttgt

SEQ ID NO: 79466 - DNA, 1341 bp, Zea Mays
tcgttgagctctgtttgttcggaatcagggcgttgcgcagtgataattccgtcgcatttgttttcttcacggctcctcctatagagccgttggatagtcaactgagcttagatgatctagacgttataaaagtgatatcgggaaaggtagcagcggaaatgtgcaattggtccgccacaaatttactggccagttttttgctctgaaggttattcaactaaatattgatgagagtatacgcaaacagattgccaaggagttgaagataaacttatcaacacagtgccaatatgttgttgtgttctatcagtgtttctatttcaatggtgccatttctattgttttggaatacatggatggtggctcccttgcagatttcctgaagactgttaaaaccattccagaggcctacctcgctgctatctgtacgcagatgctaaaaggactgatctatttgcataacgagaagcgcgttatacaccgagatctgaaaccatcaaatatattgataaatcataggggtgaagtaaaaatatcagattttggtgtgagtgccattatatctagttcctcttcgcaacgagatacatttattggcacacgcaactacatggcgccagaaagaatcgatggaaagaaacatggttctatgagtgatatctggagtttgggactagtgatactggaatgtgcaaccggcatctttccatttcctccttgtgaaagcttctacgaacttctcgtggctgttgttgatcaaccgccaccttctgcgccgccggatcagttttcaccagaattctgtgggttcatttctgcatgtctccagaaggatgctaatgacaggtcatcagcccaagccttattggaccatccgttcctgagcatgtatgatgacctgcatgtagatcttgcttcgtacttcacgacagcaggatctcctctcgccaccttcaagtcggtgattggctccatcactttacatatatgacatacatgtacagccttttaggataaaaatgagcactgaagttttgcctatctgtatatcggcagcaaacgtttggtcatgtttgtttcaccttgtaatgtattgactcagatatgggattggtcattgtctcatttggtgtatgagtcaagtccagattttcttgtatcctgattttttttttgtttagggttagtttgggaacctaattttcccaatagattttcatttttccaaggaaaattagtccattttcccttgagaaaattgaaatccccttgggaaaacggtgttcccaaactagtccttaaaggctcgagacactctggtatatataggagaacccttgt

SEQ ID NO: 79467 - DNA, 1289 bp, Zea Mays
aattccgtcgcatttgttttcttcacggctcctcctatagagccgttggatagtcaactgagcttagatgatctagacgttataaaagtgatatcgggaaaggtagcagcggaaatgtgcaattggtccgccacaaatttactggccagttttttgctctgaaggttattcaactaaatattgatgagagtatacgcaaacagattgccaaggagttgaagataaacttatcaacacagtgccaatatgttgttgtgttctatcagtgtttctatttcaatggtgccatttctattgttttggaatacatggatggtggctcccttgcagatttcctgaagactgttaaaaccattccagaggcctacctcgctgctatctatgctaaaaggactgatctatttgcataacgagaagcgcgttatacaccgagatctgaaaccatcaaatatattgataaatcataggggtgaagtaaaaatatcagattttggtgtgagtgccattatatctagttcctcttcgcaacgagatacatttattggcacacgcaactacatggcgccagaaagaatcgatggaaagaaacatggttctatgagtgatatctggagtttgggactagtgatactggaatgtgcaaccggcatctttccatttcctccttgtgaaagcttctacgaacttctcgtggctgttgttgatcaaccgccaccttctgcgccgccggatcagttttcaccagaattctgtgggttcatttctgcatgtctccagaaggatgctaatgacaggtcatcagcccaagccttattggaccatccgttcctgagcatgtatgatgacctgcatgtagatcttgcttcgtacttcacgacagcaggatctcctctcgccaccttcaagtcggtgattggctccatcactttacatatatgacatacatgtacagccttttaggataaaaatgagcactgaagttttgcctatctgtatatcggcagcaaacgtttggtcatgtttgtttcaccttgtaatgtattgactcagatatgggattggtcattgtctcatttggtgtatgagtcaagtccagattttcttgtatcctgattttttttttgtttagggttagtttgggaacctaattttcccaatagattttcatttttccaaggaaaattagtccattttcccttgagaaaattgaaatccccttgggaaaacggtgttcccaaactagtccttaaaggctcgagacactctggtatatataggagaacccttgt

SEQ ID NO: 79468 - DNA, 942 bp, Zea Mays
ccagtcgccaggcccttccttccaacgcaagagagctaggcggcgtgttccgtgccttgccttcccaagcaagcaagcaagctttcataatgtagtattgtagtagtttcattcaattcacgagtcacgacgttcacgagtcacgccagcatcaaagccgtgcgtgagtaggccgatctcttggatgatggaggaggaccagcagatagtcgctggcgtggacgccgcggcccgaggcggcggcggcctgggccgcgcgggagccgtctttctcaccgcgacctgcgccgcagccacctacagcgcggcggcggcaggggacgtcccgtccgtggcgttcgtggtcgccagctacggcgcgctcctgcttctgctgcgctccctgcgcgcctacgagctggcgccgccggaggcggctgcacgcagggaagcgctcaggcgcagggtctgggcgctctgcacgctactcagcgtgatgttcgcgtggaaggttgcgagcgtcgtcgcgacgccgtggccggtcgctgtcggcgtctgggccgcggcggccgtcacatctgccgctgggttcgttctgctgttccgccagcagcagcgtcgccaatgaacgagtgatcggtggatgtgtgttccgtctgtaacttgtaagctccaagagcctcaaatagttacaggcatgggatgggatcgatgcctggcctggttgctagctgctgttagattgcccgtgcaatgcatgcatgcacgatgatgatgttgtgcatatgttattgaaggttttccgtgtgctggtgctggtgctggcctggtgatacggaggaagaaatgctttcaatctactgtacccggccgtttttcgtgaacttatttctatccgttttaagttcatcactgtgctcatcggttatcatcgagaaaatccaggcaccagttggctcctaa

SEQ ID NO: 79469 - DNA, 949 bp, Zea Mays
aattcacgagtcacgacgttcacgagtcacgccagcatcaaagccgtgcgtgagtaggccgatctcttggatgatggaggaggaccagcagatagtcgctggcgtggacgccgcggcccgaggcggcggcggcctgggccgcgcgggagccgtctttctcaccgcgacctgcgccgcagccacctacagcgcggcggcggcaggggacgtcccgtccgtggcgttcgtggtcgccagctacggcgcgctcctgcttctgctgcgctccctgcgcgcctacgagctggcgccgccggaggcggctgcacgcagggaagcgctcaggcgcagggtctgggcgctctgcacgctactcagcgtgatgttcgcgtggaaggttgcgagcgtcgtcgcgacgccgtggccggtcgctgtcggcgtctgggccgcggcggccgtcacatctgccgctgggttcgttctgctgttccgccagcagcagcgtcgccaatgaacgagtgatcggtggatgtgtgttccgtctgtaacttgtaagctccaagagcctcaaatagttacaggcatgggatgggatcgatgcctggcctggttgctagctgctgttagattgcccgtgcaatgcatgcatgcacgatgatgatgttgtgcatatgttattgaaggttttccgtgtgctggtgctggtgctggcctggtgatacggaggaagaaatgctttcaatctactgtacccggccggtacgttcagatgaattgtgatggcctctgccacaaacctatgtgtacgtattgtatatatgtgcatgacactattttagcctcatatcactagttgattgatatatttctgcgatccaattatgtgttcgttctgcgatccaattatttccttggattcatgcatgctccaggaaccttttaaatccatcatatcactagttgattgata

SEQ ID NO: 79470 - DNA, 695 bp, Zea Mays
ggaccgtgtcgcgagcaaaacccggcaggctggaatgtgggcggcccagcggcggcggcggcaacatctggtagcattgctccagcgatttcattgaccgaaaaggccttgaaacatctgaacaaaatgagggctgaacggaacgaagatttgtgcttgagaattggagtgaaacagggtggatgctcaggcatgtcttacaccatggagtttgaaaatcgagcagatgccagccctgatgattctgttgtagagtatgatggttttgccatagtctgtgaccccaaaagccttctcttcatgtttggaatggagctggactacagcaacgcactcattggtggaggcttctcttttcagaatccaaacgcaacaaaaacctgtgggtgcggcaaatctttcgcgactgggaaggaatccgaggctgcagcaaaagcttgcaacaactagagtagtgaaatattgatagcaaatcgtgatgtaacttgttatatagcttgctcctgatcaaatcacgtggctccaccacttatacttgtttcgtttcaaaatagttggctttgtttgtttttttcaggataactttgatcagatatatacaagaaaacattaatacttatggtatataattaatattaattgatagagctttgaatctattttattaaacttatctacagataaaaaaatattaa

SEQ ID NO: 79471 - DNA, 794 bp, Zea Mays
caaatttctctggcccggcccaaaggatttggttttggcttgtggagacgtgtcaaaactgaactccgttttgatccgtgatgctctagcttttggacacggtcacagcgacagggggatgatggtccatatgaatatattgcttgggcggcggcggcggcaacatctggtagcattgctccagcgatttcattgaccgaaaaggccttgaaacatctgaacaaaatgagggctgaacggaacgaagatttgtgcttgagaattggagtgaaacagggtggatgctcaggcatgtcttacaccatggagtttgaaaatcgagcagatgccagccctgatgattctgttgtagagtatgatggttttgccatagtctgtgaccccaaaagccttctcttcatgtttggaatggagctggactacagcaacgcactcattggtggaggcttctcttttcagaatccaaacgcaacaaaaacctgtgggtgcggcaaatctttcgcgactgggaaggaatccgaggctgcagcaaaagcttgcaacaactagagtagtgaaatattgatagcaaatcgtgatgtaacttgttatatagcttgctcctgatcaaatcacgtggctccaccacttatacttgtttcgtttcaaaatagttggctttgtttgtttttttcaggataactttgatcagatatatacaagaaaacattaatacttatggtatataattaatattaattgatagagctttgaatctattttattaaacttatctacagataaaaaaatattaa

SEQ ID NO: 79472 - DNA, 2359 bp, Zea Mays
ggaaattgatggaaccccgtttctatgcgttatccaaagagctgcatagcagcgcttctcccagccacgtcttcatcacacacggtcgcggcgcgaagcaatggcgaccacggcgccgctgctctcgccccagcgcgcttgccctacccatctccggcgccgcctctcgcccctacatctcgtattccccctcgacgcgtcagcgaggcggctgcgccttcgccgggcgccgccaccttgttcggccaagttcggcaagttcgacgcctccgacgccccggcggaggccgaggaggcggggggcgcgacggatggtgggctggcgcagcccgtggaggaggacgacagttgcttgccatcggatttggagggcgcgattcggcagtcagggaaggcgagcgcagatttcgtaaactccggaggcatgcgagctatcgcagaactgctgatccctcagttggaattcctcaacgaggaaggagcacaggctgaactctgggcgttgtcaaagattttcctggacacacttgtacaagagacaggacaggtttggatacaagaaagttactgccattttccctgacgctggagcagctgcccttctcaagcatcaatggaaagatgcacaattcaagtgtgccaggtgaccggaagccagttggtcctgaagatgaggtcgcagttatgattatccctgatcatcagatgctggaagctgttgaacgcatcacatctcaactctctgatgatcctgtatggaacttatgcctgatcagattgcaaatttctgcagatcctgtgtaaaaaatatatggaaaaaaagaaatttcattaatgttccaagcagattttgtagaataaagtttacatgaacaagagtattaggataaagggcatatgtgcagtgtggtaaatccagttccaggccataaatcaaccatatatttccatgttgtatattgtgcaaattggctaactaagttccatatccacccaagtagattcatcctagatcaatattcgttggcctagccctggtccagctgaattcctagatctgtccctgcatgcatgtgcttatttttttgaaatgaaccaggcaaagcatgcatgtgcttatgaaggatctaaaagtctgctccagcagattagtctattccacctacatgtataaccatttcatgaaagaactcatgtgaatcttcatgcctaaaactaaccatccatatctacaataatttaacattgaatttgaccagcaaccatctttgtatttgtatatatatttcatttaatgctatcctcaagtagtgtctaccttttaatgaagataagacctcttgtcatgtggaacccacggcttgttagtggagatgttggagtaggctttaatgtacggaatctgcggagaaatttcttaagcacttttaccactgtttactcgatgaggccattgccaactggtgcagtctttagatgctttccagggcagtggaaagtgttttatgatgatccaaataggccaaatcggtatttgcttgcccgagaactcacaagtaggcccgatgcaactgatattgagagaatatttggtggtgccgatgagcaatctgaagaggcaccatcgttgatgaacaatgtcatgggcgtgttcagttccgtgagtcggtttatgagggtcatctccaagtgagagtcgaagcaaacattgttcacacttgaagccatcaacaaccatcatgatgcttgagttatacaagaagattattttagtgcatccatgttgttttcagtctgtaattactccatggtactgctattcggaacagtatagtttggcgttccggcacatgccaccaaatgtgtgcacataccataccgtggattcctggagtcatctgctgatcctacaccgtgaggtcaattatgtaagtgtgacttagaaaaaaaatgtagatagatcctcattctggaaaaagccgggtatttgattgtaattcaatactgtgcttgatatatcacaatcagctcgcattttgtaattcaatactggacgaatataaattcaatcctttgttttacatgtgtgttgtgtcagtcaatcagaacatttttctactctacagtgagtcagaatatctatcctctaaagtgacacacttatcctcagtatatatagttatatacaccgaatactgctgaaataaccatttttttaaggaagagaaacatttgaatgaagtgacctaaatacagtacattcagaatcttgggccgatgcgatcagtgctcccggttttccacaggagaggcggaggcgctgtgagagcctgccaagcccagcgacggctgcaggaac

SEQ ID NO: 79473 - DNA, 2796 bp, Zea Mays
ggaaattgatggaaccccgtttctatgcgttatccaaagagctgcatagcagcgcttctcccagccacgtcttcatcacacacggtcgcggcgcgaagcaatggcgaccacggcgccgctgctctcgccccagcgcgcttgccctacccatctccggcgccgcctctcgcccctacatctcgtattccccctcgacgcgtcagcgaggcggctgcgccttcgccgggcgccgccaccttgttcggccaagttcggcaagttcgacgcctccgacgccccggcggaggccgaggaggcggggggcgcgacggatggtgggctggcgcagcccgtggaggaggacgacaggtcgggttcactgcaccctcaactcgtgcgtaattgagaacacaaaagatgctgacgttgtgaagcggccttcgctgtggttcagttgcttgccatcggatttggagggcgcgattcggcagtcagggaaggcgagcgcagatttcgtaaactccggaggcatgcgagctatcgcagaactgctgatccctcagttggaattcctcaacgaggaaggagcacaggctgaactctgggcgttgtcaaagattttcctggacacacttgtacaagagacaggacaggtttggatacaagaaagttactgccattttccctgacgctggagcagctgcccttctcaagcatcaatggaaagatgcacaattcaagtgtgccaggtactaatgtactatccactgagaagtgatggtttcataccaagttgatgtaacttgttgcatctcatgattttctgactacgagcggcatgctaccgacgtcaattggaaatcacaattgattttcttttgagaccaggaacagttaattttctagctaccaagaattggccagttcacctttagtcctagttgcaaatgccatattatactggacatgacaaggcagaattctgactctttgtattcttgaagaagaaactttatggatgcttccagattatgacattgaatagtattcaggttgttacttcgaatcttcaatctgtttttgacctgacttgtagtttaggtgaccggaagccagttggtcctgaagatgaggtcgcagttatgattatccctgatcatcagatgctggaagctgttgaacgcatcacatctcaactctctgatgatcctgtatggaacttatgcctgatcagattgcaaatttctgcagatcctgtgtaaaaaatatatggaaaaaaagaaatttcattaatgttccaagcagattttgtagaataaagtttacatgaacaagagtattaggataaagggcatatgtgcagtgtggtaaatccagttccaggccataaatcaaccatatatttccatgttgtatattgtgcaaattggctaactaagttccatatccacccaagtagattcatcctagatcaatattcgttggcctagccctggtccagctgaattcctagatctgtccctgcatgcatgtgcttatttttttgaaatgaaccaggcaaagcatgcatgtgcttatgaaggatctaaaagtctgctccagcagattagtctattccacctacatgtataaccatttcatgaaagaactcatgtgaatcttcatgcctaaaactaaccatccatatctacaataatttaacattgaatttgaccagcaaccatctttgtatttgtatatatatttcatttaatgctatcctcaagtagtgtctaccttttaatgaagataagacctcttgtcatgtggaacccacggcttgttagtggagatgttggagtaggctttaatgtacggaatctgcggagaaatttcttaagcacttttaccactgtttactcgatgaggccattgccaactggtgcagtctttagatgctttccagggcagtggaaagtgttttatgatgatccaaataggccaaatcggtatttgcttgcccgagaactcacaagtaggcccgatgcaactgatattgagagaatatttggtggtgccgatgagcaatctgaagaggcaccatcgttgatgaacaatgtcatgggcgtgttcagttccgtgagtcggtttatgagggtcatctccaagtgagagtcgaagcaaacattgttcacacttgaagccatcaacaaccatcatgatgcttgagttatacaagaagattattttagtgcatccatgttgttttcagtctgtaattactccatggtactgctattcggaacagtatagtttggcgttccggcacatgccaccaaatgtgtgcacataccataccgtggattcctggagtcatctgctgatcctacaccgtgaggtcaattatgtaagtgtgacttagaaaaaaaatgtagatagatcctcattctggaaaaagccgggtatttgattgtaattcaatactgtgcttgatatatcacaatcagctcgcattttgtaattcaatactggacgaatataaattcaatcctttgttttacatgtgtgttgtgtcagtcaatcagaacatttttctactctacagtgagtcagaatatctatcctctaaagtgacacacttatcctcagtatatatagttatatacaccgaatactgctgaaataaccatttttttaaggaagagaaacatttgaatgaagtgacctaaatacagtacattcagaatcttgggccgatgcgatcagtgctcccggttttccacaggagaggcggaggcgctgtgagagcctgccaagcccagcgacggctgcaggaac

SEQ ID NO: 79474 - DNA, 2436 bp, Zea Mays
ggaaattgatggaaccccgtttctatgcgttatccaaagagctgcatagcagcgcttctcccagccacgtcttcatcacacacggtcgcggcgcgaagcaatggcgaccacggcgccgctgctctcgccccagcgcgcttgccctacccatctccggcgccgcctctcgcccctacatctcgtattccccctcgacgcgtcagcgaggcggctgcgccttcgccgggcgccgccaccttgttcggccaagttcggcaagttcgacgcctccgacgccccggcggaggccgaggaggcggggggcgcgacggatggtgggctggcgcagcccgtggaggaggacgacaggtcgggttcactgcaccctcaactcgtgcgtaattgagaacacaaaagatgctgacgttgtgaagcggccttcgctgtggttcagttgcttgccatcggatttggagggcgcgattcggcagtcagggaaggcgagcgcagatttcgtaaactccggaggcatgcgagctatcgcagaactgctgatccctcagttggaattcctcaacgaggaaggagcacaggctgaactctgggcgttgtcaaagattttcctggacacacttgtacaagagacaggacagaaagttactgccattttccctgacgctggagcagctgcccttctcaagcatcaatggaaagatgcacaattcaagtgtgccagtttaggtgaccggaagccagttggtcctgaagatgaggtcgcagttatgattatccctgatcatcagatgctggaagctgttgaacgcatcacatctcaactctctgatgatcctgtatggaacttatgcctgatcagattgcaaatttctgcagatcctgtgtaaaaaatatatggaaaaaaagaaatttcattaatgttccaagcagattttgtagaataaagtttacatgaacaagagtattaggataaagggcatatgtgcagtgtggtaaatccagttccaggccataaatcaaccatatatttccatgttgtatattgtgcaaattggctaactaagttccatatccacccaagtagattcatcctagatcaatattcgttggcctagccctggtccagctgaattcctagatctgtccctgcatgcatgtgcttatttttttgaaatgaaccaggcaaagcatgcatgtgcttatgaaggatctaaaagtctgctccagcagattagtctattccacctacatgtataaccatttcatgaaagaactcatgtgaatcttcatgcctaaaactaaccatccatatctacaataatttaacattgaatttgaccagcaaccatctttgtatttgtatatatatttcatttaatgctatcctcaagtagtgtctaccttttaatgaagataagacctcttgtcatgtggaacccacggcttgttagtggagatgttggagtaggctttaatgtacggaatctgcggagaaatttcttaagcacttttaccactgtttactcgatgaggccattgccaactggtgcagtctttagatgctttccagggcagtggaaagtgttttatgatgatccaaataggccaaatcggtatttgcttgcccgagaactcacaagtaggcccgatgcaactgatattgagagaatatttggtggtgccgatgagcaatctgaagaggcaccatcgttgatgaacaatgtcatgggcgtgttcagttccgtgagtcggtttatgagggtcatctccaagtgagagtcgaagcaaacattgttcacacttgaagccatcaacaaccatcatgatgcttgagttatacaagaagattattttagtgcatccatgttgttttcagtctgtaattactccatggtactgctattcggaacagtatagtttggcgttccggcacatgccaccaaatgtgtgcacataccataccgtggattcctggagtcatctgctgatcctacaccgtgaggtcaattatgtaagtgtgacttagaaaaaaaatgtagatagatcctcattctggaaaaagccgggtatttgattgtaattcaatactgtgcttgatatatcacaatcagctcgcattttgtaattcaatactggacgaatataaattcaatcctttgttttacatgtgtgttgtgtcagtcaatcagaacatttttctactctacagtgagtcagaatatctatcctctaaagtgacacacttatcctcagtatatatagttatatacaccgaatactgctgaaataaccatttttttaaggaagagaaacatttgaatgaagtgacctaaatacagtacattcagaatcttgggccgatgcgatcagtgctcccggttttccacaggagaggcggaggcgctgtgagagcctgccaagcccagcgacggctgcaggaac

SEQ ID NO: 79475 - DNA, 2364 bp, Zea Mays
ggaaattgatggaaccccgtttctatgcgttatccaaagagctgcatagcagcgcttctcccagccacgtcttcatcacacacggtcgcggcgcgaagcaatggcgaccacggcgccgctgctctcgccccagcgcgcttgccctacccatctccggcgccgcctctcgcccctacatctcgtattccccctcgacgcgtcagcgaggcggctgcgccttcgccgggcgccgccaccttgttcggccaagttcggcaagttcgacgcctccgacgccccggcggaggccgaggaggcggggggcgcgacggatggtgggctggcgcagcccgtggaggaggacgacagttgcttgccatcggatttggagggcgcgattcggcagtcagggaaggcgagcgcagatttcgtaaactccggaggcatgcgagctatcgcagaactgctgatccctcagttggaattcctcaacgaggaaggagcacaggctgaactctgggcgttgtcaaagattttcctggacacacttgtacaagagacaggacaggtttggatacaagaaagttactgccattttccctgacgctggagcagctgcccttctcaagcatcaatggaaagatgcacaattcaagtgtgccagtttaggtgaccggaagccagttggtcctgaagatgaggtcgcagttatgattatccctgatcatcagatgctggaagctgttgaacgcatcacatctcaactctctgatgatcctgtatggaacttatgcctgatcagattgcaaatttctgcagatcctgtgtaaaaaatatatggaaaaaaagaaatttcattaatgttccaagcagattttgtagaataaagtttacatgaacaagagtattaggataaagggcatatgtgcagtgtggtaaatccagttccaggccataaatcaaccatatatttccatgttgtatattgtgcaaattggctaactaagttccatatccacccaagtagattcatcctagatcaatattcgttggcctagccctggtccagctgaattcctagatctgtccctgcatgcatgtgcttatttttttgaaatgaaccaggcaaagcatgcatgtgcttatgaaggatctaaaagtctgctccagcagattagtctattccacctacatgtataaccatttcatgaaagaactcatgtgaatcttcatgcctaaaactaaccatccatatctacaataatttaacattgaatttgaccagcaaccatctttgtatttgtatatatatttcatttaatgctatcctcaagtagtgtctaccttttaatgaagataagacctcttgtcatgtggaacccacggcttgttagtggagatgttggagtaggctttaatgtacggaatctgcggagaaatttcttaagcacttttaccactgtttactcgatgaggccattgccaactggtgcagtctttagatgctttccagggcagtggaaagtgttttatgatgatccaaataggccaaatcggtatttgcttgcccgagaactcacaagtaggcccgatgcaactgatattgagagaatatttggtggtgccgatgagcaatctgaagaggcaccatcgttgatgaacaatgtcatgggcgtgttcagttccgtgagtcggtttatgagggtcatctccaagtgagagtcgaagcaaacattgttcacacttgaagccatcaacaaccatcatgatgcttgagttatacaagaagattattttagtgcatccatgttgttttcagtctgtaattactccatggtactgctattcggaacagtatagtttggcgttccggcacatgccaccaaatgtgtgcacataccataccgtggattcctggagtcatctgctgatcctacaccgtgaggtcaattatgtaagtgtgacttagaaaaaaaatgtagatagatcctcattctggaaaaagccgggtatttgattgtaattcaatactgtgcttgatatatcacaatcagctcgcattttgtaattcaatactggacgaatataaattcaatcctttgttttacatgtgtgttgtgtcagtcaatcagaacatttttctactctacagtgagtcagaatatctatcctctaaagtgacacacttatcctcagtatatatagttatatacaccgaatactgctgaaataaccatttttttaaggaagagaaacatttgaatgaagtgacctaaatacagtacattcagaatcttgggccgatgcgatcagtgctcccggttttccacaggagaggcggaggcgctgtgagagcctgccaagcccagcgacggctgcaggaac

SEQ ID NO: 79476 - DNA, 2116 bp, Zea Mays
ggaaattgatggaaccccgtttctatgcgttatccaaagagctgcatagcagcgcttctcccagccacgtcttcatcacacacggtcgcggcgcgaagcaatggcgaccacggcgccgctgctctcgccccagcgcgcttgccctacccatctccggcgccgcctctcgcccctacatctcgtattccccctcgacgcgtcagcgaggcggctgcgccttcgccgggcgccgccaccttgttcggccaagttcggcaagttcgacgcctccgacgccccggcggaggccgaggaggcggggggcgcgacggatggtgggctggcgcagcccgtggaggaggacgacagttgcttgccatcggatttggagggcgcgattcggcagtcagggaaggcgagcgcagatttcgtaaactccggaggcatgcgagctatcgcagaactgctgatccctcagttggaattcctcaacgaggaaggagcacaggctgaactctgggcgttgtcaaagattttcctggacacacttgtacaagagacaggacagaaagttactgccattttccctgacgctggagcagctgcccttctcaagcatcaatggaaagatgcacaattcaagtgtgccaggtactaatgtactatccactgagaagtgatggtttcataccaagttgatgtaacttgttgcatctcatgattttctgactacgagcggcatgctaccgacgtcaattggaaatcacaattgattttcttttgagaccaggaacagttaattttctagctaccaagaattggccagttcacctttagtcctagttgcaaatgccatattatactggacatgacaaggcagaattctgactctttgtattcttgaagaagaaactttatggatgcttccagattatgacattgaatagtattcaggttgttacttcgaatcttcaatctgtttttgacctgacttgtagtttaggtgaccggaagccagttggtcctgaagatgaggtcgcagttatgattatccctgatcatcagatgctggaagctgttgaacgcatcacatctcaactctctgatgatcctacctcttgtcatgtggaacccacggcttgttagtggagatgttggagtaggctttaatgtacggaatctgcggagaaatttcttaagcacttttaccactgtttactcgatgaggccattgccaactggtgcagtctttagatgctttccagggcagtggaaagtgttttatgatgatccaaataggccaaatcggtatttgcttgcccgagaactcacaagtaggcccgatgcaactgatattgagagaatatttggtggtgccgatgagcaatctgaagaggcaccatcgttgatgaacaatgtcatgggcgtgttcagttccgtgagtcggtttatgagggtcatctccaagtgagagtcgaagcaaacattgttcacacttgaagccatcaacaaccatcatgatgcttgagttatacaagaagattattttagtgcatccatgttgttttcagtctgtaattactccatggtactgctattcggaacagtatagtttggcgttccggcacatgccaccaaatgtgtgcacataccataccgtggattcctggagtcatctgctgatcctacaccgtgaggtcaattatgtaagtgtgacttagaaaaaaaatgtagatagatcctcattctggaaaaagccgggtatttgattgtaattcaatactgtgcttgatatatcacaatcagctcgcattttgtaattcaatactggacgaatataaattcaatcctttgttttacatgtgtgttgtgtcagtcaatcagaacatttttctactctacagtgagtcagaatatctatcctctaaagtgacacacttatcctcagtatatatagttatatacaccgaatactgctgaaataaccatttttttaaggaagagaaacatttgaatgaagtgacctaaatacagtacattcagaatcttgggccgatgcgatcagtgctcccggttttccacaggagaggcggaggcgctgtgagagcctgccaagcccagcgacggctgcaggaac

SEQ ID NO: 79477 - DNA, 425 bp, Zea Mays
gaggctcgtttccgctgcggcggagaggaatgggaagcgggcgtcgccttccctagcgctccctcgccgcgcccgcggcggcctccccggccccctgtatcttctcgatccgatatagttcaaaggatgctcgggtgtgaacttagatgaaggcaaagaggtgatctagaagatcaacggctcaagaaagacactagaagacttattaaaaatctaaacaattatgcaagggtacaagataagacgaagacatatggagacagaaaaaaacaacttaacagcaccagatatgtctaaagaggcacaggataattaaactaaagatacgagtgttactgtactgaaaagtgtgaatgaaatagaatactttagacatgcaggtgtgcattagatacaacacccatacaagaatatgatgtgtttgg

SEQ ID NO: 79478 - DNA, 2995 bp, Zea Mays
ctttattctaatcgctcacttaattaatcatgttgtatcaagacatattggatagagtaaacaacaatattagttagctaaataaaaaaaatatcgaacagtagagataattattaaaaaatcttgagattttttttggataatttacgttgaaatgcacaggcgactagtacaggccaccaatctggctcttccgtcaaagccctaccagaaccctacctcccgccgccggccgccccctcccgcggctaggaatgaccggcgccgccgcgctccggcaatcttctcgccggattttccggcacctcgccgctgcccccgcgttctctcgcagtgggctccaacatcccgagcgcctcctatcgtcgcagtcgtcgccggagcacggcgcgcgcggcgcggtgtccgggtcggagctggcgctgtacccgccggagcgggttcggaacttctcgatcatcgcgcacgtagaccacggcaagtcgacgctggctgaccggctgctggagctcaccggcaccatccagaagggccatgggcagccccagtacctcgacaaactgcaagttgagagagaaagggggattactgtcaaagcacaaacagcaaccatgttctacaggcacattactgcatctcaggactcagatatgccaagatatttgcttaatctgattgatacaccaggccatgtggatttcagctatgaggtatccaggtcccttgcggcttgccagggtgctcttttagtagttgacgcagcacaaggagtacaagctcaaacaatagcgaacttttaccttgcatttgaatcaaatttgagcatcattcctgtgattaacaagattgatcaaccgactgctgatccagataatgtaaaggatcaattgaagaggttatttgatattgatccaagtgaagctctgcttacttctgccaagactggtagaggccttgaacaggtattgcctgctgttattgaacgcataccttccccgcccgggaaatgtgatgcacctgtacggatgttgcttttggattcctactatgatgaatacagaggagtgatttgccatgttgctgttgttgatggtgctctgcgtaaaggtgataagattgcttcggctgcaactagccgtgcatatgaagttcttgacgttggcattatgcaccctgagcttacacctactggagttctctacactggacaagttggatatgttattagtggaatgcgttcaactaaagaagcacgcatcggtgatacccttcaccaggcaaagagtactgttgagccacttcctggtttcaagcctgtaaaacacatggtcttctctggtctctatcctgccgatggttccgactttgaagctcttagccatgcgattgagaaactaacatgtaatgatgccagtgtctctgttacaaaggagacaagtaatgcacttggcatgggattcagatgtggcttcctaggattgctacacatggatgtgttccatcaacggcttgagcaagaatatggagctcaagtcatatcgaccataccaaccgtaccttatatttttgaatacggtgatggaagcaaggtgcaagttgagaaccctgctgctttggcttcgaatcctggaaagcgtgtagcagcctgttgggagcccacagttattgcaacaatcattattcctagtatgttgggcctgtcattatgctttgttcagaaagaaggggcgaacagctagaatatacatttatcgatgcccaaagggctctgttgaagtaccgattaccattgaaggagataattgtggacttctacaatgagttgaagggcattacgtctggctatgctacttttgactacgaagattcagaataccaacaagctgatctagttaagatggatatccttctcaatggtcaacctgttgatgctatggcaactatagtgcataaccagaaggctcagcgggttggaaaggatttagtggagaagctcaagaaatttatagaaaggcaaatgtttgagatcaccatacaagcagcaattggttcaaaagttattgcaagggaaaccctgtccgcaatgaggaagaatgtcctggccaagtgctatggcggtgatattactcggaagaagaagttgctagagaagcaaaaggaaggcaagaagcgcatgaaacgtgtgggatctgtcgacattcctcaggaagccttccatgagctactgaaggtctccaattcaaaatagatggtgatccactgcaaatttagtttctgtagctgtccaaattttataagtagctgtgtggtgatgagtagcagcaaccttttctagtcatcttctgacagatcttgacagaatgatcgattccattgagtacataatggcctctcctgcgccttgtcagacgagccaacttgtgctggaagttgctcctcctgtagtcctgtcatccatcctgtggtgattgatatacacacaagtcttctcagctggccgcagacggatttcagtagagccaccatctttgtatttgttgattgattgatggaaaaccatcctttgagcacttgctgaacccagttttctctgctgacctgacttgtcacgttacactctattttttgtgttagataacggttttgagcaaaaataataggtcatatacacattaattggtcactgaaacaatgtggtacatgtaataagaggagctgcattgaataaagacatagtagtatcacgtttttggagtttgcgggctatctccttttcatcctgaaatgaacccctcttctaagccgagagtatcgtttggcttcgaacacagaagttgataaataaacacaaaaaataaaaaaaaagaatgcaccagccgggaatcgaacccgggtctgtaccgtggcagggtactattctaccactagaccactggtgctttcgtgtttttgttttacgtgaatcattttagtaatcccgggttctggactcgtg

SEQ ID NO: 79479 - DNA, 2714 bp, Zea Mays
gtacaggccaccaatctggctcttccgtcaaagccctaccagaaccctacctcccgccgccggccgccccctcccgcggctaggaatgaccggcgccgccgcgctccggcaatcttctcgccggattttccggcacctcgccgctgcccccgcgttctctcgcagtgggctccaacatcccgagcgcctcctatcgtcgcagtcgtcgccggagcacggcgcgcgcggcgcggtgtccgggtcggagctggcgctgtacccgccggagcgggttcggaacttctcgatcatcgcgcacgtagaccacggcaagtcgacgctggctgaccggctgctggagctcaccggcaccatccagaagggccatgggcagccccagtacctcgacaaactgcaagttgagagagaaagggggattactgtcaaagcacaaacagcaaccatgttctacaggcacattactgcatctcaggactcagatatgccaagatatttgcttaatctgattgatacaccaggccatgtggatttcagctatgaggtatccaggtcccttgcggcttgccagggtgctcttttagtagttgacgcagcacaaggagtacaagctcaaacaatagcgaacttttaccttgcatttgaatcaaatttgagcatcattcctgtgattaacaagattgatcaaccgactgctgatccagataatgtaaaggatcaattgaagaggttatttgatattgatccaagtgaagctctgcttacttctgccaagactggtagaggccttgaacaggtgataagattgcttcggctgcaactagccgtgcatatgaagttcttgacgttggcattatgcaccctgagcttacacctactggagttctctacactggacaagttggatatgttattagtggaatgcgttcaactaaagaagcacgcatcggtgatacccttcaccaggcaaagagtactgttgagccacttcctggtttcaagcctgtaaaacacatggtcttctctggtctctatcctgccgatggttccgactttgaagctcttagccatgcgattgagaaactaacatgtaatgatgccagtgtctctgttacaaaggagacaagtaatgcacttggcatgggattcagcaatctgtttttttatgtctgctttacagatgtggcttcctaggattgctacacatggatgtgttccatcaacggcttgagcaagaatatggagctcaagtcatatcgaccataccaaccgtaccttatatttttgaatacggtgatggaagcaaggtgcaagttgagaaccctgctgctttggcttcgaatcctggaaagcgtgtagcagcctgttgggagcccacagttattgcaacaatcattattcctagtgagtatgttgggcctgtcattatgctttgttcagaaagaaggggcgaacagctagaatatacatttatcgatgcccaaagggctctgttgaagtaccgattaccattgaaggagataattgtggacttctacaatgagttgaagggcattacgtctggctatgctacttttgactacgaagattcagaataccaacaagctgatctagttaagatggatatccttctcaatggtcaacctgttgatgctatggcaactatagtgcataaccagaaggctcagcgggttggaaaggatttagtggagaagctcaagaaatttatagaaaggcaaatgtttgagatcaccatacaagcagcaattggttcaaaagttattgcaagggaaaccctgtccgcaatgaggaagaatgtcctggccaagtgctatggcggtgatattactcggaagaagaagttgctagagaagcaaaaggaaggcaagaagcgcatgaaacgtgtgggatctgtcgacattcctcaggaagccttccatgagctactgaaggtctccaattcaaaatagatggtgatccactgcaaatttagtttctgtagctgtccaaattttataagtagctgtgtggtgatgagtagcagcaaccttttctagtcatcttctgacagatcttgacagaatgatcgattccattgagtacataatggcctctcctgcgccttgtcagacgagccaacttgtgctggaagttgctcctcctgtagtcctgtcatccatcctgtggtgattgatatacacacaagtcttctcagctggccgcagacggatttcagtagagccaccatctttgtatttgttgattgattgatggaaaaccatcctttgagcacttgctgaacccagttttctctgctgacctgacttgtcacgttacactctattttttgtgttagataacggttttgagcaaaaataataggtcatatacacattaattggtcactgaaacaatgtggtacatgtaataagaggagctgcattgaataaagacatagtagtatcacgtttttggagtttgcgggctatctccttttcatcctgaaatgaacccctcttctaagccgagagtatcgtttggcttcgaacacagaagttgataaataaacacaaaaaataaaaaaaaagaatgcaccagccgggaatcgaacccgggtctgtaccgtggcagggtactattctaccactagaccactggtgctttcgtgtttttgttttacgtgaatcattttagtaatcccgggttctggactcgtg

SEQ ID NO: 79480 - DNA, 2945 bp, Zea Mays
gtacaggccaccaatctggctcttccgtcaaagccctaccagaaccctacctcccgccgccggccgccccctcccgcggctaggaatgaccggcgccgccgcgctccggcaatcttctcgccggattttccggcacctcgccgctgcccccgcgttctctcgcagtgggctccaacatcccgagcgcctcctatcgtcgcagtcgtcgccggagcacggcgcgcgcggcgcggtgtccgggtcggagctggcgctgtacccgccggagcgggttcggaacttctcgatcatcgcgcacgtagaccacggcaagtcgacgctggctgaccggctgctggagctcaccggcaccatccagaagggccatgggcagccccagtacctcgacaaactgcaagttgagagagaaagggggattactgtcaaagcacaaacagcaaccatgttctacaggcacattactgcatctcaggactcagatatgccaagatatttgcttaatctgattgatacaccaggccatgtggatttcagctatgaggtatccaggtcccttgcggcttgccagggtgctcttttagtagttgacgcagcacaaggagtacaagctcaaacaatagcgaacttttaccttgcatttgaatcaaatttgagcatcattcctgtgattaacaagattgatcaaccgactgctgatccagataatgtaaaggatcaattgaagaggttatttgatattgatccaagtgaagctctgcttacttctgccaagactggtagaggccttgaacaggtattgcctgctgttattgaacgcataccttccccgcccgggaaatgtgatgcacctgtacggatgttgcttttggattcctactatgatgaatacagaggagtgatttgccatgttgctgttgttgatggtgctctgcgtaaaggtgataagattgcttcggctgcaactagccgtgcatatgaagttcttgacgttggcattatgcaccctgagcttacacctactggagttctctacactggacaagttggatatgttattagtggaatgcgttcaactaaagaagcacgcatcggtgatacccttcaccaggcaaagagtactgttgagccacttcctggtttcaagcctgtaaaacacatggtcttctctggtctctatcctgccgatggttccgactttgaagctcttagccatgcgattgagaaactaacatgtaatgatgccagtgtctctgttacaaaggagacaagtaatgcacttggcatgggattcagatgtggcttcctaggattgctacacatggatgtgttccatcaacggcttgagcaagaatatggagctcaagtcatatcgaccataccaaccgtaccttatatttttgaatacggtgatggaagcaaggtgcaagttgagaaccctgctgctttggcttcgaatcctggaaagcgtgtagcagcctgttgggagcccacagttattgcaacaatcattattcctagtgagtatgttgggcctgtcattatgctttgttcagaaagaaggggcgaacagctagaatatacatttatcgatgcgtaaacctttcttgcttttaattctcagttttgttaagtgctcatctattctttgctttttattcatatggcttattttgatgcagccaaagggctctgttgaagtaccgattaccattgaaggagataattgtggacttctacaatgagttgaagggcattacgtctggctatgctacttttgactacgaagattcagagtaagccctgttgtgaatgcaataacaagataccaacaagctgatctagttaagatggatatccttctcaatggtcaacctgttgatgctatggcaactatagtgcataaccagaaggctcagcgggttggaaaggatttagtggagaagctcaagaaatttatagaaaggcaaatgtttgagatcaccatacaagcagcaattggttcaaaagttattgcaagggaaaccctgtccgcaatgaggaagaatgtcctggccaagtgctatggcggtgatattactcggaagaagaagttgctagagaagcaaaaggaaggcaagaagcgcatgaaacgtgtgggatctgtcgacattcctcaggaagccttccatgagctactgaaggtctccaattcaaaatagatggtgatccactgcaaatttagtttctgtagctgtccaaattttataagtagctgtgtggtgatgagtagcagcaaccttttctagtcatcttctgacagatcttgacagaatgatcgattccattgagtacataatggcctctcctgcgccttgtcagacgagccaacttgtgctggaagttgctcctcctgtagtcctgtcatccatcctgtggtgattgatatacacacaagtcttctcagctggccgcagacggatttcagtagagccaccatctttgtatttgttgattgattgatggaaaaccatcctttgagcacttgctgaacccagttttctctgctgacctgacttgtcacgttacactctattttttgtgttagataacggttttgagcaaaaataataggtcatatacacattaattggtcactgaaacaatgtggtacatgtaataagaggagctgcattgaataaagacatagtagtatcacgtttttggagtttgcgggctatctccttttcatcctgaaatgaacccctcttctaagccgagagtatcgtttggcttcgaacacagaagttgataaataaacacaaaaaataaaaaaaaagaatgcaccagccgggaatcgaacccgggtctgtaccgtggcagggtactattctaccactagaccactggtgctttcgtgtttttgttttacgtgaatcattttagtaatcccgggttctggactcgtg

SEQ ID NO: 79481 - DNA, 2816 bp, Zea Mays
gtacaggccaccaatctggctcttccgtcaaagccctaccagaaccctacctcccgccgccggccgccccctcccgcggctaggaatgaccggcgccgccgcgctccggcaatcttctcgccggattttccggcacctcgccgctgcccccgcgttctctcgcagtgggctccaacatcccgagcgcctcctatcgtcgcagtcgtcgccggagcacggcgcgcgcggcgcggtgtccgggtcggagctggcgctgtacccgccggagcgggttcggaacttctcgatcatcgcgcacgtagaccacggcaagtcgacgctggctgaccggctgctggagctcaccggcaccatccagaagggccatgggcagccccagtacctcgacaaactgcaagttgagagagaaagggggattactgtcaaagcacaaacagcaaccatgttctacaggcacattactgcatctcaggactcagatatgccaagatatttgcttaatctgattgatacaccaggccatgtggatttcagctatgaggtatccaggtcccttgcggcttgccagggtgctcttttagtagttgacgcagcacaaggagtacaagctcaaacaatagcgaacttttaccttgcatttgaatcaaatttgagcatcattcctgtgattaacaagattgatcaaccgactgctgatccagataatgtaaaggatcaattgaagaggttatttgatattgatccaagtgaagctctgcttacttctgccaagactggtagaggccttgaacaggtattgcctgctgttattgaacgcataccttccccgcccgggaaatgtgatgcacctgtacggatgttgcttttggattcctactatgatgaatacagaggagtgatttgccatgttgctgttgttgatggtgctctgcgtaaaggtgataagattgcttcggctgcaactagccgtgcatatgaagttcttgacgttggcattatgcaccctgagcttacacctactggagttctctacactggacaagttggatatgttattagtggaatgcgttcaactaaagaagcacgcatcggtgatacccttcaccaggcaaagagtactgttgagccacttcctggtttcaagcctgtaaaacacatggtcttctctggtctctatcctgccgatggttccgactttgaagctcttagccatgcgattgagaaactaacatgtaatgatgccagtgtctctgttacaaaggagacaagtaatgcacttggcatgggattcagatgtggcttcctaggattgctacacatggatgtgttccatcaacggcttgagcaagaatatggagctcaagtcatatcgaccataccaaccgtaccttatatttttgaatacgcaaggtgcaagttgagaaccctgctgctttggcttcgaatcctggaaagcgtgtagcagcctgttgggagcccacagttattgcaacaatcattattcctagtatgttgggcctgtcattatgctttgttcagaaagaaggggcgaacagctagaatatacatttatcgatgcccaaagggctctgttgaagtaccgattaccattgaaggagataattgtggacttctacaatgagttgaagggcattacgtctggctatgctacttttgactacgaagattcagaataccaacaagctgatctagttaagatggatatccttctcaatggtcaacctgttgatgctatggcaactatagtgcataaccagaaggctcagcgggttggaaaggatttagtggagaagctcaagaaatttatagaaaggcaaatgtttgagatcaccatacaagcagcaattggttcaaaagttattgcaagggaaaccctgtccgcaatgaggaagaatgtcctggccaagtgctatggcggtgatattactcggaagaagaagttgctagagaagcaaaaggaaggcaagaagcgcatgaaacgtgtgggatctgtcgacattcctcaggaagccttccatgagctactgaaggtctccaattcaaaatagatggtgatccactgcaaatttagtttctgtagctgtccaaattttataagtagctgtgtggtgatgagtagcagcaaccttttctagtcatcttctgacagatcttgacagaatgatcgattccattgagtacataatggcctctcctgcgccttgtcagacgagccaacttgtgctggaagttgctcctcctgtagtcctgtcatccatcctgtggtgattgatatacacacaagtcttctcagctggccgcagacggatttcagtagagccaccatctttgtatttgttgattgattgatggaaaaccatcctttgagcacttgctgaacccagttttctctgctgacctgacttgtcacgttacactctattttttgtgttagataacggttttgagcaaaaataataggtcatatacacattaattggtcactgaaacaatgtggtacatgtaataagaggagctgcattgaataaagacatagtagtatcacgtttttggagtttgcgggctatctccttttcatcctgaaatgaacccctcttctaagccgagagtatcgtttggcttcgaacacagaagttgataaataaacacaaaaaataaaaaaaaagaatgcaccagccgggaatcgaacccgggtctgtaccgtggcagggtactattctaccactagaccactggtgctttcgtgtttttgttttacgtgaatcattttagtaatcccgggttctggactcgtg

SEQ ID NO: 79482 - DNA, 2834 bp, Zea Mays
gtacaggccaccaatctggctcttccgtcaaagccctaccagaaccctacctcccgccgccggccgccccctcccgcggctaggaatgaccggcgccgccgcgctccggcaatcttctcgccggattttccggcacctcgccgctgcccccgcgttctctcgcagtgggctccaacatcccgagcgcctcctatcgtcgcagtcgtcgccggagcacggcgcgcgcggcgcggtgtccgggtcggagctggcgctgtacccgccggagcgggttcggaacttctcgatcatcgcgcacgtagaccacggcaagtcgacgctggctgaccggctgctggagctcaccggcaccatccagaagggccatgggcagccccagtacctcgacaaactgcaagttgagagagaaagggggattactgtcaaagcacaaacagcaaccatgttctacaggcacattactgcatctcaggactcagatatgccaagatatttgcttaatctgattgatacaccaggccatgtggatttcagctatgaggtatccaggtcccttgcggcttgccagggtgctcttttagtagttgacgcagcacaaggagtacaagctcaaacaatagcgaacttttaccttgcatttgaatcaaatttgagcatcattcctgtgattaacaagattgatcaaccgactgctgatccagataatgtaaaggatcaattgaagaggttatttgatattgatccaagtgaagctctgcttacttctgccaagactggtagaggccttgaacaggtattgcctgctgttattgaacgcataccttccccgcccgggaaatgtgatgcacctgtacggatgttgcttttggattcctactatgatgaatacagaggagtgatttgccatgttgctgttgttgatggtgctctgcgtaaaggtgataagattgcttcggctgcaactagccgtgcatatgaagttcttgacgttggcattatgcaccctgagcttacacctactggagttctctacactggacaagttggatatgttattagtggaatgcgttcaactaaagaagcacgcatcggtgatacccttcaccaggcaaagagtactgttgagccacttcctgtctttcaggtttcaagcctgtaaaacacatggtcttctctggtctctatcctgccgatggttccgactttgaagctcttagccatgcgattgagaaactaacatgtaatgatgccagtgtctctgttacaaaggagacaagtaatgcacttggcatgggattcagatgtggcttcctaggattgctacacatggatgtgttccatcaacggcttgagcaagaatatggagctcaagtcatatcgaccataccaaccgtaccttatatttttgaatacggtgatggaagcaaggtgcaagttgagaaccctgctgctttggcttcgaatcctggaaagcgtgtagcagcctgttgggagcccacagttattgcaacaatcattattcctagtatgttgggcctgtcattatgctttgttcagaaagaaggggcgaacagctagaatatacatttatcgatgcccaaagggctctgttgaagtaccgattaccattgaaggagataattgtggacttctacaatgagttgaagggcattacgtctggctatgctacttttgactacgaagattcagaataccaacaagctgatctagttaagatggatatccttctcaatggtcaacctgttgatgctatggcaactatagtgcataaccagaaggctcagcgggttggaaaggatttagtggagaagctcaagaaatttatagaaaggcaaatgtttgagatcaccatacaagcagcaattggttcaaaagttattgcaagggaaaccctgtccgcaatgaggaagaatgtcctggccaagtgctatggcggtgatattactcggaagaagaagttgctagagaagcaaaaggaaggcaagaagcgcatgaaacgtgtgggatctgtcgacattcctcaggaagccttccatgagctactgaaggtctccaattcaaaatagatggtgatccactgcaaatttagtttctgtagctgtccaaattttataagtagctgtgtggtgatgagtagcagcaaccttttctagtcatcttctgacagatcttgacagaatgatcgattccattgagtacataatggcctctcctgcgccttgtcagacgagccaacttgtgctggaagttgctcctcctgtagtcctgtcatccatcctgtggtgattgatatacacacaagtcttctcagctggccgcagacggatttcagtagagccaccatctttgtatttgttgattgattgatggaaaaccatcctttgagcacttgctgaacccagttttctctgctgacctgacttgtcacgttacactctattttttgtgttagataacggttttgagcaaaaataataggtcatatacacattaattggtcactgaaacaatgtggtacatgtaataagaggagctgcattgaataaagacatagtagtatcacgtttttggagtttgcgggctatctccttttcatcctgaaatgaacccctcttctaagccgagagtatcgtttggcttcgaacacagaagttgataaataaacacaaaaaataaaaaaaaagaatgcaccagccgggaatcgaacccgggtctgtaccgtggcagggtactattctaccactagaccactggtgctttcgtgtttttgttttacgtgaatcattttagtaatcccgggttctggactcgtg

SEQ ID NO: 79483 - DNA, 2554 bp, Zea Mays
ctgagggttaccaggttgagagagaaagggggattactgtcaaagcacaaacagcaaccatgttctacaggcacattactgcatctcaggactcagatatgccaagatatttgcttaatctgattgatacaccaggccatgtggatttcagctatgaggtatccaggtcccttgcggcttgccagggtgctcttttagtagttgacgcagcacaaggagtacaagctcaaacaatagcgaacttttaccttgcatttgaatcaaatttgagcatcattcctgtgattaacaagattgatcaaccgactgctgatccagataatgtaaaggatcaattgaagaggttatttgatattgatccaagtgaagctctgcttacttctgccaagactggtagaggccttgaacaggtattgcctgctgttattgaacgcataccttccccgcccgggaaatgtgatgcacctgtacggatgttgcttttggattcctactatgatgaatacagaggagtgatttgccatgttgctgttgttgatggtgctctgcgtaaaggtgataagattgcttcggctgcaactagccgtgcatatgaagttcttgacgttggcattatgcaccctgagcttacacctactggagttctctacactggacaagttggatatgttattagtggaatgcgttcaactaaagaagcacgcatcggtgatacccttcaccaggcaaagagtactgttgagccacttcctggtttcaagcctgtaaaacacatggtcttctctggtctctatcctgccgatggttccgactttgaagctcttagccatgcgattgagaaactaacatgtaatgatgccagtgtctctgttacaaaggagacaagtaatgcacttggcatgggattcaggtaccactgtacccgatttcctacatgtgaactagttcgtttctgttgttttcattacactgagtatgggacttgcagcaatctgtttttttatgtctgctttacagatgtggcttcctaggattgctacacatggatgtgttccatcaacggcttgagcaagaatatggagctcaagtcatatcgaccataccaaccgtaccttatatttttgaatacggtgatggaagcaaggtgcaagttgagaaccctgctgctttggcttcgaatcctggaaagcgtgtagcagcctgttgggagcccacagttattgcaacaatcattattcctagtgagtatgttgggcctgtcattatgctttgttcagaaagaaggggcgaacagctagaatatacatttatcgatgcccaaagggctctgttgaagtaccgattaccattgaaggagataattgtggacttctacaatgagttgaagggcattacgtctggctatgctacttttgactacgaagattcagaataccaacaagctgatctagttaagatggatatccttctcaatggtcaacctgttgatgctatggcaactatagtgcataaccagaaggctcagcgggttggaaaggatttagtggagaagctcaagaaatttatagaaaggcaaatgtttgagatcaccatacaagcagcaattggttcaaaagttattgcaagggaaaccctgtccgcaatgaggaagaatgtcctggccaagtgctatggcggtgatattactcggaagaagaagttgctagagaagcaaaaggaaggcaagaagcgcatgaaacgtgtgggatctgtcgacattcctcaggaagccttccatgagctactgaaggtctccaattcaaaatagatggtgatccactgcaaatttagtttctgtagctgtccaaattttataagtagctgtgtggtgatgagtagcagcaaccttttctagtcatcttctgacagatcttgacagaatgatcgattccattgagtacataatggcctctcctgcgccttgtcagacgagccaacttgtgctggaagttgctcctcctgtagtcctgtcatccatcctgtggtgattgatatacacacaagtcttctcagctggccgcagacggatttcagtagagccaccatctttgtatttgttgattgattgatggaaaaccatcctttgagcacttgctgaacccagttttctctgctgacctgacttgtcacgttacactctattttttgtgttagataacggttttgagcaaaaataataggtcatatacacattaattggtcactgaaacaatgtggtacatgtaataagaggagctgcattgaataaagacatagtagtatcacgtttttggagtttgcgggctatctccttttcatcctgaaatgaacccctcttctaagccgagagtatcgtttggcttcgaacacagaagttgataaataaacacaaaaaataaaaaaaaagaatgcaccagccgggaatcgaacccgggtctgtaccgtggcagggtactattctaccactagaccactggtgctttcgtgtttttgttttacgtgaatcattttagtaatcccgggttctggactcgtg

SEQ ID NO: 79484 - DNA, 2974 bp, Zea Mays
gtcgatgtcgatccctctcccgaacgaaccagtcaaacacacaccggcctcgcagtcgcagcctcgctccggaggcggagcgccggagccccgcccacctcccctaaacggccagggcctgaccacccccacctcagtccctctcctgtgggcggcgtcctcccgcgcccatggggatctcgcacctccagcccgtcctcctcctcctcatgctccgggctctcgcgtcgcttcccacgcaggccgccgcgagaggcggccacgatccgtcagatgatggagcccacgggccattttcacgtaaacttcttgaagataagcctcagatcacagaagaaatggtccgtggatatatgagcaacactgagcttgagactgctgtacatgcctttggaagtcgttgttccaatatctccagggtgtacaggtacacgatgtataatgttttacttctgtgataattacatttggagcttctaaacaaacttttaagaccatcagtttttaaggacatgtaaatgactgtgtcattggtgggtagtaccgtagtaatataaggtcaggagcgactgcgtctttgacagacaaaggcccagcatggacagcatcgtcatgagagcgagagaggagagggagctttgggagatggctggaggctggagctaagagcatgtctctccttatggctccgactccagggttgtagggcccccttagtagcgatgtggtcaccattatttgtttagtcgtatgaggtatgacccccccttttttgtattcttgtttttggccatcgtaagtggttttatcttgtaacggccggcttggaccttaaccactttcttcttaatataatgacgcgcagctctcctgtgcttccgaggaaaaaaaggatttaaaatcattatcaaccatgagagaaacaacattgcatgcagtcatgttgatgggtaacaccgtaacagcaaatggataaaatgaaacatgtatctttttgaaaagaaaaccaatcatgaagcgccaacttagggcttgttcggttagagtgagattgggtgggtttaaatcccaagcaagtcaaagttcttctaaattttttccaatcccatccaatccatgtataatgtgaataaccgaacaaggccttatagcataattatatccataaggtacatgtattaattctgttttacttcagattgttttttgaggagaaaaatgtaggttttacttcagattgttgaaatgttccatgttcattggtcatgattagcaattttaagcatttcctgagtaacagaatattttggtttcaatctctttattctgttggtttgttatacaacttctgtactgtccttggatatctcattttttaagtgcactgcttctttctttattttgtgccctcctgttttctcatatgtccacacttcacttacattttatttcttctctctttgagggataacacaaacctgctatcagcattggaaagagtgtgaatcattttccattgtgggtgattgaaatatcagacaagcccaggcaaagggaatctgaaccagcattcaagttcattggaaatgttcatggtgatgagcctgttggaagagaggttcttatgcatcttgcaaattggctgtgtgataactatctgaaagattcactggcaactctcattgttgagaacatgcaccttcatatacttccgacgatgaaccctgatgggtttgctcttagatggcgtggtaatgcaaacaatattgatctcaacagggattttcctgaccaattcttccccgttaacaacgatattgactacagacagcctgaaactagagccattatgaattgggtaaagcaagaacacttcacggcttctgctagcttgcatgggggggctcttgttgccaactatccatgggatggaactagagacacaagcaaacactactacggatgtcctgacgataagacattccagcacatggcatctgtgtatagtcggtctcactataacatgtctttgagcaaagaatttgaaggagggataacaaatggagcattctggtacccaatatatggtggtatgcaggactggaactatatacatggaggctgctttgagttaactctggagattagtgacacaaagtggccaaaagcagatgagcttcctatcatctgggaacacaataggatgagtatgctcaatcttctagcaagcctaataaagtcaggggttcatggaaggatatttgcagcagatacgggcaggcctgtacccggctcagtgatgataaagggcattgattccaaggtaagcgcgagcagcacttttggagattaccatcgaattgttgcgcctggtgagacatatgaagtggtggcatcgatgcgaggcttccggcaaaaatctacacgcatcaggctggagcaggaagccgtcagcctggatttcatcctggacccggatggagccgatgggcagacgaagctgctgccccgtagtaacgaccggggctgccgctgcgacaacgacaacgccgccaagccgttccatgtccacgaagctcacctctggttgtacctccttatcgtgtccgttctcctggccctctacgtagtcttcaagaggaaaacggtgccgaggctgctggcgtatagacactcatcgtcactcagacggcctgttgctgtataagaggaactaattttgtggtctaggcggatagttttgtactacctctgttctcgaatagttgttgtccgctagttaatttttatagctagttcatttttatactaaaatgtgacaaatagaaaagaacggagggaaggagcaactgaagttagtcttctctttgccaaaacggtcggttgctgtataagttgaaggatgggtaatgtaccatggaaatgacattttttttgaatcaatgaaatacatgttgcgttgatgacaaggaaa

SEQ ID NO: 79485 - DNA, 2911 bp, Zea Mays
gtcaaacacacaccggcctcgcagtcgcagcctcgctccggaggcggagcgccggagccccgcccacctcccctaaacggccagggcctgaccacccccacctcagtccctctcctgtgggcggcgtcctcccgcgcccatggggatctcgcacctccagcccgtcctcctcctcctcatgctccgggctctcgcgtcgcttcccacgcaggccgccgcgagaggcggccacgatccgtcagatgatggagcccacgggccattttcacgtaaacttcttgaagataagcctcagatcacagaagaaatggtccgtggatatatgagcaacactgagcttgagactgctgtacatgcctttggaagtcgttgttccaatatctccagggtgtacaggtacacgatgtataatgttttacttctgtgataattacatttggagcttctaaacaaacttttaagaccatcagtttttaaggacatgtaaatgactgtgtcattggtgggtagtaccgtagtaatataaggtcaggagcgactgcgtctttgacagacaaaggcccagcatggacagcatcgtcatgagagcgagagaggagagggagctttgggagatggctggaggctggagctaagagcatgtctctccttatggctccgactccagggttgtagggcccccttagtagcgatgtggtcaccattatttgtttagtcgtatgaggtatgacccccccttttttgtattcttgtttttggccatcgtaagtggttttatcttgtaacggccggcttggaccttaaccactttcttcttaatataatgacgcgcagctctcctgtgcttccgaggaaaaaaaggatttaaaatcattatcaaccatgagagaaacaacattgcatgcagtcatgttgatgggtaacaccgtaacagcaaatggataaaatgaaacatgtatctttttgaaaagaaaaccaatcatgaagcgccaacttagggcttgttcggttagagtgagattgggtgggtttaaatcccaagcaagtcaaagttcttctaaattttttccaatcccatccaatccatgtataatgtgaataaccgaacaaggccttatagcataattatatccataaggtacatgtattaattctgttttacttcagattgttttttgaggagaaaaatgtaggttttacttcagattgttgaaatgttccatgttcattggtcatgattagcaattttaagcatttcctgagtaacagaatattttggtttcaatctctttattctgttggtttgttatacaacttctgtactgtccttggatatctcattttttaagtgcactgcttctttctttattttgtgccctcctgttttctcatatgtccacacttcacttacattttatttcttctctctttgagggataacacaaacctgctatcagcattggaaagagtgtgaatcattttccattgtgggtgattgaaatatcagacaagcccaggcaaagggaatctgaaccagcattcaagttcattggaaatgttcatggtgatgagcctgttggaagagaggttcttatgcatcttgcaaattggctgtgtgataactatctgaaagattcactggcaactctcattgttgagaacatgcaccttcatatacttccgacgatgaaccctgatgggtttgctcttagatggcgtggtaatgcaaacaatattgatctcaacagggattttcctgaccaaacagcctgaaactagagccattatgaattgggtaaagcaagaacacttcacggcttctgctagcttgcatgggggggctcttgttgccaactatccatgggatggaactagagacacaagcaaacactactacggatgtcctgacgataagacattccagcacatggcatctgtgtatagtcggtctcactataacatgtctttgagcaaagaatttgaaggagggataacaaatggagcattctggtacccaatatatggtggtatgcaggactggaactatatacatggaggctgctttgagttaactctggagattagtgacacaaagtggccaaaagcagatgagcttcctatcatctgggaacacaataggatgagtatgctcaatcttctagcaagcctaataaagtcaggggttcatggaaggatatttgcagcagatacgggcaggcctgtacccggctcagtgatgataaagggcattgattccaaggtaagcgcgagcagcacttttggagattaccatcgaattgttgcgcctggtgagacatatgaagtggtggcatcgatgcgaggcttccggcaaaaatctacacgcatcaggctggagcaggaagccgtcagcctggatttcatcctggacccggatggagccgatgggcagacgaagctgctgccccgtagtaacgaccggggctgccgctgcgacaacgacaacgccgccaagccgttccatgtccacgaagctcacctctggttgtacctccttatcgtgtccgttctcctggccctctacgtagtcttcaagaggaaaacggtgccgaggctgctggcgtatagacactcatcgtcactcagacggcctgttgctgtataagaggaactaattttgtggtctaggcggatagttttgtactacctctgttctcgaatagttgttgtccgctagttaatttttatagctagttcatttttatactaaaatgtgacaaatagaaaagaacggagggaaggagcaactgaagttagtcttctctttgccaaaacggtcggttgctgtataagttgaaggatgggtaatgtaccatggaaatgacattttttttgaatcaatgaaatacatgttgcgttgatgacaaggaaa

SEQ ID NO: 79486 - DNA, 3014 bp, Zea Mays
caaacacacaccggcctcgcagtcgcagcctcgctccggaggcggagcgccggagccccgcccacctcccctaaacggccagggcctgaccacccccacctcagtccctctcctgtgggcggcgtcctcccgcgcccatggggatctcgcacctccagcccgtcctcctcctcctcatgctccgggctctcgcgtcgcttcccacgcaggccgccgcgagaggcggccacgatccgtcagatgatggagcccacgggccattttcacgtaaacttcttgaagataagcctcagatcacagaagaaatggtccgtggatatatgagcaacactgagcttgagactgctgtacatgcctttggaagtcgttgttccaatatctccagggtgtacaggtacacgatgtataatgttttacttctgtgataattacatttggagcttctaaacaaacttttaagaccatcagtttttaaggacatgtaaatgactgtgtcattggtgggtagtaccgtagtaatataaggtcaggagcgactgcgtctttgacagacaaaggcccagcatggacagcatcgtcatgagagcgagagaggagagggagctttgggagatggctggaggctggagctaagagcatgtctctccttatggctccgactccagggttgtagggcccccttagtagcgatgtggtcaccattatttgtttagtcgtatgaggtatgacccccccttttttgtattcttgtttttggccatcgtaagtggttttatcttgtaacggccggcttggaccttaaccactttcttcttaatataatgacgcgcagctctcctgtgcttccgaggaaaaaaaggatttaaaatcattatcaaccatgagagaaacaacattgcatgcagtcatgttgatgggtaacaccgtaacagcaaatggataaaatgaaacatgtatctttttgaaaagaaaaccaatcatgaagcgccaacttagggcttgttcggttagagtgagattgggtgggtttaaatcccaagcaagtcaaagttcttctaaattttttccaatcccatccaatccatgtataatgtgaataaccgaacaaggccttatagcataattatatccataaggtacatgtattaattctgttttacttcagattgttttttgaggagaaaaatgtaggttttacttcagattgttgaaatgttccatgttcattggtcatgattagcaattttaagcatttcctgagtaacagaatattttggtttcaatctctttattctgttggtttgttatacaacttctgtactgtccttggatatctcattttttaagtgcactgcttctttctttattttgtgccctcctgttttctcatatgtccacacttcacttacattttatttcttctctctttgagggataacacaaacctgctatcagcattggaaagagtgtgaatcattttccattgtgggtgattgaaatatcagacaagcccaggcaaagggaatctgaaccagcattcaagttcattggaaatgttcatggtgatgagcctgttggaagagaggttcttatgcatcttgcaaattggctgtgtgataactatctgaaagattcactggcaactctcattgttgagaacatgcaccttcatatacttccgacgatgaaccctgatgggtttgctcttagatggcgtggtaatgcaaacaatattgatctcaacagggattttcctgaccaattcttccccgttaacaacgatattgactacagacagcctgaaactagagccattatgaattgggtaaagcaagaacacttcacggcttctgctagcttgcatgggggggctcttgttgccaactatccatgggatggaactagagacacaaggtctgttggcatctatcattttgcaaatttgcaccagcaacagaacatgtacacggcgaagacaaatcattagcaaacactactacggatgtcctgacgataagacattccagcacatggcatctgtgtatagtcggtctcactataacatgtctttgagcaaagaatttgaaggagggataacaaatggagcattctggtacccaatatatggtggtatgcaggactggaactatatacatggaggctgctttgagttaactctggagattagtgacacaaagtggccaaaagcagatgagcttcctatcatctgggaacacaataggatgagtatgctcaatcttctagcaagcctaataaagtcaggggttcatggaaggatatttgcagcagatacgggcaggcctgtacccggctcagtgatgataaagggcattgattccaaggtaagcgcgagcagcacttttggagattaccatcgaattgttgcgcctggtgagacatatgaagtggtggcatcgatgcgaggcttccggcaaaaatctacacgcatcaggctggagcaggaagccgtcagcctggatttcatcctggacccggatggagccgatgggcagacgaagctgctgccccgtagtaacgaccggggctgccgctgcgacaacgacaacgccgccaagccgttccatgtccacgaagctcacctctggttgtacctccttatcgtgtccgttctcctggccctctacgtagtcttcaagaggaaaacggtgccgaggctgctggcgtatagacactcatcgtcactcagacggcctgttgctgtataagaggaactaattttgtggtctaggcggatagttttgtactacctctgttctcgaatagttgttgtccgctagttaatttttatagctagttcatttttatactaaaatgtgacaaatagaaaagaacggagggaaggagcaactgaagttagtcttctctttgccaaaacggtcggttgctgtataagttgaaggatgggtaatgtaccatggaaatgacattttttttgaatcaatgaaatacatgttgcgttgatgacaaggaaa

SEQ ID NO: 79487 - DNA, 1287 bp, Zea Mays
aaacacacaccggcctcgcagtcgcagcctcgctccggaggcggagcgccggagccccgcccacctcccctaaacggccagggcctgaccacccccacctcagtccctctcctgtgggcggcgtcctcccgcgcccatggggatctcgcacctccagcccgtcctcctcctcctcatgctccgggctctcgcgtcgcttcccacgcaggccgccgcgagaggcggccacgatccgtcagatgatggagcccacgggccattttcacgtaaacttcttgaagataagcctcagatcacagaagaaatggtccgtggatatatgagcaacactgagcttgagactgctgtacatgcctttggaagtcgttgttccaatatctccagggtgtacagcattggaaagagtgtgaatcattttccattgtgggtgattgaaatatcagacaagcccaggcaaagggaatctgaaccagcattcaagttcattggaaatgttcatggtgatgagcctgttggaagagaggttcttatgcatcttgcaaattggctgtgtgataactatctgaaagattcactggcaactctcattgttgagaacatgcaccttcatatacttccgacgatgaaccctgatgggtttgctcttagatggcgtggtaatgcaaacaatattgatctcaacagggattttcctgaccaaacagcctgaaactagagccattatgaattgggtaaagcaagaacacttcacggcttctgctagcttgcatgggggggctcttgttgccaactatccatgggatggaactagagacacaagcaaacactactacggatgtcctgacgataagacattccagcacatggcatctgtgtatagtcggtctcactataacatgtctttgagcaaagaatttgaaggagggataacaaatggagcattctggtacccaatatatggtggtatgcaggactggaactatatacatggaggctgctttgagttaactctggagattagtgacacaaagtggccaaaagcagatgagcttcctatcatctgggaacacaataggatgagtatgctcaatcttctagcaagcctaataaagtcaggggttcatggaaggatatttgcagcagatacgggcaggcctgtacccggctcagtgatgataaagggcattgattccaaggtaagcgcgagcagcacttttggagattaccatcgaattgttgcgcctggtgagacatatgaagttaacagaagagagtagtaaacctaag

SEQ ID NO: 79488 - DNA, 1319 bp, Zea Mays
aaacacacaccggcctcgcagtcgcagcctcgctccggaggcggagcgccggagccccgcccacctcccctaaacggccagggcctgaccacccccacctcagtccctctcctgtgggcggcgtcctcccgcgcccatggggatctcgcacctccagcccgtcctcctcctcctcatgctccgggctctcgcgtcgcttcccacgcaggccgccgcgagaggcggccacgatccgtcagatgatggagcccacgggccattttcacgtaaacttcttgaagataagcctcagatcacagaagaaatggtccgtggatatatgagcaacactgagcttgagactgctgtacatgcctttggaagtcgttgttccaatatctccagggtgtacagcattggaaagagtgtgaatcattttccattgtgggtgattgaaatatcagacaagcccaggcaaagggaatctgaaccagcattcaagttcattggaaatgttcatggtgatgagcctgttggaagagaggttcttatgcatcttgcaaattggctgtgtgataactatctgaaagattcactggcaactctcattgttgagaacatgcaccttcatatacttccgacgatgaaccctgatgggtttgctcttagatggcgtggtaatgcaaacaatattgatctcaacagggattttcctgaccaattcttccccgttaacaacgatattgactacagacagcctgaaactagagccattatgaattgggtaaagcaagaacacttcacggcttctgctagcttgcatgggggggctcttgttgccaactatccatgggatggaactagagacacaagcaaacactactacggatgtcctgacgataagacattccagcacatggcatctgtgtatagtcggtctcactataacatgtctttgagcaaagaatttgaaggagggataacaaatggagcattctggtacccaatatatggtggtatgcaggactggaactatatacatggaggctgctttgagttaactctggagattagtgacacaaagtggccaaaagcagatgagcttcctatcatctgggaacacaataggatgagtatgctcaatcttctagcaagcctaataaagtcaggggttcatggaaggatatttgcagcagatacgggcaggcctgtacccggctcagtgatgataaagggcattgattccaaggtaagcgcgagcagcacttttggagattaccatcgaattgttgcgcctggtgagacatatgaagttaacagaagagagtagtaaacctaag

SEQ ID NO: 79489 - DNA, 2348 bp, Zea Mays
aaacacacaccggcctcgcagtcgcagcctcgctccggaggcggagcgccggagccccgcccacctcccctaaacggccagggcctgaccacccccacctcagtccctctcctgtgggcggcgtcctcccgcgcccatggggatctcgcacctccagcccgtcctcctcctcctcatgctccgggctctcgcgtcgcttcccacgcaggccgccgcgagaggcggccacgatccgtcagatgatggagcccacgggccattttcacgtaaacttcttgaagataagcctcagatcacagaagaaatggtccgtggatatatgagcaacactgagcttgagactgctgtacatgcctttggaagtcgttgttccaatatctccagggtgtacaggtacacgatgtataatgttttacttctgtgataattacatttggagcttctaaacaaacttttaagaccatcagtttttaaggacatgtaaatgactgtgtcattggtgggtagtaccgtagtaatataaggtcaggagcgactgcgtctttgacagacaaaggcccagcatggacagcatcgtcatgagagcgagagaggagagggagctttgggagatggctggaggctggagctaagagcatgtctctccttatggctccgactccagggttgtagggcccccttagtagcgatgtggtcaccattatttgtttagtcgtatgaggtatgacccccccttttttgtattcttgtttttggccatcgtaagtggttttatcttgtaacggccggcttggaccttaaccactttcttcttaatataatgacgcgcagctctcctgtgcttccgaggaaaaaaaggatttaaaatcattatcaaccatgagagaaacaacattgcatgcagtcatgttgatgggtaacaccgtaacagcaaatggataaaatgaaacatgtatctttttgaaaagaaaaccaatcatgaagcgccaacttagggcttgttcggttagagtgagattgggtgggtttaaatcccaagcaagtcaaagttcttctaaattttttccaatcccatccaatccatgtataatgtgaataaccgaacaaggccttatagcataattatatccataaggtacatgtattaattctgttttacttcagattgttttttgaggagaaaaatgtaggttttacttcagattgttgaaatgttccatgttcattggtcatgattagcaattttaagcatttcctgagtaacagaatattttggtttcaatctctttattctgttggtttgttatacaacttctgtactgtccttggatatctcattttttaagtgcactgcttctttctttattttgtgccctcctgttttctcatatgtccacacttcacttacattttatttcttctctctttgagggataacacaaacctgctatcagcattggaaagagtgtgaatcattttccattgtgggtgattgaaatatcagacaagcccaggcaaagggaatctgaaccagcattcaagttcattggaaatgttcatggtgatgagcctgttggaagagaggttcttatgcatcttgcaaattggctgtgtgataactatctgaaagattcactggcaactctcattgttgagaacatgcaccttcatatacttccgacgatgaaccctgatgggtttgctcttagatggcgtggtaatgcaaacaatattgatctcaacagggattttcctgaccaaacagcctgaaactagagccattatgaattgggtaaagcaagaacacttcacggcttctgctagcttgcatgggggggctcttgttgccaactatccatgggatggaactagagacacaagcaaacactactacggatgtcctgacgataagacattccagcacatggcatctgtgtatagtcggtctcactataacatgtctttgagcaaagaatttgaaggagggataacaaatggagcattctggtacccaatatatggtggtatgcaggactggaactatatacatggaggctgctttgagttaactctggagattagtgacacaaagtggccaaaagcagatgagcttcctatcatctgggaacacaataggatgagtatgctcaatcttctagcaagcctaataaagtcaggggttcatggaaggatatttgcagcagatacgggcaggcctgtacccggctcagtgatgataaagggcattgattccaaggtaagcgcgagcagcacttttggagattaccatcgaattgttgcgcctggtgagacatatgaagttaacagaagagagtagtaaacctaag

SEQ ID NO: 79490 - DNA, 2936 bp, Zea Mays
aaacacacaccggcctcgcagtcgcagcctcgctccggaggcggagcgccggagccccgcccacctcccctaaacggccagggcctgaccacccccacctcagtccctctcctgtgggcggcgtcctcccgcgcccatggggatctcgcacctccagcccgtcctcctcctcctcatgctccgggctctcgcgtcgcttcccacgcaggccgccgcgagaggcggccacgatccgtcagatgatggagcccacgggccattttcacgtaaacttcttgaagataagcctcagatcacagaagaaatggtccgtggatatatgagcaacactgagcttgagactgctgtacatgcctttggaagtcgttgttccaatatctccagggtgtacaggtacacgatgtataatgttttacttctgtgataattacatttggagcttctaaacaaacttttaagaccatcagtttttaaggacatgtaaatgactgtgtcattggtgggtagtaccgtagtaatataaggtcaggagcgactgcgtctttgacagacaaaggcccagcatggacagcatcgtcatgagagcgagagaggagagggagctttgggagatggctggaggctggagctaagagcatgtctctccttatggctccgactccagggttgtagggcccccttagtagcgatgtggtcaccattatttgtttagtcgtatgaggtatgacccccccttttttgtattcttgtttttggccatcgtaagtggttttatcttgtaacggccggcttggaccttaaccactttcttcttaatataatgacgcgcagctctcctgtgcttccgaggaaaaaaaggatttaaaatcattatcaaccatgagagaaacaacattgcatgcagtcatgttgatgggtaacaccgtaacagcaaatggataaaatgaaacatgtatctttttgaaaagaaaaccaatcatgaagcgccaacttagggcttgttcggttagagtgagattgggtgggtttaaatcccaagcaagtcaaagttcttctaaattttttccaatcccatccaatccatgtataatgtgaataaccgaacaaggccttatagcataattatatccataaggtacatgtattaattctgttttacttcagattgttttttgaggagaaaaatgtaggttttacttcagattgttgaaatgttccatgttcattggtcatgattagcaattttaagcatttcctgagtaacagaatattttggtttcaatctctttattctgttggtttgttatacaacttctgtactgtccttggatatctcattttttaagtgcactgcttctttctttattttgtgccctcctgttttctcatatgtccacacttcacttacattttatttcttctctctttgagggataacacaaacctgctatcagcattggaaagagtgtgaatcattttccattgtgggtgattgaaatatcagacaagcccaggcaaagggaatctgaaccagcattcaagttcattggaaatgttcatggtgatgagcctgttggaagagaggttcttatgcatcttgcaaattggctgtgtgataactatctgaaagattcactggcaactctcattgttgagaacatgcaccttcatatacttccgacgatgaaccctgatgggtttgctcttagatggcgtggtaatgcaaacaatattgatctcaacagggattttcctgaccaattcttccccgttaacaacgatattgactacagacagcctgaaactagagccattatgaattgggtaaagcaagaacacttcacggcttctgctagcttgcatgggggggctcttgttgccaactatccatgggatggaactagagacacaagcaaacactactacggatgtcctgacgataagacattccagcacatggcatctgtgtatagtcggtctcactataacatgtctttgagcaaagaatttgaaggagggataacaaatggagcattctggtacccaatatatggtggtatgcaggactggaactatatacatggaggctgctttgagttaactctggagattagtgacacaaagtggccaaaagcagatgagcttcctatcatctgggaacacaataggatgagtatgctcaatcttctagcaagcctaataaaggggttcatggaaggatatttgcagcagatacgggcaggcctgtacccggctcagtgatgataaagggcattgattccaaggtaagcgcgagcagcacttttggagattaccatcgaattgttgcgcctggtgagacatatgaagtggtggcatcgatgcgaggcttccggcaaaaatctacacgcatcaggctggagcaggaagccgtcagcctggatttcatcctggacccggatggagccgatgggcagacgaagctgctgccccgtagtaacgaccggggctgccgctgcgacaacgacaacgccgccaagccgttccatgtccacgaagctcacctctggttgtacctccttatcgtgtccgttctcctggccctctacgtagtcttcaagaggaaaacggtgccgaggctgctggcgtatagacactcatcgtcactcagacggcctgttgctgtataagaggaactaattttgtggtctaggcggatagttttgtactacctctgttctcgaatagttgttgtccgctagttaatttttatagctagttcatttttatactaaaatgtgacaaatagaaaagaacggagggaaggagcaactgaagttagtcttctctttgccaaaacggtcggttgctgtataagttgaaggatgggtaatgtaccatggaaatgacattttttttgaatcaatgaaatacatgttgcgttgatgacaaggaaa

SEQ ID NO: 79491 - DNA, 2292 bp, Zea Mays
aaacacacaccggcctcgcagtcgcagcctcgctccggaggcggagcgccggagccccgcccacctcccctaaacggccagggcctgaccacccccacctcagtccctctcctgtgggcggcgtcctcccgcgcccatggggatctcgcacctccagcccgtcctcctcctcctcatgctccgggctctcgcgtcgcttcccacgcaggccgccgcgagaggcggccacgatccgtcagatgatggagcccacgggccattttcacgtaaacttcttgaagataagcctcagatcacagaagaaatggtccgtggatatatgagcaacactgagcttgagactgctgtacatgcctttggaagtcgttgttccaatatctccagggtgtacagcattggaaagagtgtgaatcattttccattgtgggtgattgaaatatcagacaagcccaggcaaagggaatctgaaccagcattcaagttcattggaaatgttcatggtgatgagcctgttggaagagaggttcttatgcatcttgcaaattggctgtgtgataactatctgaaagattcactggcaactctcattgttgagaacatgcaccttcatatacttccgacgatgaaccctgatgggtttgctcttagatggcgtggtaatgcaaacaatattgatctcaacagggattttcctgaccaaacagcctgaaactagagccattatgaattgggtaaagcaagaacacttcacggcttctgctagcttgcatgggggggctcttgttgccaactatccatgggatggaactagagacacaaggtgatttcttcttctacttaatcacttgcattcattttttcaagtttctcaattaatagtgttgctctctaaaacttctcatgaagtattgcccaaaaactatcttcccatggttctaatggttatttgaagtttggattgcaagtaggtgccttaatatgtattaataagatatttccacgttccactcttagttgcatttttattctttatatgaaaatggtctgttttactatcactgccctcttgacacgtaaacaaatttttgactcattttgctctcccaaactatttaatctgggccagttcaccccctaatgaaaatattctatttccttctccatgttcaaatactgatatacttttgtatcataaggtctgttggcatctatcattttgcaaatttgcaccagcaacagaacatgtacacggcgaagacaaatcattagcaaacactactacggatgtcctgacgataagacattccagcacatggcatctgtgtatagtcggtctcactataacatgtctttgagcaaagaatttgaaggagggataacaaatggagcattctggtacccaatatatggtggtatgcaggactggaactatatacatggaggctgctttgagttaactctggagattagtgacacaaagtggccaaaagcagatgagcttcctatcatctgggaacacaataggatgagtatgctcaatcttctagcaagcctaataaaggggttcatggaaggatatttgcagcagatacgggcaggcctgtacccggctcagtgatgataaagggcattgattccaaggtaagcgcgagcagcacttttggagattaccatcgaattgttgcgcctggtgagacatatgaagtggtggcatcgatgcgaggcttccggcaaaaatctacacgcatcaggctggagcaggaagccgtcagcctggatttcatcctggacccggatggagccgatgggcagacgaagctgctgccccgtagtaacgaccggggctgccgctgcgacaacgacaacgccgccaagccgttccatgtccacgaagctcacctctggttgtacctccttatcgtgtccgttctcctggccctctacgtagtcttcaagaggaaaacggtgccgaggctgctggcgtatagacactcatcgtcactcagacggcctgttgctgtataagaggaactaattttgtggtctaggcggatagttttgtactacctctgttctcgaatagttgttgtccgctagttaatttttatagctagttcatttttatactaaaatgtgacaaatagaaaagaacggagggaaggagcaactgaagttagtcttctctttgccaaaacggtcggttgctgtataagttgaaggatgggtaatgtaccatggaaatgacattttttttgaatcaatgaaatacatgttgcgttgatgacaaggaaa

SEQ ID NO: 79492 - DNA, 2904 bp, Zea Mays
aaacacacaccggcctcgcagtcgcagcctcgctccggaggcggagcgccggagccccgcccacctcccctaaacggccagggcctgaccacccccacctcagtccctctcctgtgggcggcgtcctcccgcgcccatggggatctcgcacctccagcccgtcctcctcctcctcatgctccgggctctcgcgtcgcttcccacgcaggccgccgcgagaggcggccacgatccgtcagatgatggagcccacgggccattttcacgtaaacttcttgaagataagcctcagatcacagaagaaatggtccgtggatatatgagcaacactgagcttgagactgctgtacatgcctttggaagtcgttgttccaatatctccagggtgtacaggtacacgatgtataatgttttacttctgtgataattacatttggagcttctaaacaaacttttaagaccatcagtttttaaggacatgtaaatgactgtgtcattggtgggtagtaccgtagtaatataaggtcaggagcgactgcgtctttgacagacaaaggcccagcatggacagcatcgtcatgagagcgagagaggagagggagctttgggagatggctggaggctggagctaagagcatgtctctccttatggctccgactccagggttgtagggcccccttagtagcgatgtggtcaccattatttgtttagtcgtatgaggtatgacccccccttttttgtattcttgtttttggccatcgtaagtggttttatcttgtaacggccggcttggaccttaaccactttcttcttaatataatgacgcgcagctctcctgtgcttccgaggaaaaaaaggatttaaaatcattatcaaccatgagagaaacaacattgcatgcagtcatgttgatgggtaacaccgtaacagcaaatggataaaatgaaacatgtatctttttgaaaagaaaaccaatcatgaagcgccaacttagggcttgttcggttagagtgagattgggtgggtttaaatcccaagcaagtcaaagttcttctaaattttttccaatcccatccaatccatgtataatgtgaataaccgaacaaggccttatagcataattatatccataaggtacatgtattaattctgttttacttcagattgttttttgaggagaaaaatgtaggttttacttcagattgttgaaatgttccatgttcattggtcatgattagcaattttaagcatttcctgagtaacagaatattttggtttcaatctctttattctgttggtttgttatacaacttctgtactgtccttggatatctcattttttaagtgcactgcttctttctttattttgtgccctcctgttttctcatatgtccacacttcacttacattttatttcttctctctttgagggataacacaaacctgctatcagcattggaaagagtgtgaatcattttccattgtgggtgattgaaatatcagacaagcccaggcaaagggaatctgaaccagcattcaagttcattggaaatgttcatggtgatgagcctgttggaagagaggttcttatgcatcttgcaaattggctgtgtgataactatctgaaagattcactggcaactctcattgttgagaacatgcaccttcatatacttccgacgatgaaccctgatgggtttgctcttagatggcgtggtaatgcaaacaatattgatctcaacagggattttcctgaccaaacagcctgaaactagagccattatgaattgggtaaagcaagaacacttcacggcttctgctagcttgcatgggggggctcttgttgccaactatccatgggatggaactagagacacaagcaaacactactacggatgtcctgacgataagacattccagcacatggcatctgtgtatagtcggtctcactataacatgtctttgagcaaagaatttgaaggagggataacaaatggagcattctggtacccaatatatggtggtatgcaggactggaactatatacatggaggctgctttgagttaactctggagattagtgacacaaagtggccaaaagcagatgagcttcctatcatctgggaacacaataggatgagtatgctcaatcttctagcaagcctaataaaggggttcatggaaggatatttgcagcagatacgggcaggcctgtacccggctcagtgatgataaagggcattgattccaaggtaagcgcgagcagcacttttggagattaccatcgaattgttgcgcctggtgagacatatgaagtggtggcatcgatgcgaggcttccggcaaaaatctacacgcatcaggctggagcaggaagccgtcagcctggatttcatcctggacccggatggagccgatgggcagacgaagctgctgccccgtagtaacgaccggggctgccgctgcgacaacgacaacgccgccaagccgttccatgtccacgaagctcacctctggttgtacctccttatcgtgtccgttctcctggccctctacgtagtcttcaagaggaaaacggtgccgaggctgctggcgtatagacactcatcgtcactcagacggcctgttgctgtataagaggaactaattttgtggtctaggcggatagttttgtactacctctgttctcgaatagttgttgtccgctagttaatttttatagctagttcatttttatactaaaatgtgacaaatagaaaagaacggagggaaggagcaactgaagttagtcttctctttgccaaaacggtcggttgctgtataagttgaaggatgggtaatgtaccatggaaatgacattttttttgaatcaatgaaatacatgttgcgttgatgacaaggaaa

SEQ ID NO: 79493 - DNA, 2319 bp, Zea Mays
aaacacacaccggcctcgcagtcgcagcctcgctccggaggcggagcgccggagccccgcccacctcccctaaacggccagggcctgaccacccccacctcagtccctctcctgtgggcggcgtcctcccgcgcccatggggatctcgcacctccagcccgtcctcctcctcctcatgctccgggctctcgcgtcgcttcccacgcaggccgccgcgagaggcggccacgatccgtcagatgatggagcccacgggccattttcacgtaaacttcttgaagataagcctcagatcacagaagaaatggtccgtggatatatgagcaacactgagcttgagactgctgtacatgcctttggaagtcgttgttccaatatctccagggtgtacagcattggaaagagtgtgaatcattttccattgtgggtgattgaaatatcagacaagcccaggcaaagggaatctgaaccagcattcaagttcattggaaatgttcatggtgatgagcctgttggaagagaggttcttatgcatcttgcaaattggctgtgtgataactatctgaaagattcactggcaactctcattgttgagaacatgcaccttcatatacttccgacgatgaaccctgatgggtttgctcttagatggcgtggtaatgcaaacaatattgatctcaacagggattttcctgaccaaacagcctgaaactagagccattatgaattgggtaaagcaagaacacttcacggcttctgctagcttgcatgggggggctcttgttgccaactatccatgggatggaactagagacacaaggtgatttcttcttctacttaatcacttgcattcattttttcaagtttctcaattaatagtgttgctctctaaaacttctcatgaagtattgcccaaaaactatcttcccatggttctaatggttatttgaagtttggattgcaagtaggtgccttaatatgtattaataagatatttccacgttccactcttagttgcatttttattctttatatgaaaatggtctgttttactatcactgccctcttgacacgtaaacaaatttttgactcattttgctctcccaaactatttaatctgggccagttcaccccctaatgaaaatattctatttccttctccatgttcaaatactgatatacttttgtatcataaggtctgttggcatctatcattttgcaaatttgcaccagcaacagaacatgtacacggcgaagacaaatcattaggtggtgacttttttctcaccacgcaaacactactacggatgtcctgacgataagacattccagcacatggcatctgtgtatagtcggtctcactataacatgtctttgagcaaagaatttgaaggagggataacaaatggagcattctggtacccaatatatggtggtatgcaggactggaactatatacatggaggctgctttgagttaactctggagattagtgacacaaagtggccaaaagcagatgagcttcctatcatctgggaacacaataggatgagtatgctcaatcttctagcaagcctaataaagtcaggggttcatggaaggatatttgcagcagatacgggcaggcctgtacccggctcagtgatgataaagggcattgattccaaggtaagcgcgagcagcacttttggagattaccatcgaattgttgcgcctggtgagacatatgaagtggtggcatcgatgcgaggcttccggcaaaaatctacacgcatcaggctggagcaggaagccgtcagcctggatttcatcctggacccggatggagccgatgggcagacgaagctgctgccccgtagtaacgaccggggctgccgctgcgacaacgacaacgccgccaagccgttccatgtccacgaagctcacctctggttgtacctccttatcgtgtccgttctcctggccctctacgtagtcttcaagaggaaaacggtgccgaggctgctggcgtatagacactcatcgtcactcagacggcctgttgctgtataagaggaactaattttgtggtctaggcggatagttttgtactacctctgttctcgaatagttgttgtccgctagttaatttttatagctagttcatttttatactaaaatgtgacaaatagaaaagaacggagggaaggagcaactgaagttagtcttctctttgccaaaacggtcggttgctgtataagttgaaggatgggtaatgtaccatggaaatgacattttttttgaatcaatgaaatacatgttgcgttgatgacaaggaaa

SEQ ID NO: 79494 - DNA, 1998 bp, Zea Mays
aaacacacaccggcctcgcagtcgcagcctcgctccggaggcggagcgccggagccccgcccacctcccctaaacggccagggcctgaccacccccacctcagtccctctcctgtgggcggcgtcctcccgcgcccatggggatctcgcacctccagcccgtcctcctcctcctcatgctccgggctctcgcgtcgcttcccacgcaggccgccgcgagaggcggccacgatccgtcagatgatggagcccacgggccattttcacgtaaacttcttgaagataagcctcagatcacagaagaaatggtccgtggatatatgagcaacactgagcttgagactgctgtacatgcctttggaagtcgttgttccaatatctccagggtgtacagggataacacaaacctgctatcagcattggaaagagtgtgaatcattttccattgtgggtgattgaaatatcagacaagcccaggcaaagggaatctgaaccagcattcaagttcattggaaatgttcatggtgatgagcctgttggaagagaggttcttatgcatcttgcaaattggctgtgtgataactatctgaaagattcactggcaactctcattgttgagaacatgcaccttcatatacttccgacgatgaaccctgatgggtttgctcttagatggcgtggtaatgcaaacaatattgatctcaacagggattttcctgaccaattcttccccgttaacaacgatattgactacagacagcctgaaactagagccattatgaattgggtaaagcaagaacacttcacggcttctgctagcttgcatgggggggctcttgttgccaactatccatgggatggaactagagacacaaggtctgttggcatctatcattttgcaaatttgcaccagcaacagaacatgtacacggcgaagacaaatcattaggtggtgacttttttctcaccacgcaaacactactacggatgtcctgacgataagacattccagcacatggcatctgtgtatagtcggtctcactataacatgtctttgagcaaagaatttgaaggagggataacaaatggagcattctggtacccaatatatggtggtatgcaggactggaactatatacatggaggctgctttgagttaactctggagattagtgacacaaagtggccaaaagcagatgagcttcctatcatctgggaacacaataggatgagtatgctcaatcttctagcaagcctaataaagtcaggggttcatggaaggatatttgcagcagatacgggcaggcctgtacccggctcagtgatgataaagggcattgattccaaggtaagcgcgagcagcacttttggagattaccatcgaattgttgcgcctggtgagacatatgaagtggtggcatcgatgcgaggcttccggcaaaaatctacacgcatcaggctggagcaggaagccgtcagcctggatttcatcctggacccggatggagccgatgggcagacgaagctgctgccccgtagtaacgaccggggctgccgctgcgacaacgacaacgccgccaagccgttccatgtccacgaagctcacctctggttgtacctccttatcgtgtccgttctcctggccctctacgtagtcttcaagaggaaaacggtgccgaggctgctggcgtatagacactcatcgtcactcagacggcctgttgctgtataagaggaactaattttgtggtctaggcggatagttttgtactacctctgttctcgaatagttgttgtccgctagttaatttttatagctagttcatttttatactaaaatgtgacaaatagaaaagaacggagggaaggagcaactgaagttagtcttctctttgccaaaacggtcggttgctgtataagttgaaggatgggtaatgtaccatggaaatgacattttttttgaatcaatgaaatacatgttgcgttgatgacaaggaaa

SEQ ID NO: 79495 - DNA, 1552 bp, Zea Mays
agatcacaaatggtccgtggatatatgagcaacactgagcttgagactgctgtacatgcctttggaagtcgttgttccaatatctccagggtgtacagcattggaaagagtgtgaatcattttccattgtgggtgattgaaatatcagacaagcccaggcaaagggaatctgaaccagcattcaagttcattggaaatgttcatggtgatgagcctgttggaagagaggttcttatgcatcttgcaaattggctgtgtgataactatctgaaagattcactggcaactctcattgttgagaacatgcaccttcatatacttccgacgatgaaccctgatgggtttgctcttagatggcgtggtaatgcaaacaatattgatctcaacagggattttcctgaccaaacagcctgaaactagagccattatgaattgggtaaagcaagaacacttcacggcttctgctagcttgcatgggggggctcttgttgccaactatccatgggatggaactagagacacaagcaaacactactacggatgtcctgacgataagacattccagcacatggcatctgtgtatagtcggtctcactataacatgtctttgagcaaagaatttgaaggagggataacaaatggagcattctggtacccaatatatggtggtatgcaggactggaactatatacatggaggctgctttgagttaactctggagattagtgacacaaagtggccaaaagcagatgagcttcctatcatctgggaacacaataggatgagtatgctcaatcttctagcaagcctaataaagtcaggggttcatggaaggatatttgcagcagatacgggcaggcctgtacccggctcagtgatgataaagggcattgattccaaggtaagcgcgagcagcacttttggagattaccatcgaattgttgcgcctggtgagacatatgaagtggtggcatcgatgcgaggcttccggcaaaaatctacacgcatcaggctggagcaggaagccgtcagcctggatttcatcctggacccggatggagccgatgggcagacgaagctgctgccccgtagtaacgaccggggctgccgctgcgacaacgacaacgccgccaagccgttccatgtccacgaagctcacctctggttgtacctccttatcgtgtccgttctcctggccctctacgtagtcttcaagaggaaaacggtgccgaggctgctggcgtatagacactcatcgtcactcagacggcctgttgctgtataagaggaactaattttgtggtctaggcggatagttttgtactacctctgttctcgaatagttgttgtccgctagttaatttttatagctagttcatttttatactaaaatgtgacaaatagaaaagaacggagggaaggagcaactgaagttagtcttctctttgccaaaacggtcggttgctgtataagttgaaggatgggtaatgtaccatggaaatgacattttttttgaatcaatgaaatacatgttgcgttgatgacaaggaaa

SEQ ID NO: 79496 - DNA, 1601 bp, Zea Mays
caaatggtccgtggatatatgagcaacactgagcttgagactgctgtacatgcctttggaagtcgttgttccaatatctccagggtgtacagggataacacaaacctgctatcagcattggaaagagtgtgaatcattttccattgtgggtgattgaaatatcagacaagcccaggcaaagggaatctgaaccagcattcaagttcattggaaatgttcatggtgatgagcctgttggaagagaggttcttatgcatcttgcaaattggctgtgtgataactatctgaaagattcactggcaactctcattgttgagaacatgcaccttcatatacttccgacgatgaaccctgatgggtttgctcttagatggcgtggtaatgcaaacaatattgatctcaacagggattttcctgaccaattcttccccgttaacaacgatattgactacagacagcctgaaactagagccattatgaattgggtaaagcaagaacacttcacggcttctgctagcttgcatgggggggctcttgttgccaactatccatgggatggaactagagacacaagcaaacactactacggatgtcctgacgataagacattccagcacatggcatctgtgtatagtcggtctcactataacatgtctttgagcaaagaatttgaaggagggataacaaatggagcattctggtacccaatatatggtggtatgcaggactggaactatatacatggaggctgctttgagttaactctggagattagtgacacaaagtggccaaaagcagatgagcttcctatcatctgggaacacaataggatgagtatgctcaatcttctagcaagcctaataaagtcaggggttcatggaaggatatttgcagcagatacgggcaggcctgtacccggctcagtgatgataaagggcattgattccaaggtaagcgcgagcagcacttttggagattaccatcgaattgttgcgcctggtgagacatatgaagtggtggcatcgatgcgaggcttccggcaaaaatctacacgcatcaggctggagcaggaagccgtcagcctggatttcatcctggacccggatggagccgatgggcagacgaagctgctgccccgtagtaacgaccggggctgccgctgcgacaacgacaacgccgccaagccgttccatgtccacgaagctcacctctggttgtacctccttatcgtgtccgttctcctggccctctacgtagtcttcaagaggaaaacggtgccgaggctgctggcgtatagacactcatcgtcactcagacggcctgttgctgtataagaggaactaattttgtggtctaggcggatagttttgtactacctctgttctcgaatagttgttgtccgctagttaatttttatagctagttcatttttatactaaaatgtgacaaatagaaaagaacggagggaaggagcaactgaagttagtcttctctttgccaaaacggtcggttgctgtataagttgaaggatgggtaatgtaccatggaaatgacattttttttgaatcaatgaaatacatgttgcgttgatgacaaggaaa

SEQ ID NO: 79497 - DNA, 2669 bp, Zea Mays
ctctccctctcgctcgctcgctcctcactccccctataaaagccgccgcggcctcctcctcctccctccgcaagaatccagcgagccaacaaggcaacaacaaacacctccctccttcttcacttccctgccgttgttgcaggaagcaagcgagggcacacaaaccgacaaggccgcccacgcgcgcgtcggccgccgccgttgccgaccagcaggcaggcagcatggtcgtgaacaacaaggtggacagcctgtcgtacgacgtcgaggcgccgccgccctctgccgccggcgccgccgcggggcaagcgccaccgccggcgtcgccagctccggcgccggcaccggcaacccacgcgcccgtgacgcgggaaggcggcgcggcgtcggtgctggagctgcacaaggtgtcgctgccggagcggcggacgacggcgaaggcgctgcggcagcgcctggccgaggtgttcttcccggacgacccgctgcaccagttcaagaaccagtcgtcggcgcggcgcctcgtgctggcgctgcactacttcttccccatcttccagtgggggtccgcctacagcccgcgcctcctgcgctccgacctcgtcgccggcctcaccattgccagcctcgccatcccgcagggaatcagctacgccaagctcgccaacctgccgccaatcgttggcctatcttcgtgccgccgctcatctacgcgctgctggggagctcgcgggacctggcggtggggccggtgtccatcgcgtcgctggtgatggggtccatgctccgggacgccgtgtcgccggacgagcagccgctcctctacctgcagctggccttcaccgccaccttcttcgccggcgtcttccaggcgtccctgggattcctcaggctgggcttcatcgtggacttcctgtccaaggcgacgctgacgggcttcatgggcggcgccgccgtcatcgtgtcgctgcagcagctcaagggcctgctcggcatctcccacttcacctcccacatgggattcctcgacgtcatgcgctccgtcgtcaaccgccacgacgagtggaagtggcagacgatcgtcatgggctccgccttcctcgccatcctcctcctcacgcgccaaatcagcgccaggaatccaaagcttttctgggtatcagcaggtgctcccctggcgtcggtgatcatctccaccatcctctccttcatctggaaatcccccagcatcagtgttatcggcatcctccccaggggagtgaaccctccttcggcgaacatgctcagcttcagcggctcctacgtggcgctgacgatcaaaaccgggatcatgacaggcatcctgtccttaacagaagggatcgcagtgggcaggacctttgcgtccatcaacaactaccaggtggacgggaacaaggagatgatggcgatcgggctgatgaacatggcgggctcctgcgcctcctgctacgtgacgacggggtccttctcccggtcggcggtgaactacagcgcgggctgcaggacggcgttgtccaacgtcgtgatggcggcggcggtgctggtgacgctgctgttcctcatgccgctgttccactacaccccgaacgtgatcctggcggcgatcatcatcacggcggtggtggggctggtggacgtgcgcggcgccgccaggctgtggaaggtggacaagctggacttcctggcgtgcgtggcggcgttcctcggcgtgctgctggtgtccgtgcagacgggcctgggcgtcgccgtcggcatctcgctcttcaaggtcctgctgcaggtcacccgccccaacgtcgtggtggagggcctcgtcccggggacgcagagctaccgcagcgtggcgcagtaccgcgaggccgtccgcgtgccgggcttcctcgtcgtcggcgtcgagtccgccgtctacttcgccaactccatgtacctggtggagcgggtcatgcgctacctccgcgacgaggaggagcgcgcgctcaagtccaaccacccctccatccgatgcgtcgtcctcgacatgggcgccgtcgcggcgatcgacaccagcggtctagacgcgctgtccgagctcaagaaagtcctggacaaaagaaacatcgagctggtgcttgccaacccggtggggtcggtggcggagaggatgttcaactcggcggtgggcgagagcttcgggtcgggccgcctcttcttcagcgtagcggaggccgtcgcggcgggggcgtgcaaagcggcgcagccctgacgacgacgacaggctgatccctgaggtgccgcacgggagcatgcataggaataggatgggtcagagacagactaccggtgctgctagtggtagtagggcaggacgacgtacgaataacatggtgatggcctctcttcctccactccgatgcgatgcgagtgtgcgacgcaggggaggggagaagagtttttgaaggatgtgaccagttgctgttgtagttgttgtcaagtacgtagtaatgaaacgagaattgctgcgtggcaattcaggcctgttttttctttttgcatcaaggaaaaataagtgctggtacagatgagattattttaactagaaccaagttacttgccagtaaaataagaagcttccatataaacttgaaacaaaagaaaaaggagacacgatt

SEQ ID NO: 79498 - DNA, 2672 bp, Zea Mays
ctctccctctcgctcgctcgctcctcactccccctataaaagccgccgcggcctcctcctcctccctccgcaagaatccagcgagccaacaaggcaacaacaaacacctccctccttcttcacttccctgccgttgttgcaggaagcaagcgagggcacacaaaccgacaaggccgcccacgcgcgcgtcggccgccgccgttgccgaccagcaggcaggcagcatggtcgtgaacaacaaggtggacagcctgtcgtacgacgtcgaggcgccgccgccctctgccgccggcgccgccgcggggcaagcgccaccgccggcgtcgccagctccggcgccggcaccggcaacccacgcgcccgtgacgcgggaaggcggcgcggcgtcggtgctggagctgcacaaggtgtcgctgccggagcggcggacgacggcgaaggcgctgcggcagcgcctggccgaggtgttcttcccggacgacccgctgcaccagttcaagaaccagtcgtcggcgcggcgcctcgtgctggcgctgcactacttcttccccatcttccagtgggggtccgcctacagcccgcgcctcctgcgctccgacctcgtcgccggcctcaccattgccagcctcgccatcccgcagggaatcagctacgccaagctcgccaacctgccgccaatcgttggcctatattccagcttcgtgccgccgctcatctacgcgctgctggggagctcgcgggacctggcggtggggccggtgtccatcgcgtcgctggtgatggggtccatgctccgggacgccgtgtcgccggacgagcagccgctcctctacctgcagctggccttcaccgccaccttcttcgccggcgtcttccaggcgtccctgggattcctcaggctgggcttcatcgtggacttcctgtccaaggcgacgctgacgggcttcatgggcggcgccgccgtcatcgtgtcgctgcagcagctcaagggcctgctcggcatctcccacttcacctcccacatgggattcctcgacgtcatgcgctccgtcgtcaaccgccacgacgagtggaagtggcagacgatcgtcatgggctccgccttcctcgccatcctcctcctcacgcgccaaatcagcgccaggaatccaaagcttttctgggtatcagcaggtgctcccctggcgtcggtgatcatctccaccatcctctccttcatctggaaatcccccagcatcagtgttatcggcatcctccccaggggagtgaaccctccttcggcgaacatgctcagcttcagcggctcctacgtggcgctgacgatcaaaaccgggatcatgacaggcatcctgtccttaacaggatcgcagtgggcaggacctttgcgtccatcaacaactaccaggtggacgggaacaaggagatgatggcgatcgggctgatgaacatggcgggctcctgcgcctcctgctacgtgacgacggggtccttctcccggtcggcggtgaactacagcgcgggctgcaggacggcgttgtccaacgtcgtgatggcggcggcggtgctggtgacgctgctgttcctcatgccgctgttccactacaccccgaacgtgatcctggcggcgatcatcatcacggcggtggtggggctggtggacgtgcgcggcgccgccaggctgtggaaggtggacaagctggacttcctggcgtgcgtggcggcgttcctcggcgtgctgctggtgtccgtgcagacgggcctgggcgtcgccgtcggcatctcgctcttcaaggtcctgctgcaggtcacccgccccaacgtcgtggtggagggcctcgtcccggggacgcagagctaccgcagcgtggcgcagtaccgcgaggccgtccgcgtgccgggcttcctcgtcgtcggcgtcgagtccgccgtctacttcgccaactccatgtacctggtggagcgggtcatgcgctacctccgcgacgaggaggagcgcgcgctcaagtccaaccacccctccatccgatgcgtcgtcctcgacatgggcgccgtcgcggcgatcgacaccagcggtctagacgcgctgtccgagctcaagaaagtcctggacaaaagaaacatcgagctggtgcttgccaacccggtggggtcggtggcggagaggatgttcaactcggcggtgggcgagagcttcgggtcgggccgcctcttcttcagcgtagcggaggccgtcgcggcgggggcgtgcaaagcggcgcagccctgacgacgacgacaggctgatccctgaggtgccgcacgggagcatgcataggaataggatgggtcagagacagactaccggtgctgctagtggtagtagggcaggacgacgtacgaataacatggtgatggcctctcttcctccactccgatgcgatgcgagtgtgcgacgcaggggaggggagaagagtttttgaaggatgtgaccagttgctgttgtagttgttgtcaagtacgtagtaatgaaacgagaattgctgcgtggcaattcaggcctgttttttctttttgcatcaaggaaaaataagtgctggtacagatgagattattttaactagaaccaagttacttgccagtaaaataagaagcttccatataaacttgaaacaaaagaaaaaggagacacgatt

SEQ ID NO: 79499 - DNA, 2627 bp, Zea Mays
ctctccctctcgctcgctcgctcctcactccccctataaaagccgccgcggcctcctcctcctccctccgcaagaatccagcgagccaacaaggcaacaacaaacacctccctccttcttcacttccctgccgttgttgcaggaagcaagcgagggcacacaaaccgacaaggccgcccacgcgcgcgtcggccgccgccgttgccgaccagcaggcaggcagcatggtcgtgaacaacaaggtggacagcctgtcgtacgacgtcgaggcgccgccgccctctgccgccggcgccgccgcggggcaagcgccaccgccggcgtcgccagctccggcgccggcaccggcaacccacgcgcccgtgacgcgggaaggcggcgcggcgtcggtgctggagctgcacaaggtgtcgctgccggagcggcggacgacggcgaaggcgctgcggcagcgcctggccgaggtgttcttcccggacgacccgctgcaccagttcaagaaccagtcgtcggcgcggcgcctcgtgctggcgctgcactacttcttccccatcttccagtgggggtccgcctacagcccgcgcctcctgcgctccgacctcgtcgccggcctcaccattgccagcctcgccatcccgcagattccagcttcgtgccgccgctcatctacgcgctgctggggagctcgcgggacctggcggtggggccggtgtccatcgcgtcgctggtgatggggtccatgctccgggacgccgtgtcgccggacgagcagccgctcctctacctgcagctggccttcaccgccaccttcttcgccggcgtcttccaggcgtccctgggattcctcaggctgggcttcatcgtggacttcctgtccaaggcgacgctgacgggcttcatgggcggcgccgccgtcatcgtgtcgctgcagcagctcaagggcctgctcggcatctcccacttcacctcccacatgggattcctcgacgtcatgcgctccgtcgtcaaccgccacgacgagtggaagtggcagacgatcgtcatgggctccgccttcctcgccatcctcctcctcacgcgccaaatcagcgccaggaatccaaagcttttctgggtatcagcaggtgctcccctggcgtcggtgatcatctccaccatcctctccttcatctggaaatcccccagcatcagtgttatcggcatcctccccaggggagtgaaccctccttcggcgaacatgctcagcttcagcggctcctacgtggcgctgacgatcaaaaccgggatcatgacaggcatcctgtccttaacagaagggatcgcagtgggcaggacctttgcgtccatcaacaactaccaggtggacgggaacaaggagatgatggcgatcgggctgatgaacatggcgggctcctgcgcctcctgctacgtgacgacggggtccttctcccggtcggcggtgaactacagcgcgggctgcaggacggcgttgtccaacgtcgtgatggcggcggcggtgctggtgacgctgctgttcctcatgccgctgttccactacaccccgaacgtgatcctggcggcgatcatcatcacggcggtggtggggctggtggacgtgcgcggcgccgccaggctgtggaaggtggacaagctggacttcctggcgtgcgtggcggcgttcctcggcgtgctgctggtgtccgtgcagacgggcctgggcgtcgccgtcggcatctcgctcttcaaggtcctgctgcaggtcacccgccccaacgtcgtggtggagggcctcgtcccggggacgcagagctaccgcagcgtggcgcagtaccgcgaggccgtccgcgtgccgggcttcctcgtcgtcggcgtcgagtccgccgtctacttcgccaactccatgtacctggtggagcgggtcatgcgctacctccgcgacgaggaggagcgcgcgctcaagtccaaccacccctccatccgatgcgtcgtcctcgacatgggcgccgtcgcggcgatcgacaccagcggtctagacgcgctgtccgagctcaagaaagtcctggacaaaagaaacatcgagctggtgcttgccaacccggtggggtcggtggcggagaggatgttcaactcggcggtgggcgagagcttcgggtcgggccgcctcttcttcagcgtagcggaggccgtcgcggcgggggcgtgcaaagcggcgcagccctgacgacgacgacaggctgatccctgaggtgccgcacgggagcatgcataggaataggatgggtcagagacagactaccggtgctgctagtggtagtagggcaggacgacgtacgaataacatggtgatggcctctcttcctccactccgatgcgatgcgagtgtgcgacgcaggggaggggagaagagtttttgaaggatgtgaccagttgctgttgtagttgttgtcaagtacgtagtaatgaaacgagaattgctgcgtggcaattcaggcctgttttttctttttgcatcaaggaaaaataagtgctggtacagatgagattattttaactagaaccaagttacttgccagtaaaataagaagcttccatataaacttgaaacaaaagaaaaaggagacacgatt

SEQ ID NO: 79500 - DNA, 1596 bp, Zea Mays
cttgaatcgactaaacagttggtgtgcccaggaaagctgtcctcgcccaacagcagagcgccaggaatccaaagcttttctgggtatcagcaggtgctcccctggcgtcggtgatcatctccaccatcctctccttcatctggaaatcccccagcatcagtgttatcggcatcctccccaggggagtgaaccctccttcggcgaacatgctcagcttcagcggctcctacgtggcgctgacgatcaaaaccgggatcatgacaggcatcctgtccttaacagaagggatcgcagtgggcaggacctttgcgtccatcaacaactaccaggtggacgggaacaaggagatgatggcgatcgggctgatgaacatggcgggctcctgcgcctcctgctacgtgacgacggggtccttctcccggtcggcggtgaactacagcgcgggctgcaggacggcgttgtccaacgtcgtgatggcggcggcggtgctggtgacgctgctgttcctcatgccgctgttccactacaccccgaacgtgatcctggcggcgatcatcatcacggcggtggtggggctggtggacgtgcgcggcgccgccaggctgtggaaggtggacaagctggacttcctggcgtgcgtggcggcgttcctcggcgtgctgctggtgtccgtgcagacgggcctgggcgtcgccgtcggcatctcgctcttcaaggtcctgctgcaggtcacccgccccaacgtcgtggtggagggcctcgtcccggggacgcagagctaccgcagcgtggcgcagtaccgcgaggccgtccgcgtgccgggcttcctcgtcgtcggcgtcgagtccgccgtctacttcgccaactccatgtacctggtggagcgggtcatgcgctacctccgcgacgaggaggagcgcgcgctcaagtccaaccacccctccatccgatgcgtcgtcctcgacatgggcgccgtcgcggcgatcgacaccagcggtctagacgcgctgtccgagctcaagaaagtcctggacaaaagaaacatcgagctggtgcttgccaacccggtggggtcggtggcggagaggatgttcaactcggcggtgggcgagagcttcgggtcgggccgcctcttcttcagcgtagcggaggccgtcgcggcgggggcgtgcaaagcggcgcagccctgacgacgacgacaggctgatccctgaggtgccgcacgggagcatgcataggaataggatgggtcagagacagactaccggtgctgctagtggtagtagggcaggacgacgtacgaataacatggtgatggcctctcttcctccactccgatgcgatgcgagtgtgcgacgcaggggaggggagaagagtttttgaaggatgtgaccagttgctgttgtagttgttgtcaagtacgtagtaatgaaacgagaattgctgcgtggcaattcaggcctgttttttctttttgcatcaaggaaaaataagtgctggtacagatgagattattttaactagaaccaagttacttgccagtaaaataagaagcttccatataaacttgaaacaaaagaaaaaggagacacgatt

SEQ ID NO: 79501 - DNA, 1536 bp, Zea Mays
tggccggggccacgccggagaaatcttcagagatcaggagcgccaaaatctacatctcctttgttttttacacgattcttctgcaaagaaattccgggatctctagtttgacaagcgccaggaatccaaagcttttctgggtatcagcaggtgctcccctggcgtcggtgatcatctccaccatcctctccttcatctggaaatcccccagcatcagtgttatcggcatcctccccaggggagtgaaccctccttcggcgaacatgctcagcttcagcggctcctacgtggcgctgacgatcaaaaccgggatcatgacaggcatcctgtccttaacagaagggatcgcagtgggcaggacctttgcgtccatcaacaactaccaggtggacgggaacaaggagatgatggcgatcgggctgatgaacatggcgggctcctgcgcctcctgctacgtgacgacggggtccttctcccggtcggcggtgaactacagcgcgggctgcaggacggcgttgtccaacgtcgtgatggcggcggcggtgctggtgacgctgctgttcctcatgccgctgttccactacaccccgaacgtgatcctggcggcgatcatcatcacggcggtggtggggctggtggacgtgcgcggcgccgccaggctgtggaaggtcacccgccccaacgtcgtggtggagggcctcgtcccggggacgcagagctaccgcagcgtggcgcagtaccgcgaggccgtccgcgtgccgggcttcctcgtcgtcggcgtcgagtccgccgtctacttcgccaactccatgtacctggtggagcgggtcatgcgctacctccgcgacgaggaggagcgcgcgctcaagtccaaccacccctccatccgatgcgtcgtcctcgacatgggcgccgtcgcggcgatcgacaccagcggtctagacgcgctgtccgagctcaagaaagtcctggacaaaagaaacatcgagctggtgcttgccaacccggtggggtcggtggcggagaggatgttcaactcggcggtgggcgagagcttcgggtcgggccgcctcttcttcagcgtagcggaggccgtcgcggcgggggcgtgcaaagcggcgcagccctgacgacgacgacaggctgatccctgaggtgccgcacgggagcatgcataggaataggatgggtcagagacagactaccggtgctgctagtggtagtagggcaggacgacgtacgaataacatggtgatggcctctcttcctccactccgatgcgatgcgagtgtgcgacgcaggggaggggagaagagtttttgaaggatgtgaccagttgctgttgtagttgttgtcaagtacgtagtaatgaaacgagaattgctgcgtggcaattcaggcctgttttttctttttgcatcaaggaaaaataagtgctggtacagatgagattattttaactagaaccaagttacttgccagtaaaataagaagcttccatataaacttgaaacaaaagaaaaaggagacacgatt

SEQ ID NO: 79502 - DNA, 1145 bp, Zea Mays
tagtaaaaacttaagaaaaagagaacgaagcccctgctgccagcaggaccctgcgggcgcgctcccgtaggccgaatacccccgactgggcaatcgccgccgccgttctctccgttgtctgtctctcggcaaggcagcaactgtgctaccgccgccgcggtgcccagttcttcgccgcgccctcggcccttcggcggcagctagcacccagcagatgagaaggaaacatgcaaagagcatcaaaaacaagttcaacgatctcgtgtcaagccatccacctctgatgccatggaggcaggaaatttagaatcagcaaacaaatgtttttctccctcaaaaataaagcaatgggccatggatgatttggcacagactatgtcatggctggacagccaagaagagaagccagagccaagtgaactgaaggctatagcctctgaaggggtaatcacttgtcttcaagatgccatagaatccctcgagcaaggcaatgatatcaagggagttgcagagcagtggagcttcgtcccccatgttgtcaacgagctgttaaaactagatggaggcggaaaaggtgcggctctgcccaaagagcagctacgtcaactagcaggcaagtgcaagaagatctaccaggccgagtttgctcgcacggacatgggcgacaagaacaagggtaggcatcaaaatgacccacatgtgaccgagcaccgcaggaagaccaataccaaatcagaggatgaccactacgatagcgatgccacgatagaaatgacggaggaagagattgatttcgcgtgcagacggctccctgggctctatgcggatgatacatgatactatctagttgagatgtcaggtgtgtgaggaaggctctgttaggttgttccggattggggccctggattaattcctagccggattacttctctaatttatatagattttgataagctggaatgaatcatggctcattccggtaccaccgaagaggcccgaagggtacttgatgtcaggtgtgttgttgtcggttgtttgatagacgacgggtatgatgtagatctatcgcaacgagacaagatcctccctgctcacttaacaatacagaaagtgaaaaaacaccctccagcagttcctctttccaa

SEQ ID NO: 79503 - DNA, 1595 bp, Zea Mays
tagtaaaaacttaagaaaaagagaacgaagcccctgctgccagcaggaccctgcgggcgcgctcccgtaggccgaatacccccgactgggcaatcgccgccgccgttctctccgttgtctgtctctcggcaaggcagcaactgtgctaccgccgccgcggtgcccagttcttcgccgcgccctcggcccttcggcggcagctagcacccagcagttcggtttcccaataaaatgtccggttccaagagaagcctccccccttggatgagtttttctaaagatggagaggacgattcacgcaagaagaagcatgcaggcacctcccaaaaggcccagaaagggcccgatttctccaaacttttggacggggtggtgtttgtgctgtcagggttcgtgaacccggagaggagcacgcttcgttcacaagcattggacatgggagccgaatatcgagccgattggacatcagactgcacccttcttgtttgtgcatttgtcaacacccccaagtttcgacaggttcaggcggataatggaaccattatctcaaaggactggatctttgagtctcacaagcaaagaaaacttgtggacattgaacctttccttatgcatgctggaaaaccatggcgaaaaaataaggagcccatcaaaactgatcaagatgagaaggaaacatgcaaagagcatcaaaaacaagttcaacgatctcgtgtcaagccatccacctctgatgccatggaggcaggaaatttagaatcagcaaacaaatgtttttctccctcaaaaataaagcaatgggccatggatgatttggcacagactatgtcatggctggacagccaagaagagaagccagagccaagtgaactgaaggctatagcctctgaaggggtaatcacttgtcttcaagatgccatagaatccctcgagcaaggcaatgatatcaagggagttgcagagcagtggagcttcgtcccccatgttgtcaacgagctgttaaaactagatggaggcggaaaaggtgcggctctgcccaaagagcagctacgtcaactagcaggcaagtgcaagaagatctaccaggccgagtttgctcgcacggacatgggcgacaagaacaagggtaggcatcaaaatgacccacatgtgaccgagcaccgcaggaagaccaataccaaatcagaggatgaccactacgatagcgatgccacgatagaaatgacggaggaagagattgatttcgcgtgcagacggctccctgggctctatgcggatgatacatgatactatctagttgagatgtcaggtgtgtgaggaaggctctgttaggttgttccggattggggccctggattaattcctagccggattacttctctaatttatatagattttgataagctggaatgaatcatggctcattccggtaccaccgaagaggcccgaagggtacttgatgtcaggtgtgttgttgtcggttgtttgatagacgacgggtatgatgtagatctatcgcaacgagacaagatcctccctgctcacttaacaatacagaaagtgaaaaaacaccctccagcagttcctctttccaa

SEQ ID NO: 79504 - DNA, 2285 bp, Zea Mays
aagtgtaatcatcgagaaccgtccagtgggaggaaagaacctatctataattctatatccgggaagatgatgcagcagttatcgtctcggatgcttggttaaaccctgggcacaatatggtttgaacagtgaaatgccgcgtattggcagggatcattctaccttcatggctccattgccgtggtggtttcatcattctactttcatgtaaaaacattaatagcataatgagaggaaaaccttcagaataaagcattgaaatcgtaggttcaagttaagacatacagcccatcatttcctccactgatgctgtttggattcattcatggacctaaatgcatcaccgtgggtgtcccactgtcccttaacatgagactcacctccaccttgcccctcccagtcggatcacctcttccgttccagaatccctgtgcgccctatcgtcgccagcatcattcttcacgtttgtcgcatcgccgtacagatccttcagcttcgccaggttcgacaattctggagccctaccaaacgggctggagcgatgtttgtcgccatcacttctgccacggactggactcctgctcctgctcctgcggacgcttgcatgtctactccggtcagaatccctgtccctcctttcacggcctcgtgtttcgccatccctgttcgaataatcagaccgacgatgatcgcggtctctgtgctcacgagcatgccgatcaggctccctatccttgtagtacctgccactgccacgttcacgatccgagcgctccctctccaaatcatgatcacgctcagagctccgactccggtgcttcatcggtggcgatttcgcacggtcaccttccttgtcctgtttggaaggtaacgttcttcggaccggggaagaatcccttgtggatgcacggtgtggagcgcgctgaccaaaggagacagacaaagaagcctttacggaaggaggccttctggcggtatcatttgattcaagcctgttggaatccccagtcattcctgactgctttgttggaagctttagcttctcaaggtggctagtgacctgtcggaggattgggagaggcactcgtggaaggagactgtcgaaatagtactgcaaaaagaataacaaatatcattgacactttgtttttacatgtgaaaataataatcctcaatgtcgaaatagtactggaaaaagaataacaaataagaaacagcgaggaattgcatcagagttatcaacaaaaatacagactggtaggtcaatctgatggtgatttaatagacaatgatttgtcatggcagttacgctggcaattgcacgcacctctaaaattattacaaaagagtaaatgaccatactgttcagtgatcaagattgcaggaaaaaacgtgacaattcagtcaaatgttttgcaattgccttcagcaaactgaattgaccaccgttaatgtatagtgtatcggcggatccgaaaaaagggtgcaaggacaaatctgctttagagcagccttggtttatcccttccccagatccctggtcttccccctttttttagagcagcaacaggaacaaccgaccaaaccagaaaatcttactttatgtcactgctttcctaactagtgtggcaattaaatgtatgaactattgggcctcggttaaattagataggaatttagataactttgcaatacaatacatcagagcatctgactgggaataaatgtggagtcaagcaccaaacaagaagaaaaaaactggttttacagttaaccatcaaatcagtatccatattagccatctttttttctttttagtaccatttcctccaaaaaaaacaactatatggtatttaatgcgttggaaccctttcgcttctgtctagaaaaaatggagttatttccttcataacatatcacatacaccttcagtgaagaatcatgtctggaggaaaagaaaatactagaaactctcgccgcaagaaaccaatatgggcaaaagccccatgtacatacatgtttgtgtgatataatcctcaagatgtaaaaaaagattaaaattatcttgcaacctaccaagaccaaaccattccaaatgttatgaatacttcaaccacttgaaacataggttaaactagcaaaaaacagtgaaaacagaaattctgagcaacacatcatgacaaaccttatacagtgatgttactggcggaagagatgatgtctcctcttaaaagcaactccacaattgaaacatcccctcagttgtttttttatatggaataatt

SEQ ID NO: 79505 - DNA, 1371 bp, Zea Mays
aatgctttgggctgatctgcaaacttgcggtgaaattccggcttcggcggtttggccagcctccttccgcggggtggatttggatagcgcggcgcagagaaaaatggcggcttcggctctccacctccaccgccggcgggtgtgaagcttcagcagaggcagctgcgctcgcggcagggtggcctatctcgaagacttttgaaagttgtgtcctattacagtctcacaactccaccatataaactggatgctctggaaccttacatgagcaagaggacagttgaacttcactggggtaagcaccatcaagattacgtggatggcttgaataagcagctggctaccagccctctgtatggatatacgctggaggatctgataaaagaagcctacaacaatggcaatccattaccagaatataacaatgcagcacaggtctggaaccatcacttcttctgggaatcgatgcaaccagaaggtggtggcttacctgagggaggtgtgctgcagcagattgaaaaggattttggctcgtttactaattttagggaagagtttatccgctcagccttacaactattggggtctggttgggtttggcttgtcttgaagagaaatgagacaaagctttcagtggttcatacacaaaatgctatcttcccacttgcttttggtgatatcccaatcatcaacctagacttatggtagcatgcttactacttagactacaaggatgataggctaacatatgttacaaactttatgggccatctcatctcttggcatactatcactctacgcatgatgcgtgcagagtcttttgtgaaccttggtgagcctaatattccggtggcatgagctacagatacaccctagttatcatcatgaggcatcctttggatacgtcgggtcaaatcctgctggaggaaccagagacatgcttatcactcgaatgccatacacgcaaagataagctgcatgcttgattttcaccactgcccttggatattgctacagggaaaccactagtcagcatccaatctgaagatgtgcagcaatgcagctttagaagctctgggagctggtaggtagcgatccaacttgggcttcgaagccatggcgctttcgctagatggctatgcccgtggcacgatctggagcagcagaccagacgctactggtgacagatgattcagacatgaaaagattaaattgtgcccggccctatgacactcgaacagggttccccaggaccctgaattctgctgtcatcacagacaaaacgaaggacacgaagaatagattgtgtcggatcggtagcagcagtgacaggtaaactacgcgaacgaatgccttgtgtttggaatcgga

SEQ ID NO: 79506 - DNA, 1396 bp, Zea Mays
aatgctttgggctgatctgcaaacttgcggtgaaattccggcttcggcggtttggccagcctccttccgcggggtggatttggatagcgcggcgcagagaaaaatggcggcttcggctctccacctccaccgccggcgggtgtgaagcttcagcagaggcagctgcgctcgcggcagggtggcctatctcgaagacttttgaaagttgtgtcctattacagtctcacaactccaccatataaactggttgatgctctggaaccttacatgagcaagaggacagttgaacttcactggggtaagcaccatcaagattacgtggatggcttgaataagcagctggctaccagccctctgtatggatatacgctggaggatctgataaaagaagcctacaacaatggcaatccattaccagaatataacaatgcagcacaggtctggaaccatcacttcttctgggaatcgatgcaaccagaaggtggtggcttacctgagggaggtgtgctgcagcagattgaaaaggattttggctcgtttactaattttagggaagagtttatccgctcagccttacaactattggggtctggttgggtttggcttgtcttgaagagaaatgagacaaagctttcagtggttcatacacaaaatgctatcttcccacttgcttttggtgatatcccaatcatcaacctagacttatggtagcatgcttactacttagactacaaggatgataggctaacatatgttacaaactttatgggccatctcatctcttggcatactatcactctacgcatgatgcgtgcagagtcttttgtgaaccttggtgagcctaatattccggtggcatgagctacagatacaccctagttatcatcatgaggcatcctttggatacgtcgggtcaaatcctgctggaggaaccagagacatgcttatcactcgaatgccatacacgcaaagataagctgcatgcttgattttcaccactgcccttggatattgctacagggaaaccactagtcagcatccaatctgaagatgtgcagcaatgcagctttagaagctctgggagctggtaggtagcgatccaacttgggcttcgaagccatggcgctttcgctagatggctatgcccgtggcacgatctggagcagcagaccagacgctactggtgacagatgattcagacatgaaaagattaaattgtgcccggccctatgacactcgaacagggttccccaggaccctgaattctgctgtcatcacagacaaaacgaaggacacgaagaatagattgtgtcggatcggtagcagcagtgacaggtttgccacaaccagactaaaaggagacaggctactgaaactgaatcatcatcatcatcat

SEQ ID NO: 79507 - DNA, 1392 bp, Zea Mays
aatgctttgggctgatctgcaaacttgcggtgaaattccggcttcggcggtttggccagcctccttccgcggggtggatttggatagcgcggcgcagagaaaaatggcggcttcggctctccacctccaccgccggcgggtgtgaagcttcagcagaggcagctgcgctcgcggcagggtggcctatctcgaagacttttgaaagttgtgtcctattacagtctcacaactccaccatataaactggttgatgctctggaaccttacatgagcaagaggacagttgaacttcactggggtaagcaccatcaagattacgtggatggcttgaataagcagctggctaccagccctctgtatggatatacgctggaggatctgataaaagaagcctacaacaatggcaatccattaccagaatataacaatgcagcacaggtctggaaccatcacttcttctgggaatcgatgcaaccagaaggtggtggcttacctgagggaggtgtgctgcagcagattgaaaaggattttggctcgtttactaattttagggaagagtttatccgctcagccttacaactattggggtctggttgggtttggcttgtcttgaagagaaatgagacaaagctttcagtggttcatacacaaaatgctatcttcccacttgcttttggtgatatcccaatcatcaacctagacttatgcatgcttactacttagactacaaggatgataggctaacatatgttacaaactttatgggccatctcatctcttggcatactatcactctacgcatgatgcgtgcagagtcttttgtgaaccttggtgagcctaatattccggtggcatgagctacagatacaccctagttatcatcatgaggcatcctttggatacgtcgggtcaaatcctgctggaggaaccagagacatgcttatcactcgaatgccatacacgcaaagataagctgcatgcttgattttcaccactgcccttggatattgctacagggaaaccactagtcagcatccaatctgaagatgtgcagcaatgcagctttagaagctctgggagctggtaggtagcgatccaacttgggcttcgaagccatggcgctttcgctagatggctatgcccgtggcacgatctggagcagcagaccagacgctactggtgacagatgattcagacatgaaaagattaaattgtgcccggccctatgacactcgaacagggttccccaggaccctgaattctgctgtcatcacagacaaaacgaaggacacgaagaatagattgtgtcggatcggtagcagcagtgacaggtttgccacaaccagactaaaaggagacaggctactgaaactgaatcatcatcatcatcat

SEQ ID NO: 79508 - DNA, 1587 bp, Zea Mays
gttttcggttcaatacaggtgatttatgctacagaaaaaaaaacctatcgtaactagaatttggcccgtttaaaaacgcgtgatgggcttttgcacttgtgtcaaatggttggtaacggtgcgtgcggccctttttaaaacgcactggctcctggggtagtgctactttattgttttttctctctccctctctacgtgagaataacagacaaggttggttacgctgagaaccacgctatcacaaatcatcaatgttaacatggatcatcagatttgctcatttcccctcctgtcagcagtatagacgcgaaaagtcggtagaagcacgttttcttttctagcaatccacacactcagaaaacacattaaaaaaacagtatgtagagttgggtctctaacctctttctgagaagatacatattcctttatatagagatgcgacactgctcacagatataagtggtatttgaccacataagcgtactagggttttttaacagtttaatcggtagaagtaacattatacattctgaactgagcaccaatactactctacagcgctgttcagcagcctcgccgtagtaatactagcagtagcagatcgatgttcagcagctagcctcgtagttaaatttattcaggcattggtggtgctttgcactgacgacgatcgaactgaaagaggtaggtagctagctctggacgaaggccacgtctcacggcctgaagaaagccgggtggggacggccggtgccctggaaggaggtgttcttgaggtggtcaggggcttgctcgaacgagtggcgcctcgccagcgacaggatcttcttgtcggcggcgatgaagtaggccatcccagccaccgtggagacgatgagcgcctggccggtggggttgatgttggccttggcccatggcagcatccgcacgctggccagctgaagaagcgacgatcagttattagagactggccgacgacgggctgtttcgcgaccgatcgacgcgtacgtacgtacgtacggctgcgcagcatgcgcctgattaatctacgggagaaattaagctagagacgtgaaaggaaactcacggtggggatcgcggaggcgatagtcgccacggctgccgccttggctccggcgagggtcgcctctgcagaccctcgggagcagcgcttggcgagggcgagcttctggtcgagggacgcacggctcaccgtcgacatctctgtacgcggttgcagacttgcaggtggagcagcaaagcaagctagagggtttgtgagacggagcagctcgatctgctggcagtggcagtgagcagcactggagttgcaaggaggatggatgtgttttgtgttgccagaaagaggagaggccaaggatttataggcgccgttgcgccgccaagcatcgggcgggggaccccaaccacacaaacaatcggcggacgcggggaggggaggggagaagcggcgggcggcgcggacgttgttttggagcccatgcacttttcaggggagacctatgaacctatccattccagggagggagacaaaagagacgggcgtcgcatgcgacaccatgcgcg

SEQ ID NO: 79509 - DNA, 3073 bp, Zea Mays
cgatatgttttgattttaatatatgctggtggaaaaggtgagttctgtcaattttaattctaatctaactatgaaaaagaaaaaagaaacagcttattggactggtgaagatttataatttcttcattccaattggcgacacgactagttctgcaatttatttgatttggatgaattactttataaaaaacaataaagaataatcaaattccctgacgcagcagagaagagactagagagaactccactcaagaaaaaattgcacgcaagggtccacgcggcgaacagatcgtgccgttccgcggcggcgtcggtgcggcgctggagccgaagtgaaaagtcgatcgggattgggccgttgggggtgcgatacccctcgcctcgaatgcgagctccgtaggtccgcccccccggcggatggccgagctgggccgccgccgccgcccgctgggatgaggcagcgtgaggagtcgcgctcgcggcttccctgcccccaggcctccgctctgaatatccccgacgcgacggtaaccgaacaagcctcagttagaaaggctaagatcagagcatctccgtgtctccacaacacatcctggattcgcaattattgaggtgcctccactataaaaggccaaccatcctcaaggaatgaacacagccagccagcaagcaagcagagaacaaggataacacagcaactgaaaaccttattaccaagaacaaacaactacaagaggctttgcaagttcacagaggcagctgttcactgcgaatgaacaaccagaggaagcctggagactggaactgcaagaactgccagcatctcaacttcagccgccgtgactactgccagcgttgccgtgatccacgccctgacttgcagttcggcgacggctatagcacggttggtgtgctgacctccctggacatccgcccaggtgactggtactgcagctgcggctaccacaacttcgccagccgcagcagctgcttcaagtgcggcacgatcgtcagagacttcccagcggggcaaggcgcagccggtgctgagggtgactttgctggtggacgcgacagcgccgcagtccgtgctgggtggaaagctggcgactggatctgcacgaggcctggttgcaacgtacacaactttgcgagcaggatggagtgctataggtgcaatgcaccaagggaggcagtttcagtttttaacaaatgggctggtaattccggaggcccatgtacaattggcccatgggtggcgcgtatagcccactaccacacaagtccacagcccgtcgttctggagtctggacccacatggcatggacacacgccgcctccgtccaatgatccaattcaatccaactacctaccttcactgcactgcactgcacctacccggctacccctgcggccttgccggggagtcggggacggggaaggaaacggcaacgagcctgcagctccagctaccccgaaaccccgtccaacgtccatggctatccacctccgggcccacgccttcgcggccaacccgctgcgtggcgtctccgccgccaccacctccatgtccccctccgcggccgccgaggcactccgctacctcctcgaccccagctccgccgccgccgccgccaatcccagccagtacctctccaagatccttcctttccgccggggccgcccgctcgcgcgctccacggaccctcccgcggtgccggcctggcgcctcgcgtggctcccgccgtcccgcgtccccggggtggccctggatgccttcgtcttcctgggcgcgctcgtcgagggggacggcaaggaagcctccgcgtactgggcggtcgacgtcagcgagggcgagggagccagggttggtgggccggcggacggggatgggccgtcggcgtttgtggacttgaggacgctcatggtggccacggactggagcgacaaggacgccatggcggagctcgccatcgcaggacatgctcgagcactgctagaatggcacagcacggcaaaattttgtggagcttgtggagcaaaggctgtacctactgaagccgggaggcgtaagcagtgcagcaacgattcctgcaagaagaggatataccctagaattgatccggttgtgatcatgttggtcattgataaagaaaatgatcgggcactcttaagccgccagtcaagatttgtgcctcgtatgtggagttgtcttgctggtttcatagagccaggagaaagcctggaagaggcagtgagacgagaaacatgggaggaaactggtatcgaagttgggcaagtcgtttatcacagttctcaaccatggcctgttgggccaaatactatgccgtgtcaactgatggtgggcttctttgcttatgctaaatcattggagataaacgtggacaagcaggagcttgaagatgcccagtggcacaaccgcgaagacgtcaagaaagcgttgacgtttgctgaatacgagaaagcccagagaacaagcgctgccaaggtcgatcagatctgcaagggcgctgagaaagggcagaacccctctgccgacttcaaagttggaagcggcgagcctgctccaatgtttgtcccaggaccctacgccattgctcaccaccttatctcgtcgtgggctttcgagggagcaccgaagctgcctagttcattctcaaacctataagcctggaccctggtgttcagacagacgatgacaggaactggacccctgtgctgcgggctcatggatcacctgtgttgccgtgagtgtaattctgatagtgtgtgtccgttgccggttgtgataaaataaaatagcaatagagtactgggtacagaagacttgccggaggatttggcatcaatggacatgtatatccattgcctttttacatgttgatcctctttgtatcacacgtaatgttgcatacttgcatagatacaacaatgatatacatcacacagtgtactcatgcatttatacatgtattcagataactggattcaatagtagagtctttgtctgtctctctctctttttctcacatgtggtttgataattgctaca

SEQ ID NO: 79510 - DNA, 2963 bp, Zea Mays
tgaagatttataatttcttcattccaattggcgacacgactagttctgcaatttatttgatttggatgaattactttataaaaaacaataaagaataatcaaattccctgacgcagcagagaagagactagagagaactccactcaagaaaaaattgcacgcaagggtccacgcggcgaacagatcgtgccgttccgcggcggcgtcggtgcggcgctggagccgaagtgaaaagtcgatcgggattgggccgttgggggtgcgatacccctcgcctcgaatgcgagctccgtaggtccgcccccccggcggatggccgagctgggccgccgccgccgcccgctgggatgaggcagcgtgaggagtcgcgctcgcggcttccctgcccccaggcctccgctctgaatatccccgacgcgacggtaaccgaacaagcctcagttagaaaggctaagatcagagcatctccgtgtctccacaacacatcctggattcgcaattattgaggtgcctccactataaaaggccaaccatcctcaaggaatgaacacagccagccagcaagcaagcagagaacaaggataacacagcaactgaaaaccttattaccaagaacaaacaactacaagaggctttgcaagttcacagactgttcactgcgaatgaacaaccagaggaagcctggagactggaactgcaagaactgccagcatctcaacttcagccgccgtgactactgccagcgttgccgtgatccacgccctgacttgcagttcggcgacggctatagcacggttggtgtgctgacctccctggacatccgcccaggtgactggtactgcagctgcggctaccacaacttcgccagccgcagcagctgcttcaagtgcggcacgatcgtcagagacttcccagcggggcaaggcgcagccggtgctgagggtgactttgctggtggacgcgacagcgccgcagtccgtgctgggtggaaagctggcgactggatctgcacgaggcctggttgcaacgtacacaactttgcgagcaggatggagtgctataggtgcaatgcaccaagggaggcagtttcagtttttaacaaatgggctggtaattccggaggcccatgtacaattggcccatgggtggcgcgtatagcccactaccacacaagtccacagcccgtcgttctggagtctggacccacatggcatggacacacgccgcctccgtccaatgatccaattcaatccaactacctaccttcactgcactgcactgcacctacccggctacccctgcggccttgccggggagtcggggacggggaaggaaacggcaacgagcctgcagctccagctaccccgaaaccccgtccaacgtccatggctatccacctccgggcccacgccttcgcggccaacccgctgcgtggcgtctccgccgccaccacctccatgtccccctccgcggccgccgaggcactccgctacctcctcgaccccagctccgccgccgccgccgccaatcccagccagtacctctccaagatccttcctttccgccggggccgcccgctcgcgcgctccacggaccctcccgcggtgccggcctggcgcctcgcgtggctcccgccgtcccgcgtccccggggtggccctggatgccttcgtcttcctgggcgcgctcgtcgagggggacggcaaggaagcctccgcgtactgggcggtcgacgtcagcgagggcgagggagccagggttggtgggccggcggacggggatgggccgtcggcgtttgtggacttgaggacgctcatggtggccacggactggagcgacaaggacgccatggcggagctcgccatcgcaggacatgctcgagcactgctagaatggcacagcacggcaaaattttgtggagcttgtggagcaaaggctgtacctactgaagccgggaggcgtaagcagtgcagcaacgattcctgcaagaagaggatataccctagaattgatccggttgtgatcatgttggtcattgataaagaaaatgatcgggcactcttaagccgccagtcaagatttgtgcctcgtatgtggagttgtcttgctggtttcatagagccaggagaaagcctggaagaggcagtgagacgagaaacatgggaggaaactggtatcgaagttgggcaagtcgtttatcacagttctcaaccatggcctgttgggccaaatactatgccgtgtcaactgatggtgggcttctttgcttatgctaaatcattggagataaacgtggacaagcaggagcttgaagatgcccagtggcacaaccgcgaagacgtcaagaaagcgttgacgtttgctgaatacgagaaagcccagagaacaagcgctgccaaggtcgatcagatctgcaagggcgctgagaaagggcagaacccctctgccgacttcaaagttggaagcggcgagcctgctccaatgtttgtcccaggaccctacgccattgctcaccaccttatctcgtcgtgggctttcgagggagcaccgaagctgcctagttcattctcaaacctataagcctggaccctggtgttcagacagacgatgacaggaactggacccctgtgctgcgggctcatggatcacctgtgttgccgtgagtgtaattctgatagtgtgtgtccgttgccggttgtgataaaataaaatagcaatagagtactgggtacagaagacttgccggaggatttggcatcaatggacatgtatatccattgcctttttacatgttgatcctctttgtatcacacgtaatgttgcatacttgcatagatacaacaatgatatacatcacacagtgtactcatgcatttatacatgtattcagataactggattcaatagtagagtctttgtctgtctctctctctttttctcacatgtggtttgataattgctaca

SEQ ID NO: 79511 - DNA, 2968 bp, Zea Mays
tgaagatttataatttcttcattccaattggcgacacgactagttctgcaatttatttgatttggatgaattactttataaaaaacaataaagaataatcaaattccctgacgcagcagagaagagactagagagaactccactcaagaaaaaattgcacgcaagggtccacgcggcgaacagatcgtgccgttccgcggcggcgtcggtgcggcgctggagccgaagtgaaaagtcgatcgggattgggccgttgggggtgcgatacccctcgcctcgaatgcgagctccgtaggtccgcccccccggcggatggccgagctgggccgccgccgccgcccgctgggatgaggcagcgtgaggagtcgcgctcgcggcttccctgcccccaggcctccgctctgaatatccccgacgcgacggtaaccgaacaagcctcagctcagttagaaaggctaagatcagagcatctccgtgtctccacaacacatcctggattcgcaattattgaggtgcctccactataaaaggccaaccatcctcaaggaatgaacacagccagccagcaagcaagcagagaacaaggataacacagcaactgaaaaccttattaccaagaacaaacaactacaagaggctttgcaagttcacagactgttcactgcgaatgaacaaccagaggaagcctggagactggaactgcaagaactgccagcatctcaacttcagccgccgtgactactgccagcgttgccgtgatccacgccctgacttgcagttcggcgacggctatagcacggttggtgtgctgacctccctggacatccgcccaggtgactggtactgcagctgcggctaccacaacttcgccagccgcagcagctgcttcaagtgcggcacgatcgtcagagacttcccagcggggcaaggcgcagccggtgctgagggtgactttgctggtggacgcgacagcgccgcagtccgtgctgggtggaaagctggcgactggatctgcacgaggcctggttgcaacgtacacaactttgcgagcaggatggagtgctataggtgcaatgcaccaagggaggcagtttcagtttttaacaaatgggctggtaattccggaggcccatgtacaattggcccatgggtggcgcgtatagcccactaccacacaagtccacagcccgtcgttctggagtctggacccacatggcatggacacacgccgcctccgtccaatgatccaattcaatccaactacctaccttcactgcactgcactgcacctacccggctacccctgcggccttgccggggagtcggggacggggaaggaaacggcaacgagcctgcagctccagctaccccgaaaccccgtccaacgtccatggctatccacctccgggcccacgccttcgcggccaacccgctgcgtggcgtctccgccgccaccacctccatgtccccctccgcggccgccgaggcactccgctacctcctcgaccccagctccgccgccgccgccgccaatcccagccagtacctctccaagatccttcctttccgccggggccgcccgctcgcgcgctccacggaccctcccgcggtgccggcctggcgcctcgcgtggctcccgccgtcccgcgtccccggggtggccctggatgccttcgtcttcctgggcgcgctcgtcgagggggacggcaaggaagcctccgcgtactgggcggtcgacgtcagcgagggcgagggagccagggttggtgggccggcggacggggatgggccgtcggcgtttgtggacttgaggacgctcatggtggccacggactggagcgacaaggacgccatggcggagctcgccatcgcaggacatgctcgagcactgctagaatggcacagcacggcaaaattttgtggagcttgtggagcaaaggctgtacctactgaagccgggaggcgtaagcagtgcagcaacgattcctgcaagaagaggatataccctagaattgatccggttgtgatcatgttggtcattgataaagaaaatgatcgggcactcttaagccgccagtcaagatttgtgcctcgtatgtggagttgtcttgctggtttcatagagccaggagaaagcctggaagaggcagtgagacgagaaacatgggaggaaactggtatcgaagttgggcaagtcgtttatcacagttctcaaccatggcctgttgggccaaatactatgccgtgtcaactgatggtgggcttctttgcttatgctaaatcattggagataaacgtggacaagcaggagcttgaagatgcccagtggcacaaccgcgaagacgtcaagaaagcgttgacgtttgctgaatacgagaaagcccagagaacaagcgctgccaaggtcgatcagatctgcaagggcgctgagaaagggcagaacccctctgccgacttcaaagttggaagcggcgagcctgctccaatgtttgtcccaggaccctacgccattgctcaccaccttatctcgtcgtgggctttcgagggagcaccgaagctgcctagttcattctcaaacctataagcctggaccctggtgttcagacagacgatgacaggaactggacccctgtgctgcgggctcatggatcacctgtgttgccgtgagtgtaattctgatagtgtgtgtccgttgccggttgtgataaaataaaatagcaatagagtactgggtacagaagacttgccggaggatttggcatcaatggacatgtatatccattgcctttttacatgttgatcctctttgtatcacacgtaatgttgcatacttgcatagatacaacaatgatatacatcacacagtgtactcatgcatttatacatgtattcagataactggattcaatagtagagtctttgtctgtctctctctctttttctcacatgtggtttgataattgctaca

SEQ ID NO: 79512 - DNA, 2973 bp, Zea Mays
tgaagatttataatttcttcattccaattggcgacacgactagttctgcaatttatttgatttggatgaattactttataaaaaacaataaagaataatcaaattccctgacgcagcagagaagagactagagagaactccactcaagaaaaaattgcacgcaagggtccacgcggcgaacagatcgtgccgttccgcggcggcgtcggtgcggcgctggagccgaagtgaaaagtcgatcgggattgggccgttgggggtgcgatacccctcgcctcgaatgcgagctccgtaggtccgcccccccggcggatggccgagctgggccgccgccgccgcccgctgggatgaggcagcgtgaggagtcgcgctcgcggcttccctgcccccaggcctccgctctgaatatccccgacgcgacggtaaccgaacaagcctcagctcagttagaaaggctaagatcagagcatctccgtgtctccacaacacatcctggattcgcaattattgaggtgcctccactataaaaggccaaccatcctcaaggaatgaacacagccagccagcaagcaagcagagaacaaggataacacagcaactgaaaaccttattaccaagaacaaacaactacaagaggctttgcaagttcacagaggcagctgttcactgcgaatgaacaaccagaggaagcctggagactggaactgcaagaactgccagcatctcaacttcagccgccgtgactactgccagcgttgccgtgatccacgccctgacttgcagttcggcgacggctatagcacggttggtgtgctgacctccctggacatccgcccaggtgactggtactgcagctgcggctaccacaacttcgccagccgcagcagctgcttcaagtgcggcacgatcgtcagagacttcccagcggggcaaggcgcagccggtgctgagggtgactttgctggtggacgcgacagcgccgcagtccgtgctgggtggaaagctggcgactggatctgcacgaggcctggttgcaacgtacacaactttgcgagcaggatggagtgctataggtgcaatgcaccaagggaggcagtttcagtttttaacaaatgggctggtaattccggaggcccatgtacaattggcccatgggtggcgcgtatagcccactaccacacaagtccacagcccgtcgttctggagtctggacccacatggcatggacacacgccgcctccgtccaatgatccaattcaatccaactacctaccttcactgcactgcactgcacctacccggctacccctgcggccttgccggggagtcggggacggggaaggaaacggcaacgagcctgcagctccagctaccccgaaaccccgtccaacgtccatggctatccacctccgggcccacgccttcgcggccaacccgctgcgtggcgtctccgccgccaccacctccatgtccccctccgcggccgccgaggcactccgctacctcctcgaccccagctccgccgccgccgccgccaatcccagccagtacctctccaagatccttcctttccgccggggccgcccgctcgcgcgctccacggaccctcccgcggtgccggcctggcgcctcgcgtggctcccgccgtcccgcgtccccggggtggccctggatgccttcgtcttcctgggcgcgctcgtcgagggggacggcaaggaagcctccgcgtactgggcggtcgacgtcagcgagggcgagggagccagggttggtgggccggcggacggggatgggccgtcggcgtttgtggacttgaggacgctcatggtggccacggactggagcgacaaggacgccatggcggagctcgccatcgcaggacatgctcgagcactgctagaatggcacagcacggcaaaattttgtggagcttgtggagcaaaggctgtacctactgaagccgggaggcgtaagcagtgcagcaacgattcctgcaagaagaggatataccctagaattgatccggttgtgatcatgttggtcattgataaagaaaatgatcgggcactcttaagccgccagtcaagatttgtgcctcgtatgtggagttgtcttgctggtttcatagagccaggagaaagcctggaagaggcagtgagacgagaaacatgggaggaaactggtatcgaagttgggcaagtcgtttatcacagttctcaaccatggcctgttgggccaaatactatgccgtgtcaactgatggtgggcttctttgcttatgctaaatcattggagataaacgtggacaagcaggagcttgaagatgcccagtggcacaaccgcgaagacgtcaagaaagcgttgacgtttgctgaatacgagaaagcccagagaacaagcgctgccaaggtcgatcagatctgcaagggcgctgagaaagggcagaacccctctgccgacttcaaagttggaagcggcgagcctgctccaatgtttgtcccaggaccctacgccattgctcaccaccttatctcgtcgtgggctttcgagggagcaccgaagctgcctagttcattctcaaacctataagcctggaccctggtgttcagacagacgatgacaggaactggacccctgtgctgcgggctcatggatcacctgtgttgccgtgagtgtaattctgatagtgtgtgtccgttgccggttgtgataaaataaaatagcaatagagtactgggtacagaagacttgccggaggatttggcatcaatggacatgtatatccattgcctttttacatgttgatcctctttgtatcacacgtaatgttgcatacttgcatagatacaacaatgatatacatcacacagtgtactcatgcatttatacatgtattcagataactggattcaatagtagagtctttgtctgtctctctctctttttctcacatgtggtttgataattgctaca

SEQ ID NO: 79513 - DNA, 2922 bp, Zea Mays
gccacacttaatcaccgtcaaaagttgtgctgcattccttttccttttctcctcactctctcagtgcaaaagagggagggagatgcggtaaaaggatgaactgaccctggcattcttctttcctcttttgctactttctgggttctgctgctttccgtgggctttaggataagggcaacagaaaagactgacaaagatctgcaaccgttctttttataatttcatccatctcataagcttttcgtctgtgttgatttgtttatgcattcaatagaaatataatgtagctttagagaagaccaccggcccaccgccatgcagaatttatgttctctatatatgttacgaatacagcaactggacgctgcatacgtgagctccctctcagggaacagttagaaaggctaagatcagagcatctccgtgtctccacaacacatcctggattcgcaattattgaggtgcctccactataaaaggccaaccatcctcaaggaatgaacacagccagccagcaagcaagcagagaacaaggataacacagcaactgaaaaccttattaccaagaacaaacaactacaagaggctttgcaagttcacagaggcagctgttcactgcgaatgaacaaccagaggaagcctggagactggaactgcaagaactgccagcatctcaacttcagccgccgtgactactgccagcgttgccgtgatccacgccctgacttgcagttcggcgacggctatagcacggttggtgtgctgacctccctggacatccgcccaggtgactggtactgcagctgcggctaccacaacttcgccagccgcagcagctgcttcaagtgcggcacgatcgtcagagacttcccagcggggcaaggcgcagccggtgctgagggtgactttgctggtggacgcgacagcgccgcagtccgtgctgggtggaaagctggcgactggatctgcacgaggcctggttgcaacgtacacaactttgcgagcaggatggagtgctataggtgcaatgcaccaagggaggcagtttcagtttttaacaaatgggctggtaattccggaggcccatgtacaattggcccatgggtggcgcgtatagcccactaccacacaagtccacagcccgtcgttctggagtctggacccacatggcatggacacacgccgcctccgtccaatgatccaattcaatccaactacctaccttcactgcactgcactgcacctacccggctacccctgcggccttgccggggagtcggggacggggaaggaaacggcaacgagcctgcagctccagctaccccgaaaccccgtccaacgtccatggctatccacctccgggcccacgccttcgcggccaacccgctgcgtggcgtctccgccgccaccacctccatgtccccctccgcggccgccgaggcactccgctacctcctcgaccccagctccgccgccgccgccgccaatcccagccagtacctctccaagatccttcctttccgccggggccgcccgctcgcgcgctccacggaccctcccgcggtgccggcctggcgcctcgcgtggctcccgccgtcccgcgtccccggggtggccctggatgccttcgtcttcctgggcgcgctcgtcgagggggacggcaaggaagcctccgcgtactgggcggtcgacgtcagcgagggcgagggagccagggttggtgggccggcggacggggatgggccgtcggcgtttgtggacttgaggacgctcatggtggccacggactggagcgacaaggacgccatggcggagctcgccatcgcaggacatgctcgagcactgctagaatggcacagcacggcaaaattttgtggagcttgtggagcaaaggctgtacctactgaagccgggaggcgtaagcagtgcagcaacgattcctgcaagaagaggatataccctagaattgatccggttgtgatcatgttggtcattgataaagaaaatgatcgggcactcttaagccgccagtcaagatttgtgcctcgtatgtggagttgtcttgctggtttcatagagccaggagaaagcctggaagaggcagtgagacgagaaacatgggaggaaactggtatcgaagttgggcaagtcgtttatcacagttctcaaccatggcctgttgggccaaatactatgccgtgtcaactgatggtgggcttctttgcttatgctaaatcattggagataaacgtggacaagcaggagcttgaagatgcccagtggcacaaccgcgaagacgtcaagaaagcgttgacgtttgctgaatacgagaaagcccagagaacaagcgctgccaaggtcgatcagatctgcaagggcgctgagaaagggcagaacccctctgccgacttcaaagttggaagcggcgagcctgctccaatgtttgtcccaggaccctacgccattgctcaccaccttatctcgtcgtgggctttcgagggagcaccgaagctgcctagttcattctcaaacctataagcctggaccctggtgttcagacagacgatgacaggaactggacccctgtgctgcgggctcatggatcacctgtgttgccgtgagtgtaattctgatagtgtgtgtccgttgccggttgtgataaaataaaatagcaatagagtactgggtacagaagacttgccggaggatttggcatcaatggacatgtatatccattgcctttttacatgttgatcctctttgtatcacacgtaatgttgcatacttgcatagatacaacaatgatatacatcacacagtgtactcatgcatttatacatgtattcagataactggattcaatagtagagtctttgtctgtctctctctctttttctcacatgtggtttgataattgctaca

SEQ ID NO: 79514 - DNA, 2647 bp, Zea Mays
atagaaatataatgtagctttagagaagaccaccggcccaccgccatgcagaatttatgttctctatatatgttacgaatacagcaactggacgctgcatacgtgagctccctctcagggaacagttagaaaggctaagatcagagcatctccgtgtctccacaacacatcctggattcgcaattattgaggtgcctccactataaaaggccaaccatcctcaaggaatgaacacagccagccagcaagcaagcagagaacaaggataacacagcaactgaaaaccttattaccaagaacaaacaactacaagaggctttgcaagttcacagactgttcactgcgaatgaacaaccagaggaagcctggagactggaactgcaagaactgccagcatctcaacttcagccgccgtgactactgccagcgttgccgtgatccacgccctgacttgcagttcggcgacggctatagcacggttggtgtgctgacctccctggacatccgcccaggtgactggtactgcagctgcggctaccacaacttcgccagccgcagcagctgcttcaagtgcggcacgatcgtcagagacttcccagcggggcaaggcgcagccggtgctgagggtgactttgctggtggacgcgacagcgccgcagtccgtgctgggtggaaagctggcgactggatctgcacgaggcctggttgcaacgtacacaactttgcgagcaggatggagtgctataggtgcaatgcaccaagggaggcagtttcagtttttaacaaatgggctggtaattccggaggcccatgtacaattggcccatgggtggcgcgtatagcccactaccacacaagtccacagcccgtcgttctggagtctggacccacatggcatggacacacgccgcctccgtccaatgatccaattcaatccaactacctaccttcactgcactgcactgcacctacccggctacccctgcggccttgccggggagtcggggacggggaaggaaacggcaacgagcctgcagctccagctaccccgaaaccccgtccaacgtccatggctatccacctccgggcccacgccttcgcggccaacccgctgcgtggcgtctccgccgccaccacctccatgtccccctccgcggccgccgaggcactccgctacctcctcgaccccagctccgccgccgccgccgccaatcccagccagtacctctccaagatccttcctttccgccggggccgcccgctcgcgcgctccacggaccctcccgcggtgccggcctggcgcctcgcgtggctcccgccgtcccgcgtccccggggtggccctggatgccttcgtcttcctgggcgcgctcgtcgagggggacggcaaggaagcctccgcgtactgggcggtcgacgtcagcgagggcgagggagccagggttggtgggccggcggacggggatgggccgtcggcgtttgtggacttgaggacgctcatggtggccacggactggagcgacaaggacgccatggcggagctcgccatcgcaggacatgctcgagcactgctagaatggcacagcacggcaaaattttgtggagcttgtggagcaaaggctgtacctactgaagccgggaggcgtaagcagtgcagcaacgattcctgcaagaagaggatataccctagaattgatccggttgtgatcatgttggtcattgataaagaaaatgatcgggcactcttaagccgccagtcaagatttgtgcctcgtatgtggagttgtcttgctggtttcatagagccaggagaaagcctggaagaggcagtgagacgagaaacatgggaggaaactggtatcgaagttgggcaagtcgtttatcacagttctcaaccatggcctgttgggccaaatactatgccgtgtcaactgatggtgggcttctttgcttatgctaaatcattggagataaacgtggacaagcaggagcttgaagatgcccagtggcacaaccgcgaagacgtcaagaaagcgttgacgtttgctgaatacgagaaagcccagagaacaagcgctgccaaggtcgatcagatctgcaagggcgctgagaaagggcagaacccctctgccgacttcaaagttggaagcggcgagcctgctccaatgtttgtcccaggaccctacgccattgctcaccaccttatctcgtcgtgggctttcgagggagcaccgaagctgcctagttcattctcaaacctataagcctggaccctggtgttcagacagacgatgacaggaactggacccctgtgctgcgggctcatggatcacctgtgttgccgtgagtgtaattctgatagtgtgtgtccgttgccggttgtgataaaataaaatagcaatagagtactgggtacagaagacttgccggaggatttggcatcaatggacatgtatatccattgcctttttacatgttgatcctctttgtatcacacgtaatgttgcatacttgcatagatacaacaatgatatacatcacacagtgtactcatgcatttatacatgtattcagataactggattcaatagtagagtctttgtctgtctctctctctttttctcacatgtggtttgataattgctaca

SEQ ID NO: 79515 - DNA, 2351 bp, Zea Mays
atttcaatttaataaataagttatatgcaaggggcagctgttcactgcgaatgaacaaccagaggaagcctggagactggaactgcaagaactgccagcatctcaacttcagccgccgtgactactgccagcgttgccgtgatccacgccctgacttgcagttcggcgacggctatagcacggttggtgtgctgacctccctggacatccgcccaggtgactggtactgcagctgcggctaccacaacttcgccagccgcagcagctgcttcaagtgcggcacgatcgtcagagacttcccagcggggcaaggcgcagccggtgctgagggtgactttgctggtggacgcgacagcgccgcagtccgtgctgggtggaaagctggcgactggatctgcacgaggcctggttgcaacgtacacaactttgcgagcaggatggagtgctataggtgcaatgcaccaagggaggcagtttcagtttttaacaaatgggctggtaattccggaggcccatgtacaattggcccatgggtggcgcgtatagcccactaccacacaagtccacagcccgtcgttctggagtctggacccacatggcatggacacacgccgcctccgtccaatgatccaattcaatccaactacctaccttcactgcactgcactgcacctacccggctacccctgcggccttgccggggagtcggggacggggaaggaaacggcaacgagcctgcagctccagctaccccgaaaccccgtccaacgtccatggctatccacctccgggcccacgccttcgcggccaacccgctgcgtggcgtctccgccgccaccacctccatgtccccctccgcggccgccgaggcactccgctacctcctcgaccccagctccgccgccgccgccgccaatcccagccagtacctctccaagatccttcctttccgccggggccgcccgctcgcgcgctccacggaccctcccgcggtgccggcctggcgcctcgcgtggctcccgccgtcccgcgtccccggggtggccctggatgccttcgtcttcctgggcgcgctcgtcgagggggacggcaaggaagcctccgcgtactgggcggtcgacgtcagcgagggcgagggagccagggttggtgggccggcggacggggatgggccgtcggcgtttgtggacttgaggacgctcatggtggccacggactggagcgacaaggacgccatggcggagctcgccatcgcaggacatgctcgagcactgctagaatggcacagcacggcaaaattttgtggagcttgtggagcaaaggctgtacctactgaagccgggaggcgtaagcagtgcagcaacgattcctgcaagaagaggatataccctagaattgatccggttgtgatcatgttggtcattgataaagaaaatgatcgggcactcttaagccgccagtcaagatttgtgcctcgtatgtggagttgtcttgctggtttcatagagccaggagaaagcctggaagaggcagtgagacgagaaacatgggaggaaactggtatcgaagttgggcaagtcgtttatcacagttctcaaccatggcctgttgggccaaatactatgccgtgtcaactgatggtgggcttctttgcttatgctaaatcattggagataaacgtggacaagcaggagcttgaagatgcccagtggcacaaccgcgaagacgtcaagaaagcgttgacgtttgctgaatacgagaaagcccagagaacaagcgctgccaaggtcgatcagatctgcaagggcgctgagaaagggcagaacccctctgccgacttcaaagttggaagcggcgagcctgctccaatgtttgtcccaggaccctacgccattgctcaccaccttatctcgtcgtgggctttcgagggagcaccgaagctgcctagttcattctcaaacctataagcctggaccctggtgttcagacagacgatgacaggaactggacccctgtgctgcgggctcatggatcacctgtgttgccgtgagtgtaattctgatagtgtgtgtccgttgccggttgtgataaaataaaatagcaatagagtactgggtacagaagacttgccggaggatttggcatcaatggacatgtatatccattgcctttttacatgttgatcctctttgtatcacacgtaatgttgcatacttgcatagatacaacaatgatatacatcacacagtgtactcatgcatttatacatgtattcagataactggattcaatagtagagtctttgtctgtctctctctctttttctcacatgtggtttgataattgctaca

SEQ ID NO: 79516 - DNA, 2395 bp, Zea Mays
tttttagtttgctattgcatgtcgtacaagcatctaacaaaggctaaaaagatcaagggacctcacgtgtagctcctttagctgttcactgcgaatgaacaaccagaggaagcctggagactggaactgcaagaactgccagcatctcaacttcagccgccgtgactactgccagcgttgccgtgatccacgccctgacttgcagttcggcgacggctatagcacggttggtgtgctgacctccctggacatccgcccaggtgactggtactgcagctgcggctaccacaacttcgccagccgcagcagctgcttcaagtgcggcacgatcgtcagagacttcccagcggggcaaggcgcagccggtgctgagggtgactttgctggtggacgcgacagcgccgcagtccgtgctgggtggaaagctggcgactggatctgcacgaggcctggttgcaacgtacacaactttgcgagcaggatggagtgctataggtgcaatgcaccaagggaggcagtttcagtttttaacaaatgggctggtaattccggaggcccatgtacaattggcccatgggtggcgcgtatagcccactaccacacaagtccacagcccgtcgttctggagtctggacccacatggcatggacacacgccgcctccgtccaatgatccaattcaatccaactacctaccttcactgcactgcactgcacctacccggctacccctgcggccttgccggggagtcggggacggggaaggaaacggcaacgagcctgcagctccagctaccccgaaaccccgtccaacgtccatggctatccacctccgggcccacgccttcgcggccaacccgctgcgtggcgtctccgccgccaccacctccatgtccccctccgcggccgccgaggcactccgctacctcctcgaccccagctccgccgccgccgccgccaatcccagccagtacctctccaagatccttcctttccgccggggccgcccgctcgcgcgctccacggaccctcccgcggtgccggcctggcgcctcgcgtggctcccgccgtcccgcgtccccggggtggccctggatgccttcgtcttcctgggcgcgctcgtcgagggggacggcaaggaagcctccgcgtactgggcggtcgacgtcagcgagggcgagggagccagggttggtgggccggcggacggggatgggccgtcggcgtttgtggacttgaggacgctcatggtggccacggactggagcgacaaggacgccatggcggagctcgccatcgcaggacatgctcgagcactgctagaatggcacagcacggcaaaattttgtggagcttgtggagcaaaggctgtacctactgaagccgggaggcgtaagcagtgcagcaacgattcctgcaagaagaggatataccctagaattgatccggttgtgatcatgttggtcattgataaagaaaatgatcgggcactcttaagccgccagtcaagatttgtgcctcgtatgtggagttgtcttgctggtttcatagagccaggagaaagcctggaagaggcagtgagacgagaaacatgggaggaaactggtatcgaagttgggcaagtcgtttatcacagttctcaaccatggcctgttgggccaaatactatgccgtgtcaactgatggtgggcttctttgcttatgctaaatcattggagataaacgtggacaagcaggagcttgaagatgcccagtggcacaaccgcgaagacgtcaagaaagcgttgacgtttgctgaatacgagaaagcccagagaacaagcgctgccaaggtcgatcagatctgcaagggcgctgagaaagggcagaacccctctgccgacttcaaagttggaagcggcgagcctgctccaatgtttgtcccaggaccctacgccattgctcaccaccttatctcgtcgtgggctttcgagggagcaccgaagctgcctagttcattctcaaacctataagcctggaccctggtgttcagacagacgatgacaggaactggacccctgtgctgcgggctcatggatcacctgtgttgccgtgagtgtaattctgatagtgtgtgtccgttgccggttgtgataaaataaaatagcaatagagtactgggtacagaagacttgccggaggatttggcatcaatggacatgtatatccattgcctttttacatgttgatcctctttgtatcacacgtaatgttgcatacttgcatagatacaacaatgatatacatcacacagtgtactcatgcatttatacatgtattcagataactggattcaatagtagagtctttgtctgtctctctctctttttctcacatgtggtttgataattgctaca

SEQ ID NO: 79517 - DNA, 2354 bp, Zea Mays
aaaagatcaagggacctcacgtgtagctcctttagggcagctgttcactgcgaatgaacaaccagaggaagcctggagactggaactgcaagaactgccagcatctcaacttcagccgccgtgactactgccagcgttgccgtgatccacgccctgacttgcagttcggcgacggctatagcacggttggtgtgctgacctccctggacatccgcccaggtgactggtactgcagctgcggctaccacaacttcgccagccgcagcagctgcttcaagtgcggcacgatcgtcagagacttcccagcggggcaaggcgcagccggtgctgagggtgactttgctggtggacgcgacagcgccgcagtccgtgctgggtggaaagctggcgactggatctgcacgaggcctggttgcaacgtacacaactttgcgagcaggatggagtgctataggtgcaatgcaccaagggaggcagtttcagtttttaacaaatgggctggtaattccggaggcccatgtacaattggcccatgggtggcgcgtatagcccactaccacacaagtccacagcccgtcgttctggagtctggacccacatggcatggacacacgccgcctccgtccaatgatccaattcaatccaactacctaccttcactgcactgcactgcacctacccggctacccctgcggccttgccggggagtcggggacggggaaggaaacggcaacgagcctgcagctccagctaccccgaaaccccgtccaacgtccatggctatccacctccgggcccacgccttcgcggccaacccgctgcgtggcgtctccgccgccaccacctccatgtccccctccgcggccgccgaggcactccgctacctcctcgaccccagctccgccgccgccgccgccaatcccagccagtacctctccaagatccttcctttccgccggggccgcccgctcgcgcgctccacggaccctcccgcggtgccggcctggcgcctcgcgtggctcccgccgtcccgcgtccccggggtggccctggatgccttcgtcttcctgggcgcgctcgtcgagggggacggcaaggaagcctccgcgtactgggcggtcgacgtcagcgagggcgagggagccagggttggtgggccggcggacggggatgggccgtcggcgtttgtggacttgaggacgctcatggtggccacggactggagcgacaaggacgccatggcggagctcgccatcgcaggacatgctcgagcactgctagaatggcacagcacggcaaaattttgtggagcttgtggagcaaaggctgtacctactgaagccgggaggcgtaagcagtgcagcaacgattcctgcaagaagaggatataccctagaattgatccggttgtgatcatgttggtcattgataaagaaaatgatcgggcactcttaagccgccagtcaagatttgtgcctcgtatgtggagttgtcttgctggtttcatagagccaggagaaagcctggaagaggcagtgagacgagaaacatgggaggaaactggtatcgaagttgggcaagtcgtttatcacagttctcaaccatggcctgttgggccaaatactatgccgtgtcaactgatggtgggcttctttgcttatgctaaatcattggagataaacgtggacaagcaggagcttgaagatgcccagtggcacaaccgcgaagacgtcaagaaagcgttgacgtttgctgaatacgagaaagcccagagaacaagcgctgccaaggtcgatcagatctgcaagggcgctgagaaagggcagaacccctctgccgacttcaaagttggaagcggcgagcctgctccaatgtttgtcccaggaccctacgccattgctcaccaccttatctcgtcgtgggctttcgagggagcaccgaagctgcctagttcattctcaaacctataagcctggaccctggtgttcagacagacgatgacaggaactggacccctgtgctgcgggctcatggatcacctgtgttgccgtgagtgtaattctgatagtgtgtgtccgttgccggttgtgataaaataaaatagcaatagagtactgggtacagaagacttgccggaggatttggcatcaatggacatgtatatccattgcctttttacatgttgatcctctttgtatcacacgtaatgttgcatacttgcatagatacaacaatgatatacatcacacagtgtactcatgcatttatacatgtattcagataactggattcaatagtagagtctttgtctgtctctctctctttttctcacatgtggtttgataattgctaca

SEQ ID NO: 79518 - DNA, 637 bp, Zea Mays
gtttctgctcagtttcagcctggttgcaacgtacacaactttgcgagcaggatggagtgctataggtgcaatgcaccaagggaggcaggcaccgggaggtaagaggcgactggggtgataccaagagcgtgagatgtgacgagctggccgagcagtggaacctactgccgtcacacactcaccatcaggcatccaggaaggatgagtctactacgtacacgactatattgctgattgccgcgcgtagtgccgctgctgtggtttgcgtgggtggagaagtacccaagcgcaacacctgttacgtgtgttgtttgctcctttttgaggttgtgttgattcagtgacagctgagttgtacggcctgatgatgtactcgcattgtgtatttgtcttaaacagcatatataattatgtaataataagtgcttgcttatctatgctctgctgatgcatctgtcattctgtctccttgtattgtcaatgttttgctccttggatggttttcaaggtggtttagtctgatgtgggaccatcctagacgctcaacgtggcgtggcgtggcgccatatcaaccaccacgaggaaggtaaaatggactacgttgagcacagttcacgggtcaaatcgttttaccaaa

SEQ ID NO: 79519 - DNA, 597 bp, Zea Mays
cttgcacattagtgacattacactgaatgtgggaaattttataccaatctcacaagtacgcgaggacgtggcatctgcctacagaaaagaagaagaatggcgagcgagtaatatgctagttcctttccagaagatgtgtgctcagagaaaggtagaggccgaagctgttttacttgaatcagatgatgttgcttctgctataagcgaagagatagggaaattcaatatttgcaagttagttttaggttcttcatcaaagagcatatttcgaaggaaactcaaaggaagtaagactgcaaccaaaatatctgagtgcattccaagcttttgtacagcatatgttatttcaaaaggcaaactatcatttgtgcgctcagctacatctgatattgttgaaacgcctcgatctatatcctcttcaactatttcttcacctagcactagaagtctttcctcctgtgcaccttcaggagctgcgtcgcgggctggcgggcgtcgctctctctctcgagccacatggggctcggcgaggcagcatggccgtctgcgacggtgccggccaggggtccaggcaggcacagtggggttggcaacgac

SEQ ID NO: 79520 - DNA, 800 bp, Zea Mays
cacattagtgacattacactgaatgtgggaaattttataccaatctcacaagtacgcgaggacgtggcatctgcctacagaaaagaagaagaatggcgagcgagtaatatgctagttcctttccagaagatgtgtgctcagagaaaggtagaggccgaagctgttttacttgaatcagatgatgttgcttctgctataagcgaagagatagggaaattcaatatttgcaagttagttttaggttcttcatcaaagagcatatttcgaaggaaactcaaaggaagtaagactgcaaccaaaatatctgagtgcattccaagcttttgtacagcatatgttatttcaaaaggcaaactatcatttgtgcgctcagctacatctgatattgttgaaacgcctcgatctatatcctcttcaactatttcttcacctagcactagaagtctttcctcctgtgcaccttcagaatggggagacatatatgcaacaacaaatgtaccattgcatcaaccttccttgccattgcagcgtgatcaagcgttggcaatcataaacaagttgtcaaacaggagagttagctcttcgagcagtgttgtgagcgagatctcttacaatgatgagccggccctgacaaggtcacactccatgatatctgagatgcagttcagcagtggtagcagtggaaattctgtttacaagagcttccaaagggataatttgcctaacaactctgatgaggcatcagtttcagaaatttcagaaaatgtaaatcatctgagtggtcaggtatcccactcttt

SEQ ID NO: 79521 - DNA, 415 bp, Zea Mays
gcgagggtgccgcatgtgccggggtcgacggcggcaaccggaaacggctttggcgcgcggcaatgtgtcacacgcggcaagaatggggagacatatatgcaacaacaaatgtaccattgcatcaaccttccttgccattgcagcgtgatcaagcgttggcaatcataaacaagttgtcaaacaggagagttagctcttcgagcagtgttgtgagcgagatctcttacaatgatgagccggccctgacaaggtcacactccatgatatctgagatgcagttcagcagtggtagcagtggaaattctgtttacaagagcttccaaagggataatttgcctaacaactctgatgaggcatcagtttcagaaatttcagaaaatgtaaatcatctgagtggtcaggtatcccactcttt

SEQ ID NO: 79522 - DNA, 1451 bp, Zea Mays
tttcattcccattaactttcttcaccaatcaattagtagtagtacaaacaatcactcacgctgttatttctcaccaacccagcagcagcagaggttaggtgcgagctggttttacatgacactaacacggcgtccatcagggaaaaaaaaagcagacagccatcttttggtttgtttgtttgtttgttgctcgttcgtcgttttcagaaacccacccaactgatgaatgaattcatcgaagaaggaaagaacagaagaaaaaaaaaacaaatctcctctcgtctcctgattgattaattgtaattaattaattgattaattaccccaaccgccagtccaccacctgcgagatcctctcctaatcgtcgtcaatcaccatcttcttcgatctaaccttttttccacttgccatggcaagatcgaccgagcagcgagcaatgcatggatcggtcgacggacatggacgtgtgtcacggcggcatcagaagagttctctggtgacgagcggcggcgcggcggtgttccacgtgccctggctcgtccggtcaacggcggcggccgggaagaactggcagtggctgggcctgggcacgacgctgccgccaccggcggcgacggtaggcttggggtggcattgcggcgggggcggctggtggtggtggctagcggcggccgcgacgcggcggcaggacgggcacattgtgagggtggcggcggccgaggcgggctgcgcggcggccgacgacggcggcgcggccttgagcgccctgaggtcggccagctccttctcgaggcgcttgttctcgtcggcgaggcggtcgcaccagcgcttgaggtactcgcagtccacctccgtctgcttcagcttggtccgcgcgcggcggttctggaaccacacctccacctgccgcggccggaggcccaggcggttggccagctgcaccttctgcttctgcaacacccgagaccacacgacaaaaaaattatcagacacaccgccgggacaagatcgcatcgaacctgccgcgaccgacggcgaggaggaaagggtgggagggatgctagcttacggggttgagcgtgctgtgcgtcttgaagcactcctcgaggacggcggcctggtccttggagagcctgagcttcttgcgcccgccggcgccgccgtccgcgccgtcctcctcgtcgctgcggacgcctccggagccggtgcgctcgagctccccctccctctccctcttggcggtggtggtgtcgccgctgtcgggcgacgtggacgcgcgcatcgtcatcgcggcgccggcgtggtgctgcgcgtacgcgtcaccccgcgccctggcgacgtcggccacgacggagctcagcgcggctgcccagggggaggagccggcggtggtggtggaggaggagaggctgccctgggaggtgagggtgaggcgagggctcggcaacgg

SEQ ID NO: 79523 - DNA, 854 bp, Zea Mays
atgagattatgtgctcgcttttgttgaaggatgaatgtatgtagccaaccgtgcttcagacaagattacccaattgacagacaatgtgtacgtttgtcgctctggatctgctgctgatacacaagtcatttcggactatatacgttatttcctccaccaacacacaatccagcttggacaaccagctactgttaaagttgcagctaacttgattaggttgctagcttatcagaataagaacatgttgcaagctggcatgattgttggaggatgggataagtacgagggaggccaaattttctcagtccctcttggtggaacgatcttgaagcaaccatttgcaattggaggctcaggttccagttatctttatgcacttcttgatcatgaatggaaagagggaatgagccaggaagaggcagagaaatttgtggtgaaggtagtttcccttgctatggcccgtgatggtgctagcggaggggttgtccgtacagttacaataaatgcggatggcgtgaagaggaacttctaccctggcgacaagctacccctgtggcacgacgagctggagccccagaactcgttgcttgatattcttgctgccgggaaccctgatcccatggtgcagtgaatttgccctccacttccgttgtgaacttttcactgtacctgacttgttcttgatttcaaccgaagaaagaattggaacatttcctgtcgaactaatgtcgcgccagagtatttacatactgttgttatcacaccttagtaaattcatggttactactgctgtcgtcgttttatctgacgagtatgcgattttgtcagccgcctacttatatgcggtactgatg

SEQ ID NO: 79524 - DNA, 3792 bp, Zea Mays
agttctacttctcatcatcaccctggcccaacttggcccatacctcttcgatctctcagtctcaagtatggtagcttcggcagcgctccgccgggtccgctcctcgccgcacctacggcacgccgtcgcgtacgtatcttacggcagcgctgctgccacgtccgccgccgtggggctcgagcgcgcacaggatccaaaccgcctcatcgttgacctggctgcggcggggcgcgtgtgggacgcgcgcaagctgttcgacggaacgcccgagcgggacgtggtgtcctggacagcgctggtgtccgcgtacgcgcggcgggggatgctgcgcgacgcgcggtcgctgttcgaccgctccgacgcgcgccggaacgtggtgacctggacggcgctcctctcgggctacgcacgcgccggcctcgtcgacgaggccgaggtgctgttccagcggatgccccagaggaacgtcgtctcctggaacacgatgctggaggcttacgctgtggcgggaagggcgggtgatgcctgcgccctgttcgaccgcatgccagtcagggatgccggctcctggaacattctgctggccatgctagtgcggtcggggagcgtggataaggcgcgcgagctgtttggaagaatgccggagagggatgtaatggcttggacgacgatggttgacggcgttgcgcggagcggtaatgttgacgaggctcgattgttgtttgatagcatgccagagaggaatgtagtttcttggaatgccatgatatctgggtatacaagaaaccacaggcttgacgaggcactggatttgttcacgaagatgccccatagggatattgcttcttgcaacattatgatcactggttttatacaaaacaaagatttgaagagggcacggaagctctttgatgaaatgccagaaaggaatgttgtcacttggacgaccatgatgaatggttacttgaaaggcaagcagagcgagctgtcattggggttatttaggggtatgttaatgtcaggtatcagaccaaaccaagtgacatttttgggtgcacttgatgcatgcagcgatctggcgacactatgtgaagggaagcaggtgcatcaaatgatatgcaaaacagcatttcaggttgatacttttgtcggctctgccctgatgaatgtctatgcgaagtgtggtgaagttgggttggcaagaaagttgtttgatctttcaagggagaaggacttgatctcttggaatggaattattgcggcatatgcacaccatggtgttggcatagaagcaatccacttgtatgaaaagatgcaaggaaatggatataggcctaatgatgtcacctatgtggtgttgctctcagcatgtagccactctggtttggttgacgaagggcttaagatcttcgaatcaatggtaaatgatagatcaattgcagtgcgtgacgaacattatacttgtttgattgatctttgtagccgagcaggacgacttgatgatgccaaaagattaattcactatcttaagattaagcctgcatcaggttctgtctggagtgcccttctaggcgggtgtaatgcacatggaaatgagagcattggcaatttggcagctagaaatctcatacaagcagaacctgataacgctggaacctatactctcctatccaatatctatgcttcagctggtaagtggaaagaagcagcagaaattaggtcagagatgaataatcgaggactaaagaaacaacctggttgtagttggatagaggtggcaaataaggttcatgtgtttgtagcacgtgataagtctcacagtgaatctgatttaatctatggtttgctgcaaaatatccattacatgatgaggattgttggaactgtccccagtgaccttgtgcatgttgatgaggaattgatgatgtagtgtatattcagttacaagctgaagtatttcatttcaactgtatggattcagtcaaacaaagtaacatccagcattcaatctaagggcaaccctacgaaaacatcaggtagcaattccacttacatcactttgaggatacaagtacagtgtattcgcaaaaaaggtacagtgctttatgctactatgtttcatctatttcctgtttgcacttatatggctggattttgatgctagaaatttgaactgtggcgcaagccattcctcctgcaattgattggcaatatgtcagaagaggatctcttgacatgaacactagctgcaaagctgaatgcatatactgctgaactctgcgctgcaaatatgcaaaagagaattagctccaggattgatgagatctcaaagaaaggatggctcatcttgagggaaatttagatctattgttacaatacagaaacaagagaactgcatgattctgctgaaaaaaaggagtagttcggttgttcaccattgccatgatggcctcagtcatcctttcttcactttgctcacacatggtacatcctggatacgatcatacgaaatctagcttttggaaacatttggagctgttttaactgctcgaccgaagagacctctctttatcttcgttaggcccaaaggtgctttaacaagcccattaatgggaccaccttttggtccatacggcccgactgcctaccggcccaccagcaccaaccgtccgacacttcgtcccttcgagtagcccccacagggccacactgccgagcagcaaaccaaccagcccacccgccggttggtcacgctcctccccgatcccgaattcccgatctccggccgacgccatggcagccccctccgcggccgtcataggggtgctcgtcctcctcgtcgtgggggcctcgggcgcgcgcctcccaggccgcggcagcaccacccggggagctgcgctgccgcgcgggggagcgccggccacggcggtgttcgcgctgggaagcttctggcggtcggaggcggcgttcgggtgcctccacggcgtgatccgcacctccgtcggctacgctggcggctccaagtccaaccccgagtaccgcaacctcgccgaccacgccgagtgcgtcaagatctgtcatcttcactaatggaaccatcgaggccagattggctggtcttagcaaagaaaaagaacaagctaaagaccgtagcagcgttgttaccacacagatccaaccattgggggtctttcatcatgctgaaccagaacatcagaaatttgaactgaagcgtaaaccgttcctcttgcaattgattgggaatttgccggaggaggagctcctgacatcaacactagctgcaaaactgaatgcatatgccgctgagctctgccctgtgaatacccaaaagagaattaactccaagattgatgaggtcacaaagaaaggatggcccattttaagggacatttaactctttctagcttttggactgaaaccgatcgatgcaatgtagacacagaagaggtgcatgattttgcaaagaagatttttaggaatatttcagctgttcgccactgccatgatgacctcaatcatccattcttcattttgctcacaaagattatatagttggtcataacatgtcgttgtgttactatatttgtaacgcatattcatggttcgaagcttactcaacagacaactttttttcgtattgtttgtttttcatttatgaaaatatagatgttttgtttttatttaataggtattgtgcatgttgtgactgatgttgtactagtaaattgctcgcgcaaagtactgttaaattgaagatcatgctaacatgtg

SEQ ID NO: 79525 - DNA, 2926 bp, Zea Mays
agttctacttctcatcatcaccctggcccaacttggcccatacctcttcgatctctcagtctcaagtatggtagcttcggcagcgctccgccgggtccgctcctcgccgcacctacggcacgccgtcgcgtacgtatcttacggcagcgctgctgccacgtccgccgccgtggggctcgagcgcgcacaggatccaaaccgcctcatcgttgacctggctgcggcggggcgcgtgtgggacgcgcgcaagctgttcgacggaacgcccgagcgggacgtggtgtcctggacagcgctggtgtccgcgtacgcgcggcgggggatgctgcgcgacgcgcggtcgctgttcgaccgctccgacgcgcgccggaacgtggtgacctggacggcgctcctctcgggctacgcacgcgccggcctcgtcgacgaggccgaggtgctgttccagcggatgccccagaggaacgtcgtctcctggaacacgatgctggaggcttacgctgtggcgggaagggcgggtgatgcctgcgccctgttcgaccgcatgccagtcagggatgccggctcctggaacattctgctggccatgctagtgcggtcggggagcgtggataaggcgcgcgagctgtttggaagaatgccggagagggatgtaatggcttggacgacgatggttgacggcgttgcgcggagcggtaatgttgacgaggctcgattgttgtttgatagcatgccagagaggaatgtagtttcttggaatgccatgatatctgggtatacaagaaaccacaggcttgacgaggcactggatttgttcacgaagatgccccatagggatattgcttcttgcaacattatgatcactggttttatacaaaacaaagatttgaagagggcacggaagctctttgatgaaatgccagaaaggaatgttgtcacttggacgaccatgatgaatggttacttgaaaggcaagcagagcgagctgtcattggggttatttaggggtatgttaatgtcaggtatcagaccaaaccaagtgacatttttgggtgcacttgatgcatgcagcgatctggcgacactatgtgaagggaagcaggtgcatcaaatgatatgcaaaacagcatttcaggttgatacttttgtcggctctgccctgatgaatgtctatgcgaagtgtggtgaagttgggttggcaagaaagttgtttgatctttcaagggagaaggacttgatctcttggaatggaattattgcggcatatgcacaccatggtgttggcatagaagcaatccacttgtatgaaaagatgcaaggaaatggatataggcctaatgatgtcacctatgtggtgttgctctcagcatgtagccactctggtttggttgacgaagggcttaagatcttcgaatcaatggtaaatgatagatcaattgcagtgcgtgacgaacattatacttgtttgattgatctttgtagccgagcaggacgacttgatgatgccaaaagattaattcactatcttaagattaagcctgcatcaggttctgtctggagtgcccttctaggcgggtgtaatgcacatggaaatgagagcattggcaatttggcagctagaaatctcatacaagcagaacctgataacgctggaacctatactctcctatccaatatctatgcttcagctggtaagtggaaagaagcagcagaaattaggtcagagatgaataatcgaggactaaagaaacaacctggttgtagttggatagaggtggcaaataaggttcatgtgtttgtagcacgtgataagtctcacagtgaatctgatttaatctatggtttgctgcaaaatatccattacatgatgaggattgttggaactgtccccagtgaccttgtgcatgttgatgaggaattgatgatgtagtgtatattcagttacaagctgaagtatttcatttcaactgtatggattcagtcaaacaaagtaacatccagcattcaatctaagggcaaccctacgaaaacatcaggtagcaattccacttacatcactttgaggatacaagtacagtgtattcgcaaaaaaggttgagtatgatccccggttgattcactacaggcaacttttggatgtgttctgggcaagtcatgacccacgtgaggtgtttgggcaagggccagatgttggcaaccagtatagatctgtcatcttcactaatggaaccatcgaggccagattggctggtcttagcaaagaaaaagaacaagctaaagaccgtagcagcgttgttaccacacagatccaaccattgggggtctttcatcatgctgaaccagaacatcagaaatttgaactgaagcgtaaaccgttcctcttgcaattgattgggaatttgccggaggaggagctcctgacatcaacactagctgcaaaactgaatgcatatgccgctgagctctgccctgtgaatacccaaaagagaattaactccaagattgatgaggtcacaaagaaaggatggcccattttaagggacatttaactctttctagcttttggactgaaaccgatcgatgcaatgtagacacagaagaggtgcatgattttgcaaagaagatttttaggaatatttcagctgttcgccactgccatgatgacctcaatcatccattcttcattttgctcacaaagattatatagttggtcataacatgtcgttgtgttactatatttgtaacgcatattcatggttcgaagcttactcaacagacaactttttttcgtattgtttgtttttcatttatgaaaatatagatgttttgtttttatttaataggtattgtgcatgttgtgactgatgttgtactagtaaattgctcgcgcaaagtactgttaaattgaagatcatgctaacatgtg

SEQ ID NO: 79526 - DNA, 3777 bp, Zea Mays
agttctacttctcatcatcaccctggcccaacttggcccatacctcttcgatctctcagtctcaagtatggtagcttcggcagcgctccgccgggtccgctcctcgccgcacctacggcacgccgtcgcgtacgtatcttacggcagcgctgctgccacgtccgccgccgtggggctcgagcgcgcacaggatccaaaccgcctcatcgttgacctggctgcggcggggcgcgtgtgggacgcgcgcaagctgttcgacggaacgcccgagcgggacgtggtgtcctggacagcgctggtgtccgcgtacgcgcggcgggggatgctgcgcgacgcgcggtcgctgttcgaccgctccgacgcgcgccggaacgtggtgacctggacggcgctcctctcgggctacgcacgcgccggcctcgtcgacgaggccgaggtgctgttccagcggatgccccagaggaacgtcgtctcctggaacacgatgctggaggcttacgctgtggcgggaagggcgggtgatgcctgcgccctgttcgaccgcatgccagtcagggatgccggctcctggaacattctgctggccatgctagtgcggtcggggagcgtggataaggcgcgcgagctgtttggaagaatgccggagagggatgtaatggcttggacgacgatggttgacggcgttgcgcggagcggtaatgttgacgaggctcgattgttgtttgatagcatgccagagaggaatgtagtttcttggaatgccatgatatctgggtatacaagaaaccacaggcttgacgaggcactggatttgttcacgaagatgccccatagggatattgcttcttgcaacattatgatcactggttttatacaaaacaaagatttgaagagggcacggaagctctttgatgaaatgccagaaaggaatgttgtcacttggacgaccatgatgaatggttacttgaaaggcaagcagagcgagctgtcattggggttatttaggggtatgttaatgtcaggtatcagaccaaaccaagtgacatttttgggtgcacttgatgcatgcagcgatctggcgacactatgtgaagggaagcaggtgcatcaaatgatatgcaaaacagcatttcaggttgatacttttgtcggctctgccctgatgaatgtctatgcgaagtgtggtgaagttgggttggcaagaaagttgtttgatctttcaagggagaaggacttgatctcttggaatggaattattgcggcatatgcacaccatggtgttggcatagaagcaatccacttgtatgaaaagatgcaaggaaatggatataggcctaatgatgtcacctatgtggtgttgctctcagcatgtagccactctggtttggttgacgaagggcttaagatcttcgaatcaatggtaaatgatagatcaattgcagtgcgtgacgaacattatacttgtttgattgatctttgtagccgagcaggacgacttgatgatgccaaaagattaattcactatcttaagattaagcctgcatcaggttctgtctggagtgcccttctaggcgggtgtaatgcacatggaaatgagagcattggcaatttggcagctagaaatctcatacaagcagaacctgataacgctggaacctatactctcctatccaatatctatgcttcagctggtaagtggaaagaagcagcagaaattaggtcagagatgaataatcgaggactaaagaaacaacctggttgtagttggatagaggtggcaaataaggttcatgtgtttgtagcacgtgataagtctcacagtgaatctgatttaatctatggtttgctgcaaaatatccattacatgatgaggattgttggaactgtccccagtgaccttgtgcatgttgatgaggaattgatgatgtagtgtatattcagttacaagctgaagtatttcatttcaactgtatggattcagtcaaacaaagtaacatccagcattcaatctaagggcaaccctacgaaaacatcagaaatttgaactgtggcgcaagccattcctcctgcaattgattggcaatatgtcagaagaggatctcttgacatgaacactagctgcaaagctgaatgcatatactgctgaactctgcgctgcaaatatgcaaaagagaattagctccaggattgatgagatctcaaagaaaggatggctcatcttgagggaaatttagatctattgttacaatacagaaacaagagaactgcatgattctgctgaaaaaaaggagtagttcggttgttcaccattgccatgatggcctcagtcatcctttcttcactttgctcacacatggtacatcctggatacgatcatacgaaatctagcttttggaaacatttggagctgttttaactgctcgaccgaagagacctctctttatcttcgttaggcccaaaggtgctttaacaagcccattaatgggaccaccttttggtccatacggcccgactgcctaccggcccaccagcaccaaccgtccgacacttcgtcccttcgagtagcccccacagggccacactgccgagcagcaaaccaaccagcccacccgccggttggtcacgctcctccccgatcccgaattcccgatctccggccgacgccatggcagccccctccgcggccgtcataggggtgctcgtcctcctcgtcgtgggggcctcgggcgcgcgcctcccaggccgcggcagcaccacccggggagctgcgctgccgcgcgggggagcgccggccacggcggtgttcgcgctgggaagcttctggcggtcggaggcggcgttcgggtgcctccacggcgtgatccgcacctccgtcggctacgctggcggctccaagtccaaccccgagtaccgcaacctcgccgaccacgccgagtgcgtcaaggttgagtatgatccccggttgattcactacaggcaacttttggatgtgttctgggcaagtcatgacccacgtgaggtgtttgggcaagggccagatgttggcaaccagtatagatctgtcatcttcactaatggaaccatcgaggccagattggctggtcttagcaaagaaaaagaacaagctaaagaccgtagcagcgttgttaccacacagatccaaccattgggggtctttcatcatgctgaaccagaacatcagaaatttgaactgaagcgtaaaccgttcctcttgcaattgattgggaatttgccggaggaggagctcctgacatcaacactagctgcaaaactgaatgcatatgccgctgagctctgccctgtgaatacccaaaagagaattaactccaagattgatgaggtcacaaagaaaggatggcccattttaagggacatttaactctttctagcttttggactgaaaccgatcgatgcaatgtagacacagaagaggtgcatgattttgcaaagaagatttttaggaatatttcagctgttcgccactgccatgatgacctcaatcatccattcttcattttgctcacaaagattatatagttggtcataacatgtcgttgtgttactatatttgtaacgcatattcatggttcgaagcttactcaacagacaactttttttcgtattgtttgtttttcatttatgaaaatatagatgttttgtttttatttaataggtattgtgcatgttgtgactgatgttgtactagtaaattgctcgcgcaaagtactgttaaattgaagatcatgctaacatgtg

SEQ ID NO: 79527 - DNA, 3974 bp, Zea Mays
agttctacttctcatcatcaccctggcccaacttggcccatacctcttcgatctctcagtctcaagtatggtagcttcggcagcgctccgccgggtccgctcctcgccgcacctacggcacgccgtcgcgtacgtatcttacggcagcgctgctgccacgtccgccgccgtggggctcgagcgcgcacaggatccaaaccgcctcatcgttgacctggctgcggcggggcgcgtgtgggacgcgcgcaagctgttcgacggaacgcccgagcgggacgtggtgtcctggacagcgctggtgtccgcgtacgcgcggcgggggatgctgcgcgacgcgcggtcgctgttcgaccgctccgacgcgcgccggaacgtggtgacctggacggcgctcctctcgggctacgcacgcgccggcctcgtcgacgaggccgaggtgctgttccagcggatgccccagaggaacgtcgtctcctggaacacgatgctggaggcttacgctgtggcgggaagggcgggtgatgcctgcgccctgttcgaccgcatgccagtcagggatgccggctcctggaacattctgctggccatgctagtgcggtcggggagcgtggataaggcgcgcgagctgtttggaagaatgccggagagggatgtaatggcttggacgacgatggttgacggcgttgcgcggagcggtaatgttgacgaggctcgattgttgtttgatagcatgccagagaggaatgtagtttcttggaatgccatgatatctgggtatacaagaaaccacaggcttgacgaggcactggatttgttcacgaagatgccccatagggatattgcttcttgcaacattatgatcactggttttatacaaaacaaagatttgaagagggcacggaagctctttgatgaaatgccagaaaggaatgttgtcacttggacgaccatgatgaatggttacttgaaaggcaagcagagcgagctgtcattggggttatttaggggtatgttaatgtcaggtatcagaccaaaccaagtgacatttttgggtgcacttgatgcatgcagcgatctggcgacactatgtgaagggaagcaggtgcatcaaatgatatgcaaaacagcatttcaggttgatacttttgtcggctctgccctgatgaatgtctatgcgaagtgtggtgaagttgggttggcaagaaagttgtttgatctttcaagggagaaggacttgatctcttggaatggaattattgcggcatatgcacaccatggtgttggcatagaagcaatccacttgtatgaaaagatgcaaggaaatggatataggcctaatgatgtcacctatgtggtgttgctctcagcatgtagccactctggtttggttgacgaagggcttaagatcttcgaatcaatggtaaatgatagatcaattgcagtgcgtgacgaacattatacttgtttgattgatctttgtagccgagcaggacgacttgatgatgccaaaagattaattcactatcttaagattaagcctgcatcaggttctgtctggagtgcccttctaggcgggtgtaatgcacatggaaatgagagcattggcaatttggcagctagaaatctcatacaagcagaacctgataacgctggaacctatactctcctatccaatatctatgcttcagctggtaagtggaaagaagcagcagaaattaggtcagagatgaataatcgaggactaaagaaacaacctggttgtagttggatagaggtggcaaataaggttcatgtgtttgtagcacgtgataagtctcacagtgaatctgatttaatctatggtttgctgcaaaatatccattacatgatgaggattgttggaactgtccccagtgaccttgtgcatgttgatgaggaattgatgatgtagtgtatattcagttacaagctgaagtatttcatttcaactgtatggattcagtcaaacaaagtaacatccagcattcaatctaagggcaaccctacgaaaacatcaggtagcaattccacttacatcactttgaggatacaagtacagtgtattcgcaaaaaaggtacagtgctttatgctactatgtttcatctatttcctgtttgcacttatatggctggattttgatgctagaaatttgaactgtggcgcaagccattcctcctgcaattgattggcaatatgtcagaagaggatctcttgacatgaacactagctgcaaagctgaatgcatatactgctgaactctgcgctgcaaatatgcaaaagagaattagctccaggattgatgagatctcaaagaaaggatggctcatcttgagggaaatttagatctattgttacaatacagaaacaagagaactgcatgattctgctgaaaaaaaggagtagttcggttgttcaccattgccatgatggcctcagtcatcctttcttcactttgctcacacatggtacatcctggatacgatcatacgaaatctagcttttggaaacatttggagctgttttaactgctcgaccgaagagacctctctttatcttcgttaggcccaaaggtgctttaacaagcccattaatgggaccaccttttggtccatacggcccgactgcctaccggcccaccagcaccaaccgtccgacacttcgtcccttcgagtagcccccacagggccacactgccgagcagcaaaccaaccagcccacccgccggttggtcacgctcctccccgatcccgaattcccgatctccggccgacgccatggcagccccctccgcggccgtcataggggtgctcgtcctcctcgtcgtgggggcctcgggcgcgcgcctcccaggccgcggcagcaccacccggggagctgcgctgccgcgcgggggagcgccggccacggcggtgttcgcgctgggaagcttctggcggtcggaggcggcgttcgggtgcctccacggcgtgatccgcacctccgtcggctacgctggcggctccaagtccaaccccgagtaccgcaacctcgccgaccacgccgagttgagtatgatccccggttgattcactacaggcaacttttggatgtgttctgggcaagtcatgacccacgtgaggtgtttgggcaagggccagatgttggcaaccagtatagatctgtcatcttcactaatggaaccatcgaggccagattggctggtcttagcaaagaaaaagaacaagctaaagaccgtagcagcgttgttaccacacagatccaaccattgggggtctttcatcatgctgaaccagaacatcaggtagcaaggatccaaatgcaattcattgtgctacttttatttcctgtttgcatttatatgagctgaatttctgcgccagaaatttgaactgaagcgtaaaccgttcctcttgcaattgattgggaatttgccggaggaggagctcctgacatcaacactagctgcaaaactgaatgcatatgccgctgagctctgccctgtgaatacccaaaagagaattaactccaagattgatgaggtcacaaagaaaggatggcccattttaagggacatttaactctttctagcttttggactgaaaccgatcgatgcaatgtagacacagaagaggtgcatgattttgcaaagaagatttttaggaatatttcagctgttcgccactgccatgatgacctcaatcatccattcttcattttgctcacaaagattatatagttggtcataacatgtcgttgtgttactatatttgtaacgcatattcatggttcgaagcttactcaacagacaactttttttcgtattgtttgtttttcatttatgaaaatatagatgttttgtttttatttaataggtattgtgcatgttgtgactgatgttgtactagtaaattgctcgcgcaaagtactgttaaattgaagatcatgctaacatgtg

SEQ ID NO: 79528 - DNA, 3317 bp, Zea Mays
agttctacttctcatcatcaccctggcccaacttggcccatacctcttcgatctctcagtctcaagtatggtagcttcggcagcgctccgccgggtccgctcctcgccgcacctacggcacgccgtcgcgtacgtatcttacggcagcgctgctgccacgtccgccgccgtggggctcgagcgcgcacaggatccaaaccgcctcatcgttgacctggctgcggcggggcgcgtgtgggacgcgcgcaagctgttcgacggaacgcccgagcgggacgtggtgtcctggacagcgctggtgtccgcgtacgcgcggcgggggatgctgcgcgacgcgcggtcgctgttcgaccgctccgacgcgcgccggaacgtggtgacctggacggcgctcctctcgggctacgcacgcgccggcctcgtcgacgaggccgaggtgctgttccagcggatgccccagaggaacgtcgtctcctggaacacgatgctggaggcttacgctgtggcgggaagggcgggtgatgcctgcgccctgttcgaccgcatgccagtcagggatgccggctcctggaacattctgctggccatgctagtgcggtcggggagcgtggataaggcgcgcgagctgtttggaagaatgccggagagggatgtaatggcttggacgacgatggttgacggcgttgcgcggagcggtaatgttgacgaggctcgattgttgtttgatagcatgccagagaggaatgtagtttcttggaatgccatgatatctgggtatacaagaaaccacaggcttgacgaggcactggatttgttcacgaagatgccccatagggatattgcttcttgcaacattatgatcactggttttatacaaaacaaagatttgaagagggcacggaagctctttgatgaaatgccagaaaggaatgttgtcacttggacgaccatgatgaatggttacttgaaaggcaagcagagcgagctgtcattggggttatttaggggtatgttaatgtcaggtatcagaccaaaccaagtgacatttttgggtgcacttgatgcatgcagcgatctggcgacactatgtgaagggaagcaggtgcatcaaatgatatgcaaaacagcatttcaggttgatacttttgtcggctctgccctgatgaatgtctatgcgaagtgtggtgaagttgggttggcaagaaagttgtttgatctttcaagggagaaggacttgatctcttggaatggaattattgcggcatatgcacaccatggtgttggcatagaagcaatccacttgtatgaaaagatgcaaggaaatggatataggcctaatgatgtcacctatgtggtgttgctctcagcatgtagccactctggtttggttgacgaagggcttaagatcttcgaatcaatggtaaatgatagatcaattgcagtgcgtgacgaacattatacttgtttgattgatctttgtagccgagcaggacgacttgatgatgccaaaagattaattcactatcttaagattaagcctgcatcaggttctgtctggagtgcccttctaggcgggtgtaatgcacatggaaatgagagcattggcaatttggcagctagaaatctcatacaagcagaacctgataacgctggaacctatactctcctatccaatatctatgcttcagctggtaagtggaaagaagcagcagaaattaggtcagagatgaataatcgaggactaaagaaacaacctggttgtagttggatagaggtggcaaataaggttcatgtgtttgtagcacgtgataagtctcacagtgaatctgatttaatctatggtttgctgcaaaatatccattacatgatgaggattgttggaactgtccccagtgaccttgtgcatgttgatgaggaattgatgatgtagtgtatattcagttacaagctgaagtatttcatttcaactgtatggattcagtcaaacaaagtaacatccagcattcaatctaagggcaaccctacgaaaacatcaggtagcaattccacttacatcactttgaggatacaagtacagtgtattcgcaaaaaaggtacagtgctttatgctactatgtttcatctatttcctgtttgcacttatatggctggattttgatgctagaaatttgaactgtggcgcaagccattcctcctgcaattgattggcaatatgtcagaagaggatctcttgacatgaacactagctgcaaagctgaatgcatatactgctgaactctgcgctgcaaatatgcaaaagagaattagctccaggattgatgagatctcaaagaaaggatggctcatcttgagggaaatttagatctattgttacaatacagaaacaagagaactgcatgattctgctgaaaaaaaggagtagttcggttgttcaccattgccatgatggcctcagtcatcctttcttcactttgctcacacatggttgagtatgatccccggttgattcactacaggcaacttttggatgtgttctgggcaagtcatgacccacgtgaggtgtttgggcaagggccagatgttggcaaccagtatagatctgtcatcttcactaatggaaccatcgaggccagattggctggtcttagcaaagaaaaagaacaagctaaagaccgtagcagcgttgttaccacacagatccaaccattgggggtctttcatcatgctgaaccagaacatcagaaatttgaactgaagcgtaaaccgttcctcttgcaattgattgggaatttgccggaggaggagctcctgacatcaacactagctgcaaaactgaatgcatatgccgctgagctctgccctgtgaatacccaaaagagaattaactccaagattgatgaggtcacaaagaaaggatggcccattttaagggacatttaactctttctagcttttggactgaaaccgatcgatgcaatgtagacacagaagaggtgcatgattttgcaaagaagatttttaggaatatttcagctgttcgccactgccatgatgacctcaatcatccattcttcattttgctcacaaagattatatagttggtcataacatgtcgttgtgttactatatttgtaacgcatattcatggttcgaagcttactcaacagacaactttttttcgtattgtttgtttttcatttatgaaaatatagatgttttgtttttatttaataggtattgtgcatgttgtgactgatgttgtactagtaaattgctcgcgcaaagtactgttaaattgaagatcatgctaacatgtg

SEQ ID NO: 79529 - DNA, 3154 bp, Zea Mays
gtttatttaactttttttaaaataaatggagcaataaaaatacaaaagatattgctcaattggacctggcaacactatcccctttcgccggcgccgctcccgctccgtcccacccgcgctctccagtctccacggatcgatcgaagcttccgtcttccggcgcgatgttcccgtgccgccccttggctccgccgcacctgccgcgtgccccttccctcgcgcggcttccactgtcgtcgctgcggccgccgtcgtcgtcgctgcgcgtggtgcggtgcatggcgaaggagcggcgggtacggatggtggcgaagcagatccagcgggagctcgccgacatgctcacccgcgaccccgtgctgcagcgcgccgtgctccccgaagccgcgctcggcgctgaccgctacctgtcgtcgctcaccaccatcgccgacgtcgagctctccaacgacctccaggtgtgcaaagtgtacgtgtccgtgtttggggacgagagggggaagaaggtggccatcgaggggctcaaggccaagaccaagtacgtcaggagccagataggcaggaggatgaagcttcgcctcacgccggagataaggttcatcgaggatgagtctatggagcgtggaagcaggatccttgctatacttgacaaactaaaggaggaaagggagcaacaagaaggaaaagatggagaggaagatgatgattcatatatatcagaagaagatgatggtgactgggatgcagatgagccagatgaggaggacatcatttacgtaaaatagcccattgtcttctaggaacttggccatcattcatccagaacacagcagttctcttcagagtttaattctgtgaagttcactgctcgcctgcttgtcgaagcactccaaagtatatcagcacttgaagaggtctacactctacagagacatctcttttgccaattgaagcaggacatatcacacccttgctgccatttagaagctggtcatgtccttttttatggcttttcaatgcgggggatatttcaaagaggaatttggaagtctttttttttcctgtccactgaattatgatatctgaccattgacgcaagacagtttgggctgatgctcattcctctgttatgttaactagcacttgtttaatttgtacttgcctagttatcttgctgtatttcagtctccatttcttctatggttttggtacagtatttcctctttctataagccattatgtaatagagtagcatcagtatgattttaatgataatttatcactctctcatctgatctaacaaaaacgatctggacaaagttacataaggcaaatcagtccttgagttcctaaggcaaattgtgtgccctaattgatttgatctgctgtggttgtgctgctatggttattcaggtgaccatcaggagaagcatggcttgccatttttcagctcttaattttattcactccgacaattcttttaggtttcaacttttcccagggaacatttcaatgagctaggagagaattgtgaaagcttatgagcacttttgtgatccagactgctgcatgctcctacttgtttttgacagatgttacgaacactggacaaactatttgctatcgtgtgattttgcaatggttgtttaagggctcatctgtcttgagcaatcagtacacatctaaagaggatgaggttctcgttacaagcacagaatccagccacagttgcctagtgccctagtcatttctgtagtctgcagtgcatgacacatcagtcatgatgaaaaggacaaaaaatgaagtagttaaaaggaaaggaggataagccataagcatcaaaggtcaagcaagtagtctcaaaggtgccgctgtcaccgagatctcgaacagtgcaagacaaagcaggaaaactgataaaagttggcatgagatgaaacggttgtcttagtatcttttagtaggaattgtactaatgcctgcattgcgctttcccacgataaagccatagatggcaccgacagttggagctatcagctagctctgcagttaaattaggtggtccgcctgcaactgcaagtgccacaccgatagaggatatggttcttttccgagactgcggcaccgacgttctcgcggatcgagccttcgacatgggacgtgcctggagaacgacggcagtagggcactgcgactctgctagtctgccctctgcactgccccctttcacttttcgtgcaacatacctttgcttgctttgagcctatgacatggcacgtgccagagcaacgcatctgtccttgggtcgcttgcagctgcagctcgtcctgtatgtgtttctgcaaccgagcgttccggagctcttggatcctgtgctctgcgtcatatactcgtggtatattgttaaaactgtcggcagatctgatcgacccatttggatctgtacaagtcgcgttctctgcaacccgtggactcgtgcctcggtttgggggaatctatatggggtgtggattggaattccgtggcagatacgaaaagggcaccaactggcaactgggcaccaggtcagtgcatggggatcatggaacggaacggaaaccaagtccggtctccggtgctcccggcggccggtcaaccgtgctcgtgcctgcctctcccccagtccagctcgcacatcgcacccttgcttttgccatctcaagcaaagctacggatctgactaaaggtagcctacgcgagctggttgacacttcagcgatgccctcatctcgcaattctcatacatagtttcatattattgactttatgatatgtgagattgaggatatggaccatatggttttggttggtattaaggctcattgtcagccaccctacgcaaaatacaagcctgattattaatcatccctagtgggcccttacactcaacaactgtggcagtggatacagagtttacatgccccctaattggtgatgggcgcccatccaggagcttgttctctcagccgctatgactgtgacatctctaaggctctatttgtttcacttcattttgaggaattggaatctaactaatgtattagatatttttttaatgtaacatttcataactttctgaagtttatatataagcctatctaaaaatcattgggtg

SEQ ID NO: 79530 - DNA, 2858 bp, Zea Mays
gtttatttaactttttttaaaataaatggagcaataaaaatacaaaagatattgctcaattggacctggcaacactatcccctttcgccggcgccgctcccgctccgtcccacccgcgctctccagtctccacggatcgatcgaagcttccgtcttccggcgcgatgttcccgtgccgccccttggctccgccgcacctgccgcgtgccccttccctcgcgcggcttccactgtcgtcgctgcggccgccgtcgtcgtcgctgcgcgtggtgcggtgcatggcgaaggagcggcgggtacggatggtggcgaagcagatccagcgggagctcgccgacatgctcacccgcgaccccgtgctgcagcgcgccgtgctccccgaagccgcgctcggcgctgaccgctacctgtcgtcgctcaccaccatcgccgacgtcgagctctccaacgacctccaggtgtgcaaagtgtacgtgtccgtgtttggggacgagagggggaagaaggtggccatcgaggggctcaaggccaagaccaagtacgtcaggagccagataggcaggaggatgaagcttcgcctcacgccggagataaggttcatcgaggatgagtctatggagcgtggaagcaggatccttgctatacttgacaaactaaaggaggaaagggagcaacaagaaggaaaagatggagaggaagatgatgattcatatatatcagaagaagatgatggtgactgggatgcagatgagccagatgaggaggacatcatttacgtaaaatagcccattgtcttctaggaacttggccatcattcatccagaacacagcagttctcttcagagtttaattctgtgaagttcactgctcgcctgcttgtcgaagcactccaaagtatatcagcacttgaagaggtctacactctacagagacatctcttttgccaattgaagcaggacatatcacacccttgctgccatttagaagctggtcatgtccttttttatggcttttcaatgcgggggatatttcaaagaggaatttggaagtctttttttttcctgtccactgaattatgatatctgaccattgacgcaagacagtttgggctgatgctcattcctctgttatgttaactagcacttgtttaatttgtacttgcctagttatcttgctgtatttcagtctccatttcttctatggttttggtacagtatttcctctttctataagccattatgtaatagagtagcatcagtatgattttaatgataatttatcactctctcatctgatctaacaaaaacgatctggacaaagttacataaggcaaatcagtccttgagttcctaaggcaaattgtgtgccctaattgatttgatctgctgtggttgtgctgctatggttattcaggtgaccatcaggagaagcatggcttgccatttttcagctcttaattttattcactccgacaattcttttaggtttcaacttttcccagggaacatttcaatgagctaggagagaattgtgaaagcttatgagcacttttgtgatccagactgctgcatgctcctacttgtttttgacagatgttacgaacactggacaaactatttgctatcgtgtgattttgcaatggttgtttaagggctcatctgtcttgagcaatcagtacacatctaaagaggatgaggttctcgttacaagcacagatggcaccgacagttggagctatcagctagctctgcagttaaattaggtggtccgcctgcaactgcaagtgccacaccgatagaggatatggttcttttccgagactgcggcaccgacgttctcgcggatcgagccttcgacatgggacgtgcctggagaacgacggcagtagggcactgcgactctgctagtctgccctctgcactgccccctttcacttttcgtgcaacatacctttgcttgctttgagcctatgacatggcacgtgccagagcaacgcatctgtccttgggtcgcttgcagctgcagctcgtcctgtatgtgtttctgcaaccgagcgttccggagctcttggatcctgtgctctgcgtcatatactcgtggtatattgttaaaactgtcggcagatctgatcgacccatttggatctgtacaagtcgcgttctctgcaacccgtggactcgtgcctcggtttgggggaatctatatggggtgtggattggaattccgtggcagatacgaaaagggcaccaactggcaactgggcaccaggtcagtgcatggggatcatggaacggaacggaaaccaagtccggtctccggtgctcccggcggccggtcaaccgtgctcgtgcctgcctctcccccagtccagctcgcacatcgcacccttgcttttgccatctcaagcaaagctacggatctgactaaaggtagcctacgcgagctggttgacacttcagcgatgccctcatctcgcaattctcatacatagtttcatattattgactttatgatatgtgagattgaggatatggaccatatggttttggttggtattaaggctcattgtcagccaccctacgcaaaatacaagcctgattattaatcatccctagtgggcccttacactcaacaactgtggcagtggatacagagtttacatgccccctaattggtgatgggcgcccatccaggagcttgttctctcagccgctatgactgtgacatctctaaggctctatttgtttcacttcattttgaggaattggaatctaactaatgtattagatatttttttaatgtaacatttcataactttctgaagtttatatataagcctatctaaaaatcattgggtg

SEQ ID NO: 79531 - DNA, 3092 bp, Zea Mays
acctggcaacactatcccctttcgccggcgccgctcccgctccgtcccacccgcgctctccagtctccacggatcgatcgaagcttccgtcttccggcgcgatgttcccgtgccgccccttggctccgccgcacctgccgcgtgccccttccctcgcgcggcttccactgtcgtcgctgcggccgccgtcgtcgtcgctgcgcgtggtgcggtgcatggcgaaggagcggcgggtacggatggtggcgaagcagatccagcgggagctcgccgacatgctcacccgcgaccccgtgctgcagcgcgccgtgctccccgaagccgcgctcggcgctgaccgctacctgtcgtcgctcaccaccatcgccgacgtcgagctctccaacgacctccaggtgtgcaaagtgtacgtgtccgtgtttggggacgagagggggaagaaggtggccatcgaggggctcaaggccaagaccaagtacgtcaggagccagataggcaggaggatgaagcttcgcctcacgccggagataaggttcatcgaggatgagtctatggagcgtggaagcaggatccttgctatacttgacaaactaaaggaggaaagggagcaacaagaaggaaaagatggagaggaagatgatgattcatatatatcagaagaagatgatggtgactgggatgcagatgagccagatgaggaggacatcatttacgtaaaatagcccattgtcttctaggaacttggccatcattcatccagaacacagcagttctcttcagagtttaattctgtgaagttcactgctcgcctgcttgtcgaagcactccaaagtatatcagcacttgaagaggtctacactctacagagacatctcttttgccaattgaagcaggacatatcacacccttgctgccatttagaagctggtcatgtccttttttatggcttttcaatgcgggggatatttcaaagaggaatttggaagtctttttttttcctgtccactgaattatgatatctgaccattgacgcaagacagtttgggctgatgctcattcctctgttatgttaactagcacttgtttaatttgtacttgcctagttatcttgctgtatttcagtctccatttcttctatggttttggtacagtatttcctctttctataagccattatgtaatagagtagcatcagtatgattttaatgataatttatcactctctcatctgatctaacaaaaacgatctggacaaagttacataaggcaaatcagtccttgagttcctaaggcaaattgtgtgccctaattgatttgatctgctgtggttgtgctgctatggttattcaggtgaccatcaggagaagcatggcttgccatttttcagctcttaattttattcactccgacaattcttttaggtttcaacttttcccagggaacatttcaatgagctaggagagaattgtgaaagcttatgagcacttttgtgatccagactgctgcatgctcctacttgtttttgacagatgttacgaacactggacaaactatttgctatcgtgtgattttgcaatggttgtttaagggctcatctgtcttgagcaatcagtacacatctaaagaggatgaggttctcgttacaagcacaggaatccagccacagttgcctagtgccctagtcatttctgtagtctgcagtgcatgacacatcagtcatgatgaaaaggacaaaaaatgaagtagttaaaaggaaaggaggataagccataagcatcaaaggtcaagcaagtagtctcaaaggtgccgctgtcaccgagatctcgaacagtgcaagacaaagcaggaaaactgataaaagttggcatgagatgaaacggttgtcttagtatcttttagtaggaattgtactaatgcctgcattgcgctttcccacgataaagccatagatggcaccgacagttggagctatcagctagctctgcagttaaattaggtggtccgcctgcaactgcaagtgccacaccgatagaggatatggttcttttccgagactgcggcaccgacgttctcgcggatcgagccttcgacatgggacgtgcctggagaacgacggcagtagggcactgcgactctgctagtctgccctctgcactgccccctttcacttttcgtgcaacatacctttgcttgctttgagcctatgacatggcacgtgccagagcaacgcatctgtccttgggtcgcttgcagctgcagctcgtcctgtatgtgtttctgcaaccgagcgttccggagctcttggatcctgtgctctgcgtcatatactcgtggtatattgttaaaactgtcggcagatctgatcgacccatttggatctgtacaagtcgcgttctctgcaacccgtggactcgtgcctcggtttgggggaatctatatggggtgtggattggaattccgtggcagatacgaaaagggcaccaactggcaactgggcaccaggtcagtgcatggggatcatggaacggaacggaaaccaagtccggtctccggtgctcccggcggccggtcaaccgtgctcgtgcctgcctctcccccagtccagctcgcacatcgcacccttgcttttgccatctcaagcaaagctacggatctgactaaaggtagcctacgcgagctggttgacacttcagcgatgccctcatctcgcaattctcatacatagtttcatattattgactttatgatatgtgagattgaggatatggaccatatggttttggttggtattaaggctcattgtcagccaccctacgcaaaatacaagcctgattattaatcatccctagtgggcccttacactcaacaactgtggcagtggatacagagtttacatgccccctaattggtgatgggcgcccatccaggagcttgttctctcagccgctatgactgtgacatctctaaggctctatttgtttcacttcattttgaggaattggaatctaactaatgtattagatatttttttaatgtaacatttcataactttctgaagtttatatataagcctatctaaaaatcattgggtg

SEQ ID NO: 79532 - DNA, 3996 bp, Zea Mays
acctggcaacactatcccctttcgccggcgccgctcccgctccgtcccacccgcgctctccagtctccacggatcgatcgaagcttccgtcttccggcgcgatgttcccgtgccgccccttggctccgccgcacctgccgcgtgccccttccctcgcgcggcttccactgtcgtcgctgcggccgccgtcgtcgtcgctgcgcgtggtgcggtgcatggcgaaggagcggcgggtacggatggtggcgaagcagatccagcgggagctcgccgacatgctcacccgcgaccccgtgctgcagcgcgccgtgctccccgaagccgcgctcggcgctgaccgctacctgtcgtcgctcaccaccatcgccgacgtcgagctctccaacgacctccaggtgtgcaaagtgtacgtgtccgtgtttggggacgagagggggaagaaggtggccatcgaggggctcaaggccaagaccaagtacgtcaggagccagataggcaggaggatgaagcttcgcctcacgccggagataaggttcatcgaggatgagtctatggagcgtggaagcaggatccttgctatacttgacaaactaaaggaggaaagggagcaacaagaaggaaaagatggagaggaagatgatgattcatatatatcagaagaagatgatggtgactgggatgcagatgagccagatgaggaggacatcatttacgtaaaatagcccattgtcttctaggaacttggccatcattcatccagaacacagcagttctcttcagagtttaattctgtgaagttcactgctcgcctgcttgtcgaagcactccaaagtatatcagcacttgaagaggtctacactctacagagacatctcttttgccaattgaagcaggacatatcacacccttgctgccatttagaagctggtcatgtccttttttatggcttttcaatgcgggggatatttcaaagaggaatttggaagtctttttttttcctgtccactgaattatgatatctgaccattgacgcaagacagtttgggctgatgctcattcctctgttatgttaactagcacttgtttaatttgtacttgcctagttatcttgctgtatttcagtctccatttcttctatggttttggtacagtatttcctctttctataagccattatgtaatagagtagcatcagtatgattttaatgataatttatcactctctcatctgatctaacaaaaacgatctggacaaagttacataaggcaaatcagtccttgagttcctaaggcaaattgtgtgccctaattgatttgatctgctgtggttgtgctgctatggttattcaggtgaccatcaggagaagcatggcttgccatttttcagctcttaattttattcactccgacaattcttttaggtttcaacttttcccagggaacatttcaatgagctaggagagaattgtgaaagcttatgagcacttttgtgatccagactgctgcatgctcctacttgtttttgacagatgttacgaacactggacaaactatttgctatcgtgtgattttgcaatggttgtttaagggctcatctgtcttgagcaatcagtacacatctaaagaggatgaggttctcgttacaagcacagggcaggagaaaagcatggtttttaaggcgtcatctaggcgacgcctaggcgtccaggcgctcaaaaactctgggcgtccaccatcgccatacagaatgagacagggaggatggagagggaagcagcggcggcgctagacggagcttgaaggagagggcgacggtgttacgttccggcgacaactttggagggagcttgaagggtagggtagcagcgctagagggagattgaaggggtgggcagagggcggcggcgtgagggatcaggtcagcagcgtagggaattttttagatgagatgggagggatgggcatatgggctgggatggtgggctacctaagtgggctggtaggccttttataataaggcgtcaccttgcctctccttgccgtcgcctaggcgtccggaaggtggtggaacgcagcacctcgctttaacgctttaataactatggagaaaagtgcctacagaaacatcagttgagtttcagctattgtcattagatggataaaatgtggaaggtactgaatggctctccagtaaggactgatttggtgaccagggaattggatggatccatgggcatggatcccatataattccctggtcacaaaaccagccctaagtgtgcacccaacactgcactttgttgggaaaaaagcccaaagggtttactcaagccaattcaagaagagtaagcatgtaagcctgaagaaatcaatgaagatgataaaactttaaactcgtccagaatgatgagcttgttactgttaacaaagggaagactcgagctcaactaaccacccaggatcaaactgctttgtcttaactcaatactaagagcccttttggcagcttggaacagttccgatgctcacgtgaaactccagaatcgctgccaaacggaatccagccacagttgcctagtgccctagtcatttctgtagtctgcagtgcatgacacatcagtcatgatgaaaaggacaaaaaatgaagtagttaaaaggaaaggaggataagccataagcatcaaaggtcaagcaagtagtctcaaaggtgccgctgtcaccgagatctcgaacagtgcaagacaaagcaggaaaactgataaaagttggcatgagatgaaacggttgtcttagtatcttttagtaggaattgtactaatgcctgcattgcgctttcccacgataaagccatagatggcaccgacagttggagctatcagctagctctgcagttaaattaggtggtccgcctgcaactgcaagtgccacaccgatagaggatatggttcttttccgagactgcggcaccgacgttctcgcggatcgagccttcgacatgggacgtgcctggagaacgacggcagtagggcactgcgactctgctagtctgccctctgcactgccccctttcacttttcgtgcaacatacctttgcttgctttgagcctatgacatggcacgtgccagagcaacgcatctgtccttgggtcgcttgcagctgcagctcgtcctgtatgtgtttctgcaaccgagcgttccggagctcttggatcctgtgctctgcgtcatatactcgtggtatattgttaaaactgtcggcagatctgatcgacccatttggatctgtacaagtcgcgttctctgcaacccgtggactcgtgcctcggtttgggggaatctatatggggtgtggattggaattccgtggcagatacgaaaagggcaccaactggcaactgggcaccaggtcagtgcatggggatcatggaacggaacggaaaccaagtccggtctccggtgctcccggcggccggtcaaccgtgctcgtgcctgcctctcccccagtccagctcgcacatcgcacccttgcttttgccatctcaagcaaagctacggatctgactaaaggtagcctacgcgagctggttgacacttcagcgatgccctcatctcgcaattctcatacatagtttcatattattgactttatgatatgtgagattgaggatatggaccatatggttttggttggtattaaggctcattgtcagccaccctacgcaaaatacaagcctgattattaatcatccctagtgggcccttacactcaacaactgtggcagtggatacagagtttacatgccccctaattggtgatgggcgcccatccaggagcttgttctctcagccgctatgactgtgacatctctaaggctctatttgtttcacttcattttgaggaattggaatctaactaatgtattagatatttttttaatgtaacatttcataactttctgaagtttatatataagcctatctaaaaatcattgggtg

SEQ ID NO: 79533 - DNA, 4240 bp, Zea Mays
acctggcaacactatcccctttcgccggcgccgctcccgctccgtcccacccgcgctctccagtctccacggatcgatcgaagcttccgtcttccggcgcgatgttcccgtgccgccccttggctccgccgcacctgccgcgtgccccttccctcgcgcggcttccactgtcgtcgctgcggccgccgtcgtcgtcgctgcgcgtggtgcggtgcatggcgaaggagcggcgggtacggatggtggcgaagcagatccagcgggagctcgccgacatgctcacccgcgaccccgtgctgcagcgcgccgtgctccccgaagccgcgctcggcgctgaccgctacctgtcgtcgctcaccaccatcgccgacgtcgagctctccaacgacctccaggtgtgcaaagtgtacgtgtccgtgtttggggacgagagggggaagaaggtggccatcgaggggctcaaggccaagaccaagtacgtcaggagccagataggcaggaggatgaagcttcgcctcacgccggagataaggttcatcgaggatgagtctatggagcgtggaagcaggatccttgctatacttgacaaactaaaggaggaaagggagcaacaagaaggaaaagatggagaggaagatgatgattcatatatatcagaagaagatgatggtgactgggatgcagatgagccagatgaggaggacatcatttacgtaaaatagcccattgtcttctaggaacttggccatcattcatccagaacacagcagttctcttcagagtttaattctgtgaagttcactgctcgcctgcttgtcgaagcactccaaagtatatcagcacttgaagaggtctacactctacagagacatctcttttgccaattgaagcaggacatatcacacccttgctgccatttagaagctggtcatgtccttttttatggcttttcaatgcgggggatatttcaaagaggaatttggaagtctttttttttcctgtccactgaattatgatatctgaccattgacgcaagacagtttgggctgatgctcattcctctgttatgttaactagcacttgtttaatttgtacttgcctagttatcttgctgtatttcagtctccatttcttctatggttttggtacagtatttcctctttctataagccattatgtaatagagtagcatcagtatgattttaatgataatttatcactctctcatctgatctaacaaaaacgatctggacaaagttacataaggcaaatcagtccttgagttcctaaggcaaattgtgtgccctaattgatttgatctgctgtggttgtgctgctatggttattcaggtgaccatcaggagaagcatggcttgccatttttcagctcttaattttattcactccgacaattcttttaggtttcaacttttcccagggaacatttcaatgagctaggagagaattgtgaaagcttatgagcacttttgtgatccagactgctgcatgctcctacttgtttttgacagatgttacgaacactggacaaactatttgctatcgtgtgattttgcaatggttgtttaagggctcatctgtcttgagcaatcagtacacatctaaagaggatgaggttctcgttacaagcacagggcaggagaaaagcatggtttttaaggcgtcatctaggcgacgcctaggcgtccaggcgctcaaaaactctgggcgtccaccatcgccatacagaatgagacagggaggatggagagggaagcagcggcggcgctagacggagcttgaaggagagggcgacggtgttacgttccggcgacaactttggagggagcttgaagggtagggtagcagcgctagagggagattgaaggggtgggcagagggcggcggcgtgagggatcaggtcagcagcgtagggaattttttagatgagatgggagggatgggcatatgggctgggatggtgggctacctaagtgggctggtaggccttttataataaggcgtcaccttgcctctccttgccgtcgcctaggcgtccggaaggtggtggaacgcagcacctcgctttaacgctttaataactatggagaaaagtgcctacagaaacatcagttgagtttcagctattgtcattagatggataaaatgtggaaggtactgaatggctctccagtaaggactgatttggtgaccagggaattggatggatccatgggcatggatcccatataattccctggtcacaaaaccagccctaagtgtgcacccaacactgcactttgttgggaaaaaagcccaaagggtttactcaagccaattcaagaagagtaagcatgtaagcctgaagaaatcaatgaagatgataaaactttaaactcgtccagaatgatgagcttgttactgttaacaaagggaagactcgagctcaactaaccacccaggatcaaactgctttgtcttaactcaatactaagagcccttttggcagcttggaacagttccgatgctcacgtgaaactccagaatcgctgccaaacgggtaggtagtacagaaacgtttcactgaaccgattcatctttttctgcctgtactgggagagccagaaatggacgagtagtttcacctgattccgtttcttggctcccctctctactagcaaccataatttcagttaatcattttaagtgcaacgagctaattgctctccccccattaaaaatgttatgcatttttaagcatgttttatttatatgattttttaatgaaaacatttttttaccagaatccagccacagttgcctagtgccctagtcatttctgtagtctgcagtgcatgacacatcagtcatgatgaaaaggacaaaaaatgaagtagttaaaaggaaaggaggataagccataagcatcaaaggtcaagcaagtagtctcaaaggtgccgctgtcaccgagatctcgaacagtgcaagacaaagcaggaaaactgataaaagttggcatgagatgaaacggttgtcttagtatcttttagtaggaattgtactaatgcctgcattgcgctttcccacgataaagccatagatggcaccgacagttggagctatcagctagctctgcagttaaattaggtggtccgcctgcaactgcaagtgccacaccgatagaggatatggttcttttccgagactgcggcaccgacgttctcgcggatcgagccttcgacatgggacgtgcctggagaacgacggcagtagggcactgcgactctgctagtctgccctctgcactgccccctttcacttttcgtgcaacatacctttgcttgctttgagcctatgacatggcacgtgccagagcaacgcatctgtccttgggtcgcttgcagctgcagctcgtcctgtatgtgtttctgcaaccgagcgttccggagctcttggatcctgtgctctgcgtcatatactcgtggtatattgttaaaactgtcggcagatctgatcgacccatttggatctgtacaagtcgcgttctctgcaacccgtggactcgtgcctcggtttgggggaatctatatggggtgtggattggaattccgtggcagatacgaaaagggcaccaactggcaactgggcaccaggtcagtgcatggggatcatggaacggaacggaaaccaagtccggtctccggtgctcccggcggccggtcaaccgtgctcgtgcctgcctctcccccagtccagctcgcacatcgcacccttgcttttgccatctcaagcaaagctacggatctgactaaaggtagcctacgcgagctggttgacacttcagcgatgccctcatctcgcaattctcatacatagtttcatattattgactttatgatatgtgagattgaggatatggaccatatggttttggttggtattaaggctcattgtcagccaccctacgcaaaatacaagcctgattattaatcatccctagtgggcccttacactcaacaactgtggcagtggatacagagtttacatgccccctaattggtgatgggcgcccatccaggagcttgttctctcagccgctatgactgtgacatctctaaggctctatttgtttcacttcattttgaggaattggaatctaactaatgtattagatatttttttaatgtaacatttcataactttctgaagtttatatataagcctatctaaaaatcattgggtg

SEQ ID NO: 79534 - DNA, 3960 bp, Zea Mays
acctggcaacactatcccctttcgccggcgccgctcccgctccgtcccacccgcgctctccagtctccacggatcgatcgaagcttccgtcttccggcgcgatgttcccgtgccgccccttggctccgccgcacctgccgcgtgccccttccctcgcgcggcttccactgtcgtcgctgcggccgccgtcgtcgtcgctgcgcgtggtgcggtgcatggcgaaggagcggcgggtacggatggtggcgaagcagatccagcgggagctcgccgacatgctcacccgcgaccccgtgctgcagcgcgccgtgctccccgaagccgcgctcggcgctgaccgctacctgtcgtcgctcaccaccatcgccgacgtcgagctctccaacgacctccaggtgtgcaaagtgtacgtgtccgtgtttggggacgagagggggaagaaggtggccatcgaggggctcaaggccaagaccaagtacgtcaggagccagataggcaggaggatgaagcttcgcctcacgccggagataaggttcatcgaggatgagtctatggagcgtggaagcaggatccttgctatacttgacaaactaaaggaggaaagggagcaacaagaaggaaaagatggagaggaagatgatgattcatatatatcagaagaagatgatggtgactgggatgcagatgagccagatgaggaggacatcatttacgtaaaatagcccattgtcttctaggaacttggccatcattcatccagaacacagcagttctcttcagagtttaattctgtgaagttcactgctcgcctgcttgtcgaagcactccaaagtatatcagcacttgaagaggtctacactctacagagacatctcttttgccaattgaagcaggacatatcacacccttgctgccatttagaagctggtcatgtccttttttatggcttttcaatgcgggggatatttcaaagaggaatttggaagtctttttttttcctgtccactgaattatgatatctgaccattgacgcaagacagtttgggctgatgctcattcctctgttatgttaactagcacttgtttaatttgtacttgcctagttatcttgctgtatttcagtctccatttcttctatggttttggtacagtatttcctctttctataagccattatgtaatagagtagcatcagtatgattttaatgataatttatcactctctcatctgatctaacaaaaacgatctggacaaagttacataaggcaaatcagtccttgagttcctaaggcaaattgtgtgccctaattgatttgatctgctgtggttgtgctgctatggttattcaggtgaccatcaggagaagcatggcttgccatttttcagctcttaattttattcactccgacaattcttttagatgttacgaacactggacaaactatttgctatcgtgtgattttgcaatggttgtttaagggctcatctgtcttgagcaatcagtacacatctaaagaggatgaggttctcgttacaagcacaggtaacacaactgacctggtaatccttttaacatattagcttattgaatctaatttcctttccccgatgagacatttcttgaatatactgcattccttcacgttgttgaagagtgttagttagatatctgctgtctttttcttcacactattgctgttatcttttcttgctgtcatgctatatatttgttgctttggcgatttactgaaatccaaaataaacacattttctaataaacccaggtttaaacccttgtaatggccatatcttttttagactttaggcataccaggtgtttacctgaagctataacttatgcacatgataaattgtatgaactaggcctactcatctaaacattttgttttaggcaggagaaaagcatggtttttaaggcgtcatctaggcgacgcctaggcgtccaggcgctcaaaaactctgggcgtccaccatcgccatacagaatgagacagggaggatggagagggaagcagcggcggcgctagacggagcttgaaggagagggcgacggtgttacgttccggcgacaactttggagggagcttgaagggtagggtagcagcgctagagggagattgaaggggtgggcagagggcggcggcgtgagggatcaggtcagcagcgtagggaattttttagatgagatgggagggatgggcatatgggctgggatggtgggctacctaagtgggctggtaggccttttataataaggcgtcaccttgcctctccttgccgtcgcctaggcgtccggaaggtggtggaacgcagcacctcgctttaacgctttaataactatggagaaaagtgcctacagaaacatcagttgagtttcagctattgtcattagatggataaaatgtggaaggtactgaatggctctccagtaaggactgatttggtgaccagggaattggatggatccatgggcatggatcccatataattccctggtcacaaaaccagccctaagtgtgcacccaacactgcactttgttgggaaaaaagcccaaagggtttactcaagccaattcaagaagagtaagcatgtaagcctgaagaaatcaatgaagatgataaaactttaaactcgtccagaatgatgagcttgttactgttaacaaagggaagactcgagctcaactaaccacccaggatcaaactgctttgtcttaactcaatactaagagcccttttggcagcttggaacagttccgatgctcacgtgaaactccagaatcgctgccaaacggatggcaccgacagttggagctatcagctagctctgcagttaaattaggtggtccgcctgcaactgcaagtgccacaccgatagaggatatggttcttttccgagactgcggcaccgacgttctcgcggatcgagccttcgacatgggacgtgcctggagaacgacggcagtagggcactgcgactctgctagtctgccctctgcactgccccctttcacttttcgtgcaacatacctttgcttgctttgagcctatgacatggcacgtgccagagcaacgcatctgtccttgggtcgcttgcagctgcagctcgtcctgtatgtgtttctgcaaccgagcgttccggagctcttggatcctgtgctctgcgtcatatactcgtggtatattgttaaaactgtcggcagatctgatcgacccatttggatctgtacaagtcgcgttctctgcaacccgtggactcgtgcctcggtttgggggaatctatatggggtgtggattggaattccgtggcagatacgaaaagggcaccaactggcaactgggcaccaggtcagtgcatggggatcatggaacggaacggaaaccaagtccggtctccggtgctcccggcggccggtcaaccgtgctcgtgcctgcctctcccccagtccagctcgcacatcgcacccttgcttttgccatctcaagcaaagctacggatctgactaaaggtagcctacgcgagctggttgacacttcagcgatgccctcatctcgcaattctcatacatagtttcatattattgactttatgatatgtgagattgaggatatggaccatatggttttggttggtattaaggctcattgtcagccaccctacgcaaaatacaagcctgattattaatcatccctagtgggcccttacactcaacaactgtggcagtggatacagagtttacatgccccctaattggtgatgggcgcccatccaggagcttgttctctcagccgctatgactgtgacatctctaaggctctatttgtttcacttcattttgaggaattggaatctaactaatgtattagatatttttttaatgtaacatttcataactttctgaagtttatatataagcctatctaaaaatcattgggtg

SEQ ID NO: 79535 - DNA, 3569 bp, Zea Mays
acctggcaacactatcccctttcgccggcgccgctcccgctccgtcccacccgcgctctccagtctccacggatcgatcgaagcttccgtcttccggcgcgatgttcccgtgccgccccttggctccgccgcacctgccgcgtgccccttccctcgcgcggcttccactgtcgtcgctgcggccgccgtcgtcgtcgctgcgcgtggtgcggtgcatggcgaaggagcggcgggtacggatggtggcgaagcagatccagcgggagctcgccgacatgctcacccgcgaccccgtgctgcagcgcgccgtgctccccgaagccgcgctcggcgctgaccgctacctgtcgtcgctcaccaccatcgccgacgtcgagctctccaacgacctccaggtgtgcaaagtgtacgtgtccgtgtttggggacgagagggggaagaaggtggccatcgaggggctcaaggccaagaccaagtacgtcaggagccagataggcaggaggatgaagcttcgcctcacgccggagataaggttcatcgaggatgagtctatggagcgtggaagcaggatccttgctatacttgacaaactaaaggaggaaagggagcaacaagaaggaaaagatggagaggaagatgatgattcatatatatcagaagaagatgatggtgactgggatgcagatgagccagatgaggaggacatcatttacgtaaaatagcccattgtcttctaggaacttggccatcattcatccagaacacagcagttctcttcagagtttaattctgtgaagttcactgctcgcctgcttgtcgaagcactccaaagtatatcagcacttgaagaggtgaccatcaggagaagcatggcttgccatttttcagctcttaattttattcactccgacaattcttttaggtttcaacttttcccagggaacatttcaatgagctaggagagaattgtgaaagcttatgagcacttttgtgatccagactgctgcatgctcctacttgtttttgacagatgttacgaacactggacaaactatttgctatcgtgtgattttgcaatggttgtttaagggctcatctgtcttgagcaatcagtacacatctaaagaggatgaggttctcgttacaagcacaggtaacacaactgacctggtaatccttttaacatattagcttattgaatctaatttcctttccccgatgagacatttcttgaatatactgcattccttcacgttgttgaagagtgttagttagatatctgctgtctttttcttcacactattgctgttatcttttcttgctgtcatgctatatatttgttgctttggcgatttactgaaatccaaaataaacacattttctaataaacccaggtttaaacccttgtaatggccatatcttttttagactttaggcataccaggtgtttacctgaagctataacttatgcacatgataaattgtatgaactaggcctactcatctaaacattttgttttaggcaggagaaaagcatggtttttaaggcgtcatctaggcgacgcctaggcgtccaggcgctcaaaaactctgggcgtccaccatcgccatacagaatgagacagggaggatggagagggaagcagcggcggcgctagacggagcttgaaggagagggcgacggtgttacgttccggcgacaactttggagggagcttgaagggtagggtagcagcgctagagggagattgaaggggtgggcagagggcggcggcgtgagggatcaggtcagcagcgtagggaattttttagatgagatgggagggatgggcatatgggctgggatggtgggctacctaagtgggctggtaggccttttataataaggcgtcaccttgcctctccttgccgtcgcctaggcgtccggaaggtggtggaacgcagcacctcgctttaacgctttaataactatggagaaaagtgcctacagaaacatcagttgagtttcagctattgtcattagatggataaaatgtggaaggtactgaatggctctccagtaaggactgatttggtgaccagggaattggatggatccatgggcatggatcccatataattccctggtcacaaaaccagccctaagtgtgcacccaacactgcactttgttgggaaaaaagcccaaagggtttactcaagccaattcaagaagagtaagcatgtaagcctgaagaaatcaatgaagatgataaaactttaaactcgtccagaatgatgagcttgttactgttaacaaagggaagactcgagctcaactaaccacccaggatcaaactgctttgtcttaactcaatactaagagcccttttggcagcttggaacagttccgatgctcacgtgaaactccagaatcgctgccaaacggatggcaccgacagttggagctatcagctagctctgcagttaaattaggtggtccgcctgcaactgcaagtgccacaccgatagaggatatggttcttttccgagactgcggcaccgacgttctcgcggatcgagccttcgacatgggacgtgcctggagaacgacggcagtagggcactgcgactctgctagtctgccctctgcactgccccctttcacttttcgtgcaacatacctttgcttgctttgagcctatgacatggcacgtgccagagcaacgcatctgtccttgggtcgcttgcagctgcagctcgtcctgtatgtgtttctgcaaccgagcgttccggagctcttggatcctgtgctctgcgtcatatactcgtggtatattgttaaaactgtcggcagatctgatcgacccatttggatctgtacaagtcgcgttctctgcaacccgtggactcgtgcctcggtttgggggaatctatatggggtgtggattggaattccgtggcagatacgaaaagggcaccaactggcaactgggcaccaggtcagtgcatggggatcatggaacggaacggaaaccaagtccggtctccggtgctcccggcggccggtcaaccgtgctcgtgcctgcctctcccccagtccagctcgcacatcgcacccttgcttttgccatctcaagcaaagctacggatctgactaaaggtagcctacgcgagctggttgacacttcagcgatgccctcatctcgcaattctcatacatagtttcatattattgactttatgatatgtgagattgaggatatggaccatatggttttggttggtattaaggctcattgtcagccaccctacgcaaaatacaagcctgattattaatcatccctagtgggcccttacactcaacaactgtggcagtggatacagagtttacatgccccctaattggtgatgggcgcccatccaggagcttgttctctcagccgctatgactgtgacatctctaaggctctatttgtttcacttcattttgaggaattggaatctaactaatgtattagatatttttttaatgtaacatttcataactttctgaagtttatatataagcctatctaaaaatcattgggtg

SEQ ID NO: 79536 - DNA, 4439 bp, Zea Mays
acctggcaacactatcccctttcgccggcgccgctcccgctccgtcccacccgcgctctccagtctccacggatcgatcgaagcttccgtcttccggcgcgatgttcccgtgccgccccttggctccgccgcacctgccgcgtgccccttccctcgcgcggcttccactgtcgtcgctgcggccgccgtcgtcgtcgctgcgcgtggtgcggtgcatggcgaaggagcggcgggtacggatggtggcgaagcagatccagcgggagctcgccgacatgctcacccgcgaccccgtgctgcagcgcgccgtgctccccgaagccgcgctcggcgctgaccgctacctgtcgtcgctcaccaccatcgccgacgtcgagctctccaacgacctccaggtgtgcaaagtgtacgtgtccgtgtttggggacgagagggggaagaaggtggccatcgaggggctcaaggccaagaccaagtacgtcaggagccagataggcaggaggatgaagcttcgcctcacgccggagataaggttcatcgaggatgagtctatggagcgtggaagcaggatccttgctatacttgacaaactaaaggaggaaagggagcaacaagaaggaaaagatggagaggaagatgatgattcatatatatcagaagaagatgatggtgactgggatgcagatgagccagatgaggaggacatcatttacgtaaaatagcccattgtcttctaggaacttggccatcattcatccagaacacagcagttctcttcagagtttaattctgtgaagttcactgctcgcctgcttgtcgaagcactccaaagtatatcagcacttgaagaggtctacactctacagagacatctcttttgccaattgaagcaggacatatcacacccttgctgccatttagaagctggtcatgtccttttttatggcttttcaatgcgggggatatttcaaagaggaatttggaagtctttttttttcctgtccactgaattatgatatctgaccattgacgcaagacagtttgggctgatgctcattcctctgttatgttaactagcacttgtttaatttgtacttgcctagttatcttgctgtatttcagtctccatttcttctatggttttggtacagtatttcctctttctataagccattatgtaatagagtagcatcagtatgattttaatgataatttatcactctctcatctgatctaacaaaaacgatctggacaaagttacataaggcaaatcagtccttgagttcctaaggcaaattgtgtgccctaattgatttgatctgctgtggttgtgctgctatggttattcaggtgaccatcaggagaagcatggcttgccatttttcagctcttaattttattcactccgacaattcttttaggtttcaacttttcccagggaacatttcaatgagctaggagagaattgtgaaagcttatgagcacttttgtgatccagactgctgcatgctcctacttgtttttgacagatgttacgaacactggacaaactatttgctatcgtgtgattttgcaatggttgtttaagggctcatctgtcttgagcaatcagtacacatctaaagaggatgaggttctcgttacaagcacaggtaacacaactgacctggtaatccttttaacatattagcttattgaatctaatttcctttccccgatgagacatttcttgaatatactgcattccttcacgttgttgaagagtgttagttagatatctgctgtctttttcttcacactattgctgttatcttttcttgctgtcatgctatatatttgttgctttggcgatttactgaaatccaaaataaacacattttctaataaacccaggtttaaacccttgtaatggccatatcttttttagactttaggcataccaggtgtttacctgaagctataacttatgcacatgataaattgtatgaactaggcctactcatctaaacattttgttttaggcaggagaaaagcatggtttttaaggcgtcatctaggcgacgcctaggcgtccaggcgctcaaaaactctgggcgtccaccatcgccatacagaatgagacagggaggatggagagggaagcagcggcggcgctagacggagcttgaaggagagggcgacggtgttacgttccggcgacaactttggagggagcttgaagggtagggtagcagcgctagagggagattgaaggggtgggcagagggcggcggcgtgagggatcaggtcagcagcgtagggaattttttagatgagatgggagggatgggcatatgggctgggatggtgggctacctaagtgggctggtaggccttttataataaggcgtcaccttgcctctccttgccgtcgcctaggcgtccggaaggtggtggaacgcagcacctcgctttaacgctttaataactatggagaaaagtgcctacagaaacatcagttgagtttcagctattgtcattagatggataaaatgtggaaggtactgaatggctctccagtaaggactgatttggtgaccagggaattggatggatccatgggcatggatcccatataattccctggtcacaaaaccagccctaagtgtgcacccaacactgcactttgttgggaaaaaagcccaaagggtttactcaagccaattcaagaaggtaaccactggaatactggatatcctacatttaatgttttgatgagaacaatatcagctgagctcatttctgcagagtaagcatgtaagcctgaagaaatcaatgaagatgataaaactttaaactcgtccagaatgatgagcttgttactgttaacaaagggaagactcgagctcaactaaccacccaggatcaaactgctttgtcttaactcaatactaagagcccttttggcagcttggaacagttccgatgctcacgtgaaactccagaatcgctgccaaacggaatccagccacagttgcctagtgccctagtcatttctgtagtctgcagtgcatgacacatcagtcatgatgaaaaggacaaaaaatgaagtagttaaaaggaaaggaggataagccataagcatcaaaggtcaagcaagtagtctcaaaggtgccgctgtcaccgagatctcgaacagtgcaagacaaagcaggaaaactgataaaagttggcatgagatgaaacggttgtcttagtatcttttagtaggaattgtactaatgcctgcattgcgctttcccacgataaagccatagatggcaccgacagttggagctatcagctagctctgcagttaaattaggtggtccgcctgcaactgcaagtgccacaccgatagaggatatggttcttttccgagactgcggcaccgacgttctcgcggatcgagccttcgacatgggacgtgcctggagaacgacggcagtagggcactgcgactctgctagtctgccctctgcactgccccctttcacttttcgtgcaacatacctttgcttgctttgagcctatgacatggcacgtgccagagcaacgcatctgtccttgggtcgcttgcagctgcagctcgtcctgtatgtgtttctgcaaccgagcgttccggagctcttggatcctgtgctctgcgtcatatactcgtggtatattgttaaaactgtcggcagatctgatcgacccatttggatctgtacaagtcgcgttctctgcaacccgtggactcgtgcctcggtttgggggaatctatatggggtgtggattggaattccgtggcagatacgaaaagggcaccaactggcaactgggcaccaggtcagtgcatggggatcatggaacggaacggaaaccaagtccggtctccggtgctcccggcggccggtcaaccgtgctcgtgcctgcctctcccccagtccagctcgcacatcgcacccttgcttttgccatctcaagcaaagctacggatctgactaaaggtagcctacgcgagctggttgacacttcagcgatgccctcatctcgcaattctcatacatagtttcatattattgactttatgatatgtgagattgaggatatggaccatatggttttggttggtattaaggctcattgtcagccaccctacgcaaaatacaagcctgattattaatcatccctagtgggcccttacactcaacaactgtggcagtggatacagagtttacatgccccctaattggtgatgggcgcccatccaggagcttgttctctcagccgctatgactgtgacatctctaaggctctatttgtttcacttcattttgaggaattggaatctaactaatgtattagatatttttttaatgtaacatttcataactttctgaagtttatatataagcctatctaaaaatcattgggtg

SEQ ID NO: 79537 - DNA, 1272 bp, Zea Mays
cttgtattgaggggcttccagtgtgctttttccctcgatctcgtgtgatctgagtgtgagaaggcttatagtgtgcttgaggttcttcgacctctctataattcccctaagatactggaacaaaagattctagatgatggtacgacaaattattttaggagtgctttgccataatttaaagcttggaagggagctttctatgatttatttttctgactgtttcgtcacatgttctttccctagatgaaagtattgatttatttttggttctgcaggatcattgcgtctctgcgagctaatcagttctgtgagcgtctccctagccccaacgacgagtcaactgttgattgccatcagatctcaaagatgccaaatcttgcattcaccatagcaaacaagactttcaccttaacaccagagcagtacatagtgaagttggagcaagcaggacaaactatctgcatcagtgggtttatggcatttgacgtaccgcctcctcgtggtcctctctgctacgctgaacatatctgtactactcttaagtgtgcaatgagggcgtccaccgagggcatcaccgtgcccctgcacgcccgcgcctgtctgtgtttgcccccttcgtctccccgcaacggctgcgtccctacctcatgtctacgacgacaactaggtgcgtcctgcccggttaaacatgaaggtgatcaccgtgcccccgcgagatccgggcggagatctagggcgccggccatggcgagctttggactcgcctaccccatgtctacgacgacaaccagagtacttcaggaaatcataccaggatctattgaaccagcagttttcgcgattgaggtttggccaccagatttgatgtcgcatattaccataggtgattatgaagattgcctattttctaatgagaacctcaacttacaggagcttttgatggtgaggactgaggaggcagcaacccacacctatgatcttgcagcgctcaaatacagggaatcagactgcaaactcgacttcccagattttggatgcgacgagaagttcgccatcatagatgattgggttagccacttggtacctgcatacgaggatagaattgtgaggatctatgccaagaagcctgagttggttagtgcacatgaatttccgaatgttaatgaaatactggaatcgaggttgatgtatctccagaagagaatgtatggtggttcagatagcacctcaaatggtaaagcgttgaggcagaacctctttgacataacttga

SEQ ID NO: 79538 - DNA, 3610 bp, Zea Mays
ggcccccggtaggccgggacacaggaccttgacgcgagtacacgacacagctgaaggctgcgctcccctcgacccctcctccccttcgctccccagctccacaccaactcgctcaccgcctgcccgcctcgccggccaagccaagcgacccccttctcatcccctctctcgctgtcgatgggccctgcggcgctcctctgctccggccctccccgcaattaatcctcggcgtccgtgctctccccactctccgcgcacgccccgcccgtgagtcgtgatctcgccgtctccctcactcccatcctctgcctcaccgcacgagccccgtgcggtggcggtggtaaatggcgagcagcggggtgaggaacggggtggggtccaggatgagcgcgaagccggaccggcagggcgccggcgccacgcccaagacggccgcggggaagcaccgcctctcctcggcggcggcggggggcggcgcgtaccggcggaccagctcgggcccgctccacgcggcggcgggcggccgcgcggcgtcggatggagtttctagtagagtaagggttgctgtaaggcttaggcctaggaatgcagaagagttggtggcagatgcagattttggtgattgtgttgaacttcagccagagctcaaaaggttaaagcttcgtaaaaataattgggagtcagaaacatacgaattcgatgaactgctcactgagttttcttcacaaaagcgagtgtatgaagttgttgcaaaaccagttgtggagagtgttatggagggatataatggtacagttatggcatatggccagactggtactgggaaaacttttactctgggaagacttggtgaagaagacaccgctgctaggggaatcatggttcgtgcaatggaggatattctagcagacataacacctgggactgattctgtctcagtatcatatcttcagttgtacatggagatgatacaagatctccttgatcctgtaaatgataatatagccattgtagaagacccaaggactggggatgtttcattgcctggagccacagtagttgaagttagagatcaaaaaagctttgtggaccttctaagggtgggtgaggctcaccgtgttgctgcaaatacaaagttaaacactgagtcatctcgaagtcatgcgatcctcatggtgaatgtcaggaggtctgtaaaaggtagaactgaaatggatgtcagcatttctggtgaaaatgggcattcattgtccatgatggggtctttgagaccacctgttgttaggaaaagtaagcttgtagttgtcgacttggctggatcagagcgcatagacaagtcaggaagcgagggtcatacgttagaagaggcaaagtctatcaacttgtccttaagtgctctgggaaaatgcatcaatgcgcttgctgaaagcagtcctcatgtacctgttcgtgattctaagcttacaagattgcttaaagattcatttggaggtactgcaagaacatcattggttgtaacaattggtccatctccaagacatcggggggaaactaccagtacaataatgtttggacaaagagcaatgaaagttgagaacatggtgaaattgaaggaagagttcgattacaagagtttatgtaggagacttgatattgagctggataaattaattgcagaaaatgaaaggcaaaggaagtattttgacgatgaagttgagagaataagagatgaagctcagtgccgcattgctgaggccgaaagggaatgcaaaatcacattagagaatgagaaaacgaagtgccatcaagaatacttagactcaatcagaatactggaggagaagtggaaagtacatcaacaatcacccaagaaacaaaatgaagaggccgagtctacatccaatgataccagagaagtgcataacttactgcagaatgagaaaatgctacgtcaatcggctgaagatgaggccagtgacctcaagaatcaagtatcacactggaaaaaactggaggctacagctacagctgaggtagtaaaactacggaaaatgctagatactgaagctagccagaaagagaaacttgaagcagaaatagatattttgagaagtcagttattgcagatgagtatggaagcagatgagacagggagtcttgataaaggaaatggaccaggaaaaatatttcctggtttagattcattggtgtctcagactcgaagctcacaattcagagagcagagcaatggaccaaagcaaccaattgccaaactctttgaacaagttgggttacaaaagatattgtcattgctcgaatctgaagaacctgatgtccgcgttcatgcagtgaaagttgttgcaaatctggcagctgaagaggcaaatcaggaaaagattgtagaagcaggtggcctcacttccctccttatgctacttaggagctctgaggatgagacaattcgtagagtagcagcaggagcaattgctaatcttgcaatgaatgaaacaaatcaagatcttatcatggcagaaggaggtgtaaccttgttgtctatgacagcatctgatgcagaggatccacaaactcttagaatggtggctggagcaatagctaacctttgtggcaatgacaaactgcaaatacggttgaggggagaaggtggaatcaaagcattgcttgggatggttaggtgtgggcaccctgatgtccttgctcaagttgcacgtggcattgcaaattttgcaaaatgtgaatctagagcagctactcaaggaaataaggtgggaaaatcactattaatcgacgatggatcgctcccttggattgtaaaaaatgccaataacgaagctgccccaattaggcggcacatagagctcgcactgtgtcatttggcacagcatgaagtaaattcgaacgacattatcaatgaaggagccctatgggagcttgtacggatttcaagggactgttctcgagaagatataaggaagttggcataccggacactgacatccagccccactcttcaagcggagatgaggagactgggaataaaactgtgatgacagagcaacaaagtgcagctggggctggcactatgaagttccatttctcgtgcactttatagaggtacccgttgctctgagtgctggtaatcgacttacctggtttcggcaggcaggcatacacgggcaccacaccgactaatcacaagaggcagtggagcaactttctcctcgagagttcatttttctttgttctgaggggggcagttgaaagcctggacaacactagcaattcatttatttgtaatgatcctagcatagcagatgttgttacctacccaatgcagcgtttgtaatttttttgctgtaaaaatatcaaaggcagaaaaaagtactttcgcagtatacctgttttccgtgaacactagaaagtttttttgtttttgttttattcatatactgcagacgagtcatgtttgctagccgtgattttcttgctttcttaatgcgcgttgacgctttcgtttcttttaccatgtatgctctcagataatctttgtgaggcacaactttttagaatgataagcgatattagttttttt

SEQ ID NO: 79539 - DNA, 3764 bp, Zea Mays
gtaggccgggacacaggaccttgacgcgagtacacgacacagctgaaggctgcgctcccctcgacccctcctccccttcgctccccagctccacaccaactcgctcaccgcctgcccgcctcgccggccaagccaagcgacccccttctcatcccctctctcgctgtcgatgggccctgcggcgctcctctgctccggccctccccgcaattaatcctcggcgtccgtgctctccccactctccgcgcacgccccgcccgtgagtcgtgatctcgccgtctccctcactcccatcctctgcctcaccgcacgagccccgtgcggtggcggtggtaaatggcgagcagcggggtgaggaacggggtggggtccaggatgagcgcgaagccggaccggcagggcgccggcgccacgcccaagacggccgcggggaagcaccgcctctcctcggcggcggcggggggcggcgcgtaccggcggaccagctcgggcccgctccacgcggcggcgggcggccgcgcggcgtcggatggagtttctagtagagtaagggttgctgtaaggcttaggcctaggaatgcagaagagttggtggcagatgcagattttggtgattgtgttgaacttcagccagaggtgtagcttggtttctctttagcatgctgtgacatttttttttgttgtctagcctgatggaaatttgttatgaagctcaaaaggttaaagcttcgtaaaaataattgggagtcagaaacatacgaattcgatgaactgctcactgagttttcttcacaaaagcgagtgtatgaagttgttgcaaaaccagttgtggagagtgttatggagggatataatggtacagttatggcatatggccagactggtactgggaaaacttttactctgggaagacttggtgaagaagacaccgctgctaggggaatcatggttcgtgcaatggaggatattctagcagacataacacctgggactgattctgtctcagtatcatatcttcagttgtacatggagatgatacaagatctccttgatcctgtaaatgataatatagccattgtagaagacccaaggactggggatgtttcattgcctggagccacagtagttgaagttagagatcaaaaaagctttgtggaccttctaagggtgggtgaggctcaccgtgttgctgcaaatacaaagttaaacactgagtcatctcgaagtcatgcgatcctcatggtgaatgtcaggaggtctgtaaaaggtagaactgaaatggatgtcagcatttctggtgaaaatgggcattcattgtccatgatggggtctttgagaccacctgttgttaggaaaagtaagcttgtagttgtcgacttggctggatcagagcgcatagacaagtcaggaagcgagggtcatacgttagaagaggcaaagtctatcaacttgtccttaagtgctctgggaaaatgcatcaatgcgcttgctgaaagcagtcctcatgtacctgttcgtgattctaagcttacaagattgcttaaagattcatttggaggtactgcaagaacatcattggttgtaacaattggtccatctccaagacatcggggggaaactaccagtacaataatgtttggacaaagagcaatgaaagttgagaacatggtgaaattgaaggaagagttcgattacaagagtttatgtaggagacttgatattgagctggataaattaattgcagaaaatgaaaggcaaaggaagtattttgacgatgaagttgagagaataagagatgaagctcagtgccgcattgctgaggccgaaagggaatgcaaaatcacattagagaatgagaaaacgaagtgccatcaagaatacttagactcaatcagaatactggaggagaagtggaaagtacatcaacaatcacccaagaaacaaaatgaagaggccgagtctacatccaatgataccagagaagtgcataacttactgcagaatgagaaaatgctacgtcaatcggctgaagatgaggccagtgacctcaagaatcaagtatcacactggaaaaaactggaggctacagctacagctgaggtagtaaaactacggaaaatgctagatactgaagctagccagaaagagaaacttgaagcagaaatagatattttgagaagtcagttattgcagatgagtatggaagcagatgagacagggagtcttgataaaggaaatggaccaggaaaaatatttcctggtttagattcattggtgtctcagactcgaagctcacaattcagagagcagagcaatggaccaaagcaaccaattgccaaactctttgaacaagttgggttacaaaagatattgtcattgctcgaatctgaagaacctgatgtccgcgttcatgcagtgaaagttgttgcaaatctggcagctgaagaggcaaatcaggaaaagattgtagaagcaggtggcctcacttccctccttatgctacttaggagctctgaggatgagacaattcgtagagtagcagcaggagcaattgctaatcttgcaatgaatgaacaaatcaagatcttatcatggcagaaggaggtgtaaccttgttgtctatgacagcatctgatgcagaggatccacaaactcttagaatggtggctggagcaatagctaacctttgtggcaatgacaaactgcaaatacggttgaggggagaaggtggaatcaaagcattgcttgggatggttaggtgtgggcaccctgatgtccttgctcaagttgcacgtggcattgcaaattttgcaaaatgtgaatctagagcagctactcaaggaaataaggtgggaaaatcactattaatcgacgatggatcgctcccttggattgtaaaaaatgccaataacgaagctgccccaattaggcggcacatagagctcgcactgtgtcatttggcacagcatggtatccatcccaccacccctctttttttattgcgcgcgcgcacacaaaatactctatgccgtaagtttggatttgttatttttcgcagaagtaaattcgaacgacattatcaatgaaggagccctatgggagcttgtacggatttcaagggactgttctcgagaagatataaggaagttggcataccggacactgacatccagccccactcttcaagcggagatgaggagactgggaataaaactgtgatgacagagcaacaaagtgcagctggggctggcactatgaagttccatttctcgtgcactttatagaggtacccgttgctctgagtgctggtaatcgacttacctggtttcggcaggcaggcatacacgggcaccacaccgactaatcacaagaggcagtggagcaactttctcctcgagagttcatttttctttgttctgaggggggcagttgaaagcctggacaacactagcaattcatttatttgtaatgatcctagcatagcagatgttgttacctacccaatgcagcgtttgtaatttttttgctgtaaaaatatcaaaggcagaaaaaagtactttcgcagtatacctgttttccgtgaacactagaaagtttttttgtttttgttttattcatatactgcagacgagtcatgtttgctagccgtgattttcttgctttcttaatgcgcgttgacgctttcgtttcttttaccatgtatgctctcagataatctttgtgaggcacaactttttagaatgataagcgatattagttttttt

SEQ ID NO: 79540 - DNA, 3505 bp, Zea Mays
gtaggccgggacacaggaccttgacgcgagtacacgacacagctgaaggctgcgctcccctcgacccctcctccccttcgctccccagctccacaccaactcgctcaccgcctgcccgcctcgccggccaagccaagcgacccccttctcatcccctctctcgctgtcgatgggccctgcggcgctcctctgctccggccctccccgcaattaatcctcggcgtccgtgctctccccactctccgcgcacgccccgcccgtgagtcgtgatctcgccgtctccctcactcccatcctctgcctcaccgcacgagccccgtgcggtggcggtggtaaatggcgagcagcggggtgaggaacggggtggggtccaggatgagcgcgaagccggaccggcagggcgccggcgccacgcccaagacggccgcggggaagcaccgcctctcctcggcggcggcggggggcggcgcgtaccggcggaccagctcgggcccgctccacgcggcggcgggcggccgcgcggcgtcggatggagtttctagtagagtaagggttgctgtaaggcttaggcctaggaatgcagaagagttggtggcagatgcagattttggtgattgtgttgaacttcagccagagctcaaaaggttaaagcttcgtaaaaataattgggagtcagaaacatacgaattcgatgaactgctcactgagttttcttcacaaaagcgagtgtatgaagttgttgcaaaaccagttgtggagagtgttatggagggatataatggtacagttatggcatatggccagactggtactgggaaaacttttactctgggaagacttggtgaagaagacaccgctgctaggggaatcatggttcgtgcaatggaggatattctagcagacataacacctgggactgattctgtctcagtatcatatcttcagttgtacatggagatgatacaagatctccttgatcctgtaaatgataatatagccattgtagaagacccaaggactggggatgtttcattgcctggagccacagtagttgaagttagagatcaaaaaagctttgtggaccttctaagggtgggtgaggctcaccgtgttgctgcaaatacaaagttaaacactgagtcatctcgaagtcatgcgatcctcatggtgaatgtcaggaggtctgtaaaaggtagaactgaaatggatgtcagcatttctggtgaaaatgggcattcattgtccatgatggggtctttgagaccacctgttgttaggaaaagtaagcttgtagttgtcgacttggctggatcagagcgcatagacaagtcaggaagcgagggtcatacgttagaagaggcaaagtctatcaacttgtccttaagtgctctgggaaaatgcatcaatgcgcttgctgaaagcagtcctcatgtacctgttcgtgattctaagcttacaagattgcttaaagattcatttggaggtactgcaagaacatcattggttgtaacaattggtccatctccaagacatcggggggaaactaccagtacaataatgtttggacaaagaaaaatgaaaggcaaaggaagtattttgacgatgaagttgagagaataagagatgaagctcagtgccgcattgctgaggccgaaagggaatgcaaaatcacattagagaatgagaaaacgaagtgccatcaagaatacttagactcaatcagaatactggaggagaagtggaaagtacatcaacaatcacccaagaaacaaaatgaagaggccgagtctacatccaatgataccagagaagtgcataacttactgcagaatgagaaaatgctacgtcaatcggctgaagatgaggccagtgacctcaagaatcaagtatcacactggaaaaaactggaggctacagctacagctgaggtagtaaaactacggaaaatgctagatactgaagctagccagaaagagaaacttgaagcagaaatagatattttgagaagtcagttattgcagatgagtatggaagcagatgagacagggagtcttgataaaggaaatggaccaggaaaaatatttcctggtttagattcattggtgtctcagactcgaagctcacaattcagagagcagagcaatggaccaaagcaaccaattgccaaactctttgaacaagttgggttacaaaagatattgtcattgctcgaatctgaagaacctgatgtccgcgttcatgcagtgaaagttgttgcaaatctggcagctgaagaggcaaatcaggaaaagattgtagaagcaggtggcctcacttccctccttatgctacttaggagctctgaggatgagacaattcgtagagtagcagcaggagcaattgctaatcttgcaatgaatgaaacaaatcaagatcttatcatggcagaaggaggtgtaaccttgttgtctatgacagcatctgatgcagaggatccacaaactcttagaatggtggctggagcaatagctaacctttgtggcaatgacaaactgcaaatacggttgaggggagaaggtggaatcaaagcattgcttgggatggttaggtgtgggcaccctgatgtccttgctcaagttgcacgtggcattgcaaattttgcaaaatgtgaatctagagcagctactcaaggaaataaggtgggaaaatcactattaatcgacgatggatcgctcccttggattgtaaaaaatgccaataacgaagctgccccaattaggcggcacatagagctcgcactgtgtcatttggcacagcatgaagtaaattcgaacgacattatcaatgaaggagccctatgggagcttgtacggatttcaagggactgttctcgagaagatataaggaagttggcataccggacactgacatccagccccactcttcaagcggagatgaggagactgggaataaaactgtgatgacagagcaacaaagtgcagctggggctggcactatgaagttccatttctcgtgcactttatagaggtacccgttgctctgagtgctggtaatcgacttacctggtttcggcaggcaggcatacacgggcaccacaccgactaatcacaagaggcagtggagcaactttctcctcgagagttcatttttctttgttctgaggggggcagttgaaagcctggacaacactagcaattcatttatttgtaatgatcctagcatagcagatgttgttacctacccaatgcagcgtttgtaatttttttgctgtaaaaatatcaaaggcagaaaaaagtactttcgcagtatacctgttttccgtgaacactagaaagtttttttgtttttgttttattcatatactgcagacgagtcatgtttgctagccgtgattttcttgctttcttaatgcgcgttgacgctttcgtttcttttaccatgtatgctctcagataatctttgtgaggcacaactttttagaatgataagcgatattagttttttt

SEQ ID NO: 79541 - DNA, 3594 bp, Zea Mays
gtaggccgggacacaggaccttgacgcgagtacacgacacagctgaaggctgcgctcccctcgacccctcctccccttcgctccccagctccacaccaactcgctcaccgcctgcccgcctcgccggccaagccaagcgacccccttctcatcccctctctcgctgtcgatgggccctgcggcgctcctctgctccggccctccccgcaattaatcctcggcgtccgtgctctccccactctccgcgcacgccccgcccgtgagtcgtgatctcgccgtctccctcactcccatcctctgcctcaccgcacgagccccgtgcggtggcggtggtaaatggcgagcagcggggtgaggaacggggtggggtccaggatgagcgcgaagccggaccggcagggcgccggcgccacgcccaagacggccgcggggaagcaccgcctctcctcggcggcggcggggggcggcgcgtaccggcggaccagctcgggcccgctccacgcggcggcgggcggccgcgcggcgtcggatggagtttctagtagagtaagggttgctgtaaggcttaggcctaggaatgcagaagagttggtggcagatgcagattttggtgattgtgttgaacttcagccagaggttaaagcttcgtaaaaataattgggagtcagaaacatacgaattcgatgaactgctcactgagttttcttcacaaaagcgagtgtatgaagttgttgcaaaaccagttgtggagagtgttatggagggatataatggtacagttatggcatatggccagactggtactgggaaaacttttactctgggaagacttggtgaagaagacaccgctgctaggggaatcatggttcgtgcaatggaggatattctagcagacataacacctgggactgattctgtctcagtatcatatcttcagttgtacatggagatgatacaagatctccttgatcctgtaaatgataatatagccattgtagaagacccaaggactggggatgtttcattgcctggagccacagtagttgaagttagagatcaaaaaagctttgtggaccttctaagggtgggtgaggctcaccgtgttgctgcaaatacaaagttaaacactgagtcatctcgaagtcatgcgatcctcatggtgaatgtcaggaggtctgtaaaaggtagaactgaaatggatgtcagcatttctggtgaaaatgggcattcattgtccatgatggggtctttgagaccacctgttgttaggaaaagtaagcttgtagttgtcgacttggctggatcagagcgcatagacaagtcaggaagcgagggtcatacgttagaagaggcaaagtctatcaacttgtccttaagtgctctgggaaaatgcatcaatgcgcttgctgaaagcagtcctcatgtacctgttcgtgattctaagcttacaagattgcttaaagattcatttggaggtactgcaagaacatcattggttgtaacaattggtccatctccaagacatcggggggaaactaccagtacaataatgtttggacaaagagcaatgaaagttgagaacatggtgaaattgaaggaagagttcgattacaagagtttatgtaggagacttgatattgagctggataaattaattgcagaaaatgaaaggcaaaggaagtattttgacgatgaagttgagagaataagagatgaagctcagtgccgcattgctgaggccgaaagggaatgcaaaatcacattagagaatgagaaaacgaagtgccatcaagaatacttagactcaatcagaatactggaggagaagtggaaagtacatcaacaatcacccaagaaacaaaatgaagaggccgagtctacatccaatgataccagagaagtgcataacttactgcagaatgagaaaatgctacgtcaatcggctgaagatgaggccagtgacctcaagaatcaagtatcacactggaaaaaactggaggctacagctacagctgaggtagtaaaactacggaaaatgctagatactgaagctagccagaaagagaaacttgaagcagaaatagatattttgagaagtcagttattgcagatgagtatggaagcagatgagacagggagtcttgataaaggaaatggaccaggaaaaatatttcctggtttagattcattggtgtctcagactcgaagctcacaattcagagagcagagcaatggaccaaagcaaccaattgccaaactctttgaacaagttgggttacaaaagatattgtcattgctcgaatctgaagaacctgatgtccgcgttcatgcagtgaaagttgttgcaaatctggcagctgaagaggcaaatcaggaaaagattgtagaagcaggtggcctcacttccctccttatgctacttaggagctctgaggatgagacaattcgtagagtagcagcaggagcaattgctaatcttgcaatgaatgaaacaaatcaagatcttatcatggcagaaggaggtgtaaccttgttgtctatgacagcatctgatgcagaggatccacaaactcttagaatggtggctggagcaatagctaacctttgtggcaatgacaaactgcaaatacggttgaggggagaaggtggaatcaaagcattgcttgggatggttaggtgtgggcaccctgatgtccttgctcaagttgcacgtggcattgcaaattttgcaaaatgtgaatctagagcagctactcaaggaaataaggtgggaaaatcactattaatcgacgatggatcgctcccttggattgtaaaaaatgccaataacgaagctgccccaattaggcggcacatagagctcgcactgtgtcatttggcacagcatgaagtaaattcgaacgacattatcaatgaaggagccctatgggagcttgtacggatttcaagggactgttctcgagaagatataaggaagttggcataccggacactgacatccagccccactcttcaagcggagatgaggagactgggaataaaactgtgatgacagagcaacaaagtgcagctggggctggcactatgaagttccatttctcgtgcactttatagaggtacccgttgctctgagtgctggtaatcgacttacctggtttcggcaggcaggcatacacgggcaccacaccgactaatcacaagaggcagtggagcaactttctcctcgagagttcatttttctttgttctgaggggggcagttgaaagcctggacaacactagcaattcatttatttgtaatgatcctagcatagcagatgttgttacctacccaatgcagcgtttgtaatttttttgctgtaaaaatatcaaaggcagaaaaaagtactttcgcagtatacctgttttccgtgaacactagaaagtttttttgtttttgttttattcatatactgcagacgagtcatgtttgctagccgtgattttcttgctttcttaatgcgcgttgacgctttcgtttcttttaccatgtatgctctcagataatctttgtgaggcacaactttttagaatgataagcgatattagttttttt

SEQ ID NO: 79542 - DNA, 3509 bp, Zea Mays
gtaggccgggacacaggaccttgacgcgagtacacgacacagctgaaggctgcgctcccctcgacccctcctccccttcgctccccagctccacaccaactcgctcaccgcctgcccgcctcgccggccaagccaagcgacccccttctcatcccctctctcgctgtcgatgggccctgcggcgctcctctgctccggccctccccgcaattaatcctcggcgtccgtgctctccccactctccgcgcacgccccgcccgtgagtcgtgatctcgccgtctccctcactcccatcctctgcctcaccgcacgagccccgtgcggtggcggtggtaaatggcgagcagcggggtgaggaacggggtggggtccaggatgagcgcgaagccggaccggcagggcgccggcgccacgcccaagacggccgcggggaagcaccgcctctcctcggcggcggcggggggcggcgcgtaccggcggaccagctcgggcccgctccacgcggcggcgggcggccgcgcggcgtcggatggagtttctagtagagtaagggttgctgtaaggcttaggcctaggaatgcagaagagttggtggcagatgcagattttggtgattgtgttgaacttcagccagagctcaaaaggttaaagcttcgtaaaaataattgggagtcagaaacatacgaattcgatgaactgctcactgagttttcttcacaaaagcgagtgtatgaagttgttgcaaaaccagttgtggagagtgttatggagggatataatggtacagttatggcatatggccagactggtactgggaaaacttttactctgggaagacttggtgaagaagacaccgctgctaggggaatcatggttcgtgcaatggaggatattctagcagacataacacctgggactgattctgtctcagtatcatatcttcagttgtacatggagatgatacaagatctccttgatcctgtaaatgataatatagccattgtagaagacccaaggactggggatgtttcattgcctggagccacagtagttgaagttagagatcaaaaaagctttgtggaccttctaagggtgggtgaggctcaccgtgttgctgcaaatacaaagttaaacactgagtcatctcgaagtcatgcgatcctcatggtgaatgtcaggaggtctgtaaaaggtagaactgaaatggatgtcagcatttctggtgaaaatgggcattcattgtccatgatggggtctttgagaccacctgttgttaggaaaagtaagcttgtagttgtcgacttggctggatcagagcgcatagacaagtcaggaagcgagggtcatacgttagaagaggcaaagtctatcaacttgtccttaagtgctctgggaaaatgcatcaatgcgcttgctgaaagcagtcctcatgtacctgttcgtgattctaagcttacaagattgcttaaagattcatttggaggtactgcaagaacatcattggttgtaacaattggtccatctccaagacatcggggggaaactaccagtacaataatgtttggacaaagagcaatgaaagttgagaacatggtgaaattgaaggaagagttcgattacaagagtttatgtaggagacttgatattgagctggataaattaattgcagaaaatgaaaggcaaaggaagtattttgacgatgaagttgagagaataagagatgaagctcagtgccgcattgctgaggccgaaagggaatgcaaaatcacattagagaatgaagaggccgagtctacatccaatgataccagagaagtgcataacttactgcagaatgagaaaatgctacgtcaatcggctgaagatgaggccagtgacctcaagaatcaagtatcacactggaaaaaactggaggctacagctacagctgaggtagtaaaactacggaaaatgctagatactgaagctagccagaaagagaaacttgaagcagaaatagatattttgagaagtcagttattgcagatgagtatggaagcagatgagacagggagtcttgataaaggaaatggaccaggaaaaatatttcctggtttagattcattggtgtctcagactcgaagctcacaattcagagagcagagcaatggaccaaagcaaccaattgccaaactctttgaacaagttgggttacaaaagatattgtcattgctcgaatctgaagaacctgatgtccgcgttcatgcagtgaaagttgttgcaaatctggcagctgaagaggcaaatcaggaaaagattgtagaagcaggtggcctcacttccctccttatgctacttaggagctctgaggatgagacaattcgtagagtagcagcaggagcaattgctaatcttgcaatgaatgaaacaaatcaagatcttatcatggcagaaggaggtgtaaccttgttgtctatgacagcatctgatgcagaggatccacaaactcttagaatggtggctggagcaatagctaacctttgtggcaatgacaaactgcaaatacggttgaggggagaaggtggaatcaaagcattgcttgggatggttaggtgtgggcaccctgatgtccttgctcaagttgcacgtggcattgcaaattttgcaaaatgtgaatctagagcagctactcaaggaaataaggtgggaaaatcactattaatcgacgatggatcgctcccttggattgtaaaaaatgccaataacgaagctgccccaattaggcggcacatagagctcgcactgtgtcatttggcacagcatgaagtaaattcgaacgacattatcaatgaaggagccctatgggagcttgtacggatttcaagggactgttctcgagaagatataaggaagttggcataccggacactgacatccagccccactcttcaagcggagatgaggagactgggaataaaactgtgatgacagagcaacaaagtgcagctggggctggcactatgaagttccatttctcgtgcactttatagaggtacccgttgctctgagtgctggtaatcgacttacctggtttcggcaggcaggcatacacgggcaccacaccgactaatcacaagaggcagtggagcaactttctcctcgagagttcatttttctttgttctgaggggggcagttgaaagcctggacaacactagcaattcatttatttgtaatgatcctagcatagcagatgttgttacctacccaatgcagcgtttgtaatttttttgctgtaaaaatatcaaaggcagaaaaaagtactttcgcagtatacctgttttccgtgaacactagaaagtttttttgtttttgttttattcatatactgcagacgagtcatgtttgctagccgtgattttcttgctttcttaatgcgcgttgacgctttcgtttcttttaccatgtatgctctcagataatctttgtgaggcacaactttttagaatgataagcgatattagttttttt

SEQ ID NO: 79543 - DNA, 2919 bp, Zea Mays
cctaattctctacatggtatcacaattctggccctaacctggctagctggctcctccctttcgctgtcgttggcccttgccctagggcgtcgacaacctctccctccctccctgctatatctctggtcgaagccatcaatctcctctcctgggtattgatcgccgccgccgccgccgccgctcctggttgtcgtcacccttgttttgatggcgcctcccattgactcatcccacaactccattctagatttctcagtcatcctccttcgtctttcctgcccttaggctatctccagcagcttacccatctccatccccatattcaaactccactttgcgaacaatgcggtctacagtgcaaaacaatgttttaggtgaccatatgggtgaactactggagacggtcttatacatcaccacagaatgataaagcagaccgtctcattcgctccctggacaatgtctgtcgtatcctcctgatccatgctcacatgtcaacccatactaggtcgagattgtccttactgctacctatctcctcaaaggcgctcctacttggtcatcggtaactctgttccttttgagccttcacaccgccacctacttgctcaatcgcctcccgattaaggcgagtcatgctcccacaccccactttgccctctttcatgccactccatcctacgaccatcttcgcatcttcgtcctactattctgtactaaaaagaatcttgtaataactttaggaaacaacatgtataaaacttttgattggttctcctgaagtttgacagcgtcatgaggtactgcaagaacatcattggttgtaacaattggtccatctccaagacatcggggggaaactaccagtacaataatgtttggacaaagagcaatgaaagttgagaacatggtgaaattgaaggaagagttcgattacaagagtttatgtaggagacttgatattgagctggataaattaattgcagaaaatgaaaggcaaaggaagtattttgacgatgaagttgagagaataagagatgaagctcagtgccgcattgctgaggccgaaagggaatgcaaaatcacattagagaatgagaaaacgaagtgccatcaagaatacttagactcaatcagaatactggaggagaagtggaaagtacatcaacaatcacccaagaaacaaaatgaagaggccgagtctacatccaatgataccagagaagtgcataacttactgcagaatgagaaaatgctacgtcaatcggctgaagatgaggccagtgacctcaagaatcaagtatcacactggaaaaaactggaggctacagctacagctgaggtagtaaaactacggaaaatgctagatactgaagctagccagaaagagaaacttgaagcagaaatagatattttgagaagtcagttattgcagatgagtatggaagcagatgagacagggagtcttgataaaggaaatggaccaggaaaaatatttcctggtttagattcattggtgtctcagactcgaagctcacaattcagagagcagagcaatggaccaaagcaaccaattgccaaactctttgaacaagttgggttacaaaagatattgtcattgctcgaatctgaagaacctgatgtccgcgttcatgcagtgaaagttgttgcaaatctggcagctgaagaggcaaatcaggaaaagattgtagaagcaggtggcctcacttccctccttatgctacttaggagctctgaggatgagacaattcgtagagtagcagcaggagcaattgctaatcttgcaatgaatgaaacaaatcaagatcttatcatggcagaaggaggtgtaaccttgttgtctatgacagcatctgatgcagaggatccacaaactcttagaatggtggctggagcaatagctaacctttgtggcaatgacaaactgcaaatacggttgaggggagaaggtggaatcaaagcattgcttgggatggttaggtgtgggcaccctgatgtccttgctcaagttgcacgtggcattgcaaattttgcaaaatgtgaatctagagcagctactcaaggaaataaggtgggaaaatcactattaatcgacgatggatcgctcccttggattgtaaaaaatgccaataacgaagctgccccaattaggcggcacatagagctcgcactgtgtcatttggcacagcatgaagtaaattcgaacgacattatcaatgaaggagccctatgggagcttgtacggatttcaagggactgttctcgagaagatataaggaagttggcataccggacactgacatccagccccactcttcaagcggagatgaggagactgggaataaaactgtgatgacagagcaacaaagtgcagctggggctggcactatgaagttccatttctcgtgcactttatagaggtacccgttgctctgagtgctggtaatcgacttacctggtttcggcaggcaggcatacacgggcaccacaccgactaatcacaagaggcagtggagcaactttctcctcgagagttcatttttctttgttctgaggggggcagttgaaagcctggacaacactagcaattcatttatttgtaatgatcctagcatagcagatgttgttacctacccaatgcagcgtttgtaatttttttgctgtaaaaatatcaaaggcagaaaaaagtactttcgcagtatacctgttttccgtgaacactagaaagtttttttgtttttgttttattcatatactgcagacgagtcatgtttgctagccgtgattttcttgctttcttaatgcgcgttgacgctttcgtttcttttaccatgtatgctctcagataatctttgtgaggcacaactttttagaatgataagcgatattagttttttt

SEQ ID NO: 79544 - DNA, 2917 bp, Zea Mays
ttctggccctaacctggctagctggctcctccctttcgctgtcgttggcccttgccctagggcgtcgacaacctctccctccctccctgctatatctctggtcgaagccatcaatctcctctcctgggtattgatcgccgccgccgccgccgccgctcctggttgtcgtcacccttgttttgatggcgcctcccattgactcatcccacaactccattctagatttctcagtcatcctccttcgtctttcctgcccttaggctatctccagcagcttacccatctccatccccatattcaaactccactttgcgaacaatgcggtctacagtgcaaaacaatgttttaggtgaccatatgggtgaactactggagacggtcttatacatcaccacagaatgataaagcagaccgtctcattcgctccctggacaatgtctgtcgtatcctcctgatccatgctcacatgtcaacccatactaggtcgagattgtccttactgctacctatctcctcaaaggcgctcctacttggtcatcggtaactctgttccttttgagccttcacaccgccacctacttgctcaatcgcctcccgattaaggcgagtcatgctcccacaccccactttgccctctttcatgccactccatcctacgaccatcttcgcatcttcgtcctactattctgtactaaaaagaatcttgtaataactttaggaaacaacatgtataaaacttttgattggttctcctgaagtttgacagcgtcatgaggtcaacctggtgttaactcataggtactgcaagaacatcattggttgtaacaattggtccatctccaagacatcggggggaaactaccagtacaataatgtttggacaaagagcaatgaaagttgagaacatggtgaaattgaaggaagagttcgattacaagagtttatgtaggagacttgatattgagctggataaattaattgcagaaaatgaaaggcaaaggaagtattttgacgatgaagttgagagaataagagatgaagctcagtgccgcattgctgaggccgaaagggaatgcaaaatcacattagagaatgagaaaacgaagtgccatcaagaatacttagactcaatcagaatactggaggagaagtggaaagtacatcaacaatcacccaagaaacaaaatgaagaggccgagtctacatccaatgataccagagaagtgcataacttactgcagaatgagaaaatgctacgtcaatcggctgaagatgaggccagtgacctcaagaatcaagtatcacactggaaaaaactggaggctacagctacagctgaggtagtaaaactacggaaaatgctagatactgaagctagccagaaagagaaacttgaagcagaaatagatattttgagaagtcagttattgcagatgagtatggaagcagatgagacagggagtcttgataaaggaaatggaccaggaaaaatatttcctggtttagattcattggtgtctcagactcgaagctcacaattcagagagcagagcaatggaccaaagcaaccaattgccaaactctttgaacaagttgggttacaaaagatattgtcattgctcgaatctgaagaacctgatgtccgcgttcatgcagtgaaagttgttgcaaatctggcagctgaagaggcaaatcaggaaaagattgtagaagcaggtggcctcacttccctccttatgctacttaggagctctgaggatgagacaattcgtagagtagcagcaggagcaattgctaatcttgcaatgaatgaaacaaatcaagatcttatcatggcagaaggaggtgtaaccttgttgtctatgacagcatctgatgcagaggatccacaaactcttagaatggtggctggagcaatagctaacctttgtggcaatgacaaactgcaaatacggttgaggggagaaggtggaatcaaagcattgcttgggatggttaggtgtgggcaccctgatgtccttgctcaagttgcacgtggcattgcaaattttgcaaaatgtgaatctagagcagctactcaaggaaataaggtgggaaaatcactattaatcgacgatggatcgctcccttggattgtaaaaaatgccaataacgaagctgccccaattaggcggcacatagagctcgcactgtgtcatttggcacagcatgaagtaaattcgaacgacattatcaatgaaggagccctatgggagcttgtacggatttcaagggactgttctcgagaagatataaggaagttggcataccggacactgacatccagccccactcttcaagcggagatgaggagactgggaataaaactgtgatgacagagcaacaaagtgcagctggggctggcactatgaagttccatttctcgtgcactttatagaggtacccgttgctctgagtgctggtaatcgacttacctggtttcggcaggcaggcatacacgggcaccacaccgactaatcacaagaggcagtggagcaactttctcctcgagagttcatttttctttgttctgaggggggcagttgaaagcctggacaacactagcaattcatttatttgtaatgatcctagcatagcagatgttgttacctacccaatgcagcgtttgtaatttttttgctgtaaaaatatcaaaggcagaaaaaagtactttcgcagtatacctgttttccgtgaacactagaaagtttttttgtttttgttttattcatatactgcagacgagtcatgtttgctagccgtgattttcttgctttcttaatgcgcgttgacgctttcgtttcttttaccatgtatgctctcagataatctttgtgaggcacaactttttagaatgataagcgatattagttttttt

SEQ ID NO: 79545 - DNA, 2512 bp, Zea Mays
cacaactccattctagatttctcagtcatcctccttcgtctttcctgcccttaggctatctccagcagcttacccatctccatccccatattcaaactccactttgcgaacaatgcggtctacagtgcaaaacaatgttttaggtgaccatatgggtgaactactggagacggtcttatacatcaccacagaatgataaagcagaccgtctcattcgctccctggacaatgtctgtcgtatcctcctgatccatgctcacatgtcaacccatactaggtcgagattgtccttactgctacctatctcctcaaaggcgctcctacttggtcatcggtaactctgttccttttgagccttcacaccgccacctacttgctcaatcgcctcccgattaaggaaacaacatgtataaaacttttgattggttctcctgaagtttgacagcgtcatgaggtactgcaagaacatcattggttgtaacaattggtccatctccaagacatcggggggaaactaccagtacaataatgtttggacaaagagcaatgaaagttgagaacatggtgaaattgaaggaagagttcgattacaagagtttatgtaggagacttgatattgagctggataaattaattgcagaaaatgaaaggcaaaggaagtattttgacgatgaagttgagagaataagagatgaagctcagtgccgcattgctgaggccgaaagggaatgcaaaatcacattagagaatgagaaaacgaagtgccatcaagaatacttagactcaatcagaatactggaggagaagtggaaagtacatcaacaatcacccaagaaacaaaatgaagaggccgagtctacatccaatgataccagagaagtgcataacttactgcagaatgagaaaatgctacgtcaatcggctgaagatgaggccagtgacctcaagaatcaagtatcacactggaaaaaactggaggctacagctacagctgaggtagtaaaactacggaaaatgctagatactgaagctagccagaaagagaaacttgaagcagaaatagatattttgagaagtcagttattgcagatgagtatggaagcagatgagacagggagtcttgataaaggaaatggaccaggaaaaatatttcctggtttagattcattggtgtctcagactcgaagctcacaattcagagagcagagcaatggaccaaagcaaccaattgccaaactctttgaacaagttgggttacaaaagatattgtcattgctcgaatctgaagaacctgatgtccgcgttcatgcagtgaaagttgttgcaaatctggcagctgaaggagctctgaggatgagacaattcgtagagtagcagcaggagcaattgctaatcttgcaatgaatgaaacaaatcaagatcttatcatggcagaaggaggtgtaaccttgttgtctatgacagcatctgatgcagaggatccacaaactcttagaatggtggctggagcaatagctaacctttgtggcaatgacaaactgcaaatacggttgaggggagaaggtggaatcaaagcattgcttgggatggttaggtgtgggcaccctgatgtccttgctcaagttgcacgtggcattgcaaattttgcaaaatgtgaatctagagcagctactcaaggaaataaggtgggaaaatcactattaatcgacgatggatcgctcccttggattgtaaaaaatgccaataacgaagctgccccaattaggcggcacatagagctcgcactgtgtcatttggcacagcatgaagtaaattcgaacgacattatcaatgaaggagccctatgggagcttgtacggatttcaagggactgttctcgagaagatataaggaagttggcataccggacactgacatccagccccactcttcaagcggagatgaggagactgggaataaaactgtgatgacagagcaacaaagtgcagctggggctggcactatgaagttccatttctcgtgcactttatagaggtacccgttgctctgagtgctggtaatcgacttacctggtttcggcaggcaggcatacacgggcaccacaccgactaatcacaagaggcagtggagcaactttctcctcgagagttcatttttctttgttctgaggggggcagttgaaagcctggacaacactagcaattcatttatttgtaatgatcctagcatagcagatgttgttacctacccaatgcagcgtttgtaatttttttgctgtaaaaatatcaaaggcagaaaaaagtactttcgcagtatacctgttttccgtgaacactagaaagtttttttgtttttgttttattcatatactgcagacgagtcatgtttgctagccgtgattttcttgctttcttaatgcgcgttgacgctttcgtttcttttaccatgtatgctctcagataatctttgtgaggcacaactttttagaatgataagcgatattagttttttt

SEQ ID NO: 79546 - DNA, 1352 bp, Zea Mays
caaagttccacacgttttgtaccctaacattttcactgctctagcgatgcatacaaccgccgccatttcttcatctcccatcctcatcttcctcgcagcgtcgccgccccgtgcgtcgccatcaacctctccttcaccgtgtatctgggcaacagcctcacctaggacggagggaggctggcatagcggcacgacaccgggaccagccccgaccgcaccggccgatccgccgggcaagagccagaaccaccaccaggcctcagccgcttcaaggggaagggcatggcctccatgtattctctgacaggcaagaggtaacattgttatggcagtgagttatcgagaagtagtagagttacccctctatagccttggggcatgaatatctgcatgataaaaggtaaatcaaacgttaagtgtcatcccattcctgcttctccttatccttttactcggtgtttgacattcttcttgacttgtcctggttataatgatatctaaaagatttgttgctaccattcttcaatcatgtattgttatcttttgaaaaagaaaggacatgtcgttgttttttgtaaagctaccaaagcgccatatattatgcgcaatctttttcaggttgagagaccatgccttcaagtccttcaagtcgacagtagaaaattatgtttagtagcacaaggagcacttgtgtagctgaaaggattttccataaatcgagcttgaagtccttgtgactatatgtaattgtagttaaaatattttatcacacaactagatgcactacaggttataactgcttggttctcaggaattgaggtggctgaagtcctttgtacaaacattatcttaatgtgaaggagagaaattgaggtaagtgtttttcgaaataaactcacacgtgattttgcaacgtctgatatacatttgtctgatatacatttgcatggtagagcgcccgatagggcaccttttttctagtagtatgtgttacccatttgtctcaccacttcttttattcatttcattcattttctgtatgatacggacagcggagacattttactgtattctttcacttataattataatggttttttattacaatgttcaaattattgtccaatatatgcagcggagactactaattctacattgtttatgttattcctttttatgcttttatgttgatttgaattggtccttttattttaatttacaagcagtctggtttaggattcatgaaacaattacaacagaaactaggtcggaagcataaaaaatcttcatgtgggtatcttatgtgacctcattacctgattctagttttcaatttggaatatatagtttat

SEQ ID NO: 79547 - DNA, 5018 bp, Zea Mays
caaagttccacacgttttgtaccctaacattttcactgctctagcgatgcatacaaccgccgccatttcttcatctcccatcctcatcttcctcgcagcgtcgccgccccgtgcgtcgccatcaacctctccttcaccgtgtatctgggcaacagcctcacctaggacggagggaggctggcatagcggcacgacaccgggaccagccccgaccgcaccggccgatccgccgggcaagagccagaaccaccaccaggcctcagccgcttcaaggtgtgggtcgagcggggaagggcatggcctccatgtattctctgacaggcaagaggtactctttatgcacttcacaatccaattcggaacctttgttttgtctcatccctccagcaacctgtcatcgagggggatactatttaatttctagtattttgattacaatatcttcaataactgtaacatgaatgtacgcaattttacaaatgttgatatatttacggtcatcaagataaaagttatatgcatcggatcacaaatttatagttaaaatgctcagtctttatgatacgggttgtcagcatattttatgtatatagtcacagtatctatgatattttgttgtcatttttatgcaatcaaacctatttgaatccagttaataatttatctttaattatcttatttgtttggtatagtagcatatatcataatatagattgatttcattatttttatatcgtaacaggtgaactcagctttagatgcacaggaagcatgattttgaggctatttttgagcaccgatgataaaaaaaatcaaagcataattttataacaaattagtcagtctttatgactagggttgtcaccatcgcttatgtgtataatcacagttttaatttattcaatttttgcggcatctttttgtcaaatcatcacacagcttctattccaagtcatcagttcttttatgcaccgattttgcatatagcagatgcaacacaagtatgttttttttaaatagtaatgcatagtgaagtacattcctttactattatatatgcattttatgataatatatgcataacttttttgttttttcacgcactaccaatggttatcattattttttatgaatataatacaaggtgcgtttatacggattgagtacaatatatgctttgtttttttagactttgaaaactagtctcttctattaaaacctgactccttttcgacgcacgcccgcgcttcgcgctagcgagcgcacttccgcgcgtcacgccgagccctccgcagctgcacagacacagctaggcttgcctgcactttccgtttggccccacgatgatgcagcgagaacgcgcacctttgctcgtccttctcggtcggctacaggcgggatgggagcagtgatcgtcatcgcgtaggacaacatcgcacggctcgacagtaaccggcatggtctgagcagtgaccgtcctcgcgaggacaatgtgctcgacagtgctcggtatggtcataattttttgtctgcgagaaagccaatcgcctgggtattatctatccaccgaacgacctcctctcacgccgctcgactttttcttccagcatccgccgtccgtcctcctctgcacctgtactcacctcaaaaccccctagcgccgtcctaaaaccctagccctcgaatcccccttgcccgcgcggagtagacgagcccgagcccgttcccatcgtccatcgcatcctcagcctcagggtccgccgctaacctctgtgtactgcttggcctaagcatcacgggcgtcttcctggtggcgcggcgattgatgaggcatcatgcgcgccctgacgacggcgcttccatcgcccgcctggagctcctcccgccgccccagcctccgtcgtcgcaaggaggccaggccaggcgaggtggcgcgtgccatcgccatgttccccagatcctgttccacaacgtcgaggagaagctctgctcactgctcgccttcttccaggtacaccaagctctcgccttcttcgggcaccgcgccaaggcgtcaagcgccacccagtctgcctcccatcggtcgtcgctgcctcatgttgttcgtggtcgtgctcgctgcccacggcacagaggcatcgatcggacccaccgccatctgatgtatgccaagctctcgccatctgatgtatgcccacaatgccatagccatgaatttctgattttgtattagaaatattatttaattgaaacataaatttgggcaatttatacgtgctctatgtctcggtagctgccttttatccttatgaaaataatggataaaagcacaaactatttacttgtgactcaaaatgtaaaagaagtcttattttcatgtctaattatctactgaaatcagattctaacacagaccaaagtcgaagtatgaaataagtgtttcttggtagatgcaactgaattgaaacaattgcatagactgttaagtttgagctgatatgtcataacgacattgccgatttcataaacctatcaaaaacattatttgcaggcaactggcatgcattagcagcaaggacattgttctttggactggaagaacccatcctggcatgccttgccttgctccaaactattatctgatgctgtctcaaagggtttatcattaatcaacgatgctttcccacaattctgttcaacagaagccacattatgcacatgtagtataatcaactgacatgtgcataggctgcagaccttcaatattgtcgtttcttcgctttaagctatctatatttttactatcacagcttgcacattgaaccgtatcatcatttttgtttatatcatcgatattagaccactatgattatcacagagtttcaatataaatcagccaagatgtctttggtccagaaacaaaaggataaaaacgtttattttcccatctcccttctgaatattaattttgtacaaccataaatacgatagaagtccagcaagggaatcaatgctacgaactcgtcatattacagattggcatgggcgttttgctgaactgctaatcttgccaaaattttccaaaaattatagaattacaaatccctgcactaatagttcagttcgtggctgtaacaacaaactgaggtttatttatatatgctccttatccctttagttcgtctacaaagtattttttggcatttggttcgcctaggaatttagaatttcagttagataatttatttatatataagaaacttagaaagagacacttgtcgttatgcattgagccattcatttgttcgtttgtctacatttgttttgaatttctaaaaatgcagtcaaaatatttagccattctttgtcgaagcaaggaacaaaatgtgttgtactttggttggtctctctatctatctctctccttgcatgagtgcataggagaaaatcaggcagcattttcaccaactggatcccgaccttcatcaattgcattgcatccaggtctgcatcggtagattctgttctacccgacggtaccccttgtcatacaccacaaagccctacgtgtggcgcgtaacttagacttggatcatgtcaccttattttggatcagcttcctgctgtgatgggtctgatcgttataatgtgttgcacctctgtgtatggtaacttgctaaaacagagaacaactgtaactttaatgtaaattattacatgcctctctatgtgcctggtctgatcgttgctttgttgttctgtctctctcgcatgctaaatagtttatcaaatatttaccacttatgttttcccccctttgtagatagggaacacttatgttgttgcttgcaccgtctgaatattatgtttttgtcacatgtgtgttactcttaataaagctttgaatttcaggtgtggactttgtttatgttatttgcttttctcttctaagggttgttgtcatggttactaacaaacaggtaacattgttatggcagtgagttatcgagaagtagtagagttacccctctatagccttggggcatgaatatctgcatgataaaaggtaaatcaaacgttaagtgtcatcccattcctgcttctccttatccttttactcggtgtttgacattcttcttgacttgtcctggttataatgatatctaaaagatttgttgctaccattcttcaatcatgtattgttatcttttgaaaaagaaaggacatgtcgttgttttttgtaaagctaccaaagcgccatatattatgcgcaatctttttcaggttgagagaccatgccttcaagtccttcaagtcgacagtagaaaattatgtttagtagcacaaggagcacttgtgtagctgaaaggattttccataaatcgagcttgaagtccttgtgactatatgtaattgtagttaaaatattttatcacacaactagatgcactacaggttataactgcttggttctcaggaattgaggtggctgaagtcctttgtacaaacattatcttaatgtgaaggagagaaattgaggtaagtgtttttcgaaataaactcacacgtgattttgcaacgtctgatatacatttgtctgatatacatttgcatggtagagcgcccgatagggcaccttttttctagtagtatgtgttacccatttgtctcaccacttcttttattcatttcattcattttctgtatgatacggacagcggagacattttactgtattctttcacttataattataatggttttttattacaatgttcaaattattgtccaatatatgcagcggagactactaattctacattgtttatgttattcctttttatgcttttatgttgatttgaattggtccttttattttaatttacaagcagtctggtttaggattcatgaaacaattacaacagaaactaggtcggaagcataaaaaatcttcatgtgggtatcttatgtgacctcattacctgattctagttttcaatttggaatatatagtttat

SEQ ID NO: 79548 - DNA, 4437 bp, Zea Mays
caaagttccacacgttttgtaccctaacattttcactgctctagcgatgcatacaaccgccgccatttcttcatctcccatcctcatcttcctcgcagcgtcgccgccccgtgcgtcgccatcaacctctccttcaccgtgtatctgggcaacagcctcacctaggacggagggaggctggcatagcggcacgacaccgggaccagccccgaccgcaccggccgatccgccgggcaagagccagaaccaccaccaggcctcagccgcttcaaggtgtgggtcgagcggggaagggcatggcctccatgtattctctgacaggcaagaggtactctttatgcacttcacaatccaattcggaacctttgttttgtctcatccctccagcaacctgtcatcgagggggatactatttaatttctagtattttgattacaatatcttcaataactgtaacatgaatgtacgcaattttacaaatgttgatatatttacggtcatcaagataaaagttatatgcatcggatcacaaatttatagttaaaatgctcagtctttatgatacgggttgtcagcatattttatgtatatagtcacagtatctatgatattttgttgtcatttttatgcaatcaaacctatttgaatccagttaataatttatctttaattatcttatttgtttggtatagtagcatatatcataatatagattgatttcattatttttatatcgtaacaggtgaactcagctttagatgcacaggaagcatgattttgaggctatttttgagcaccgatgataaaaaaaatcaaagcataattttataacaaattagtcagtctttatgactagggttgtcaccatcgcttatgtgtataatcacagttttaatttattcaatttttgcggcatctttttgtcaaatcatcacacagcttctattccaagtcatcagttcttttatgcaccgattttgcatatagcagatgcaacacaagtatgttttttttaaatagtaatgcatagtgaagtacattcctttactattatatatgcattttatgataatatatgcataacttttttgttttttcacgcactaccaatggttatcattattttttatgaatataatacaaggtgcgtttatacggattgagtacaatatatgctttgtttttttagactttgaaaactagtctcttctattaaaacctgactccttttcgacgcacgcccgcgcttcgcgctagcgagcgcacttccgcgcgtcacgccgagccctccgcagctgcacagacacagctaggcttgcctgcactttccgtttggccccacgatgatgcagcgagaacgcgcacctttgctcgtccttctcggtcggctacaggcgggatgggagcagtgatcgtcatcgcgtaggacaacatcgcacggctcgacagtaaccggcatggtctgagcagtgaccgtcctcgcgaggacaatgtgctcgacagtgctcggtatggtcataattttttgtctgcgagaaagccaatcgcctgggtattatctatccaccgaacgacctcctctcacgccgctcgactttttcttccagcatccgccgtccgtcctcctctgcacctgtactcacctcaaaaccccctagcgccgtcctaaaaccctagccctcgaatcccccttgcccgcgcggagtagacgagcccgagcccgttcccatcgtccatcgcatcctcagcctcagggtccgccgctaacctctgtgtactgcttggcctaagcatcacgggcgtcttcctggtggcgcggcgattgatgaggcatcatgcgcgccctgacgacggcgcttccatcgcccgcctggagctcctcccgccgccccagcctccgtcgtcgcaaggaggccaggccaggcgaggtggcgcgtgccatcgccatgttccccagatcctgttccacaacgtcgaggagaagctctgctcactgctcgccttcttccaggtacaccaagctctcgccttcttcgggcaccgcgccaaggcgtcaagcgccacccagtctgcctcccatcggtcgtcgctgcctcatgttgttcgtggtcgtgctcgctgcccacggcacagaggcatcgatcggacccaccgccatctgatgtatgccaagctctcgccatctgatgcaactggcatgcattagcagcaaggacattgttctttggactggaagaacccatcctggcatgccttgccttgctccaaactattatctgatgctgtctcaaagggtttatcattaatcaacgatgctttcccacaattctgttcaacagaagccacattatgcacatgtagtataatcaactgacatgtgcataggctgcagaccttcaatattgtcgtttcttcgctttaagctatctatatttttactatcacagcttgcacattgaaccgtatcatcatttttgtttatatcatcgatattagaccactatgattatcacagagtttcaatataaatcagccaagatgtctttggtccagaaacaaaaggataaaaacgtttattttcccatctcccttctgaatattaattttgtacaaccataaatacgatagaagtccagcaagggaatcaatgctacgaactcgtcatattacagattggcatgggcgttttgctgaactgctaatcttgccaaaattttccaaaaattatagaattacaaatccctgcactaatagttcagttcgtggctgtaacaacaaactgaggtttatttatatatgctccttatccctttagttcgtctacaaagtattttttggcatttggttcgcctaggaatttagaatttcagttagataatttatttatatataagaaacttagaaagagacacttgtcgttatgcattgagccattcatttgttcgtttgtctacatttgttttgaatttctaaaaatgcagtcaaaatatttagccattctttgtcgaagcaaggaacaaaatgtgttgtactttggttggtctctctatctatctctctccttgcatgagtgcataggagaaaatcaggcagcattttcaccaactggatcccgaccttcatcaattgcattgcatccaggtctgcatcggtagattctgttctacccgacggtaccccttgtcatacaccacaaagccctacgtgtggcgcgtaacttagacttggatcatgtcaccttattttggatcagcttcctgctgtgatgggtctgatcgttataatgtgttgcacctctgtgtatggtaacttgctaaaacagagaacaactgtaactttaatgtaaattattacatgcctctctatgtgcctggtctgatcgttgctttgttgttctgtctctctcgcatgctaaatagtttatcaaatatttaccacttatgttttcccccctttgtagatagggaacacttatgttgttgcttgcaccgtctgaatattatgtttttgtcacatgtgtgttactcttaataaagctttgaatttcaggtgtggactttgtttatgttatttgcttttctcttctaagggttgttgtcatggttactaacaaacaggtaacattgttatggcagtgagttatcgagaagtagtagagttacccctctatagccttggggcatgaatatctgcatgataaaaggttgagagaccatgccttcaagtccttcaagtcgacagtagaaaattatgtttagtagcacaaggagcacttgtgtagctgaaaggattttccataaatcgagcttgaagtccttgtgactatatgtaattgtagttaaaatattttatcacacaactagatgcactacaggttataactgcttggttctcaggaattgaggtggctgaagtcctttgtacaaacattatcttaatgtgaaggagagaaattgaggtaagtgtttttcgaaataaactcacacgtgattttgcaacgtctgatatacatttgtctgatatacatttgcatggtagagcgcccgatagggcaccttttttctagtagtatgtgttacccatttgtctcaccacttcttttattcatttcattcattttctgtatgatacggacagcggagacattttactgtattctttcacttataattataatggttttttattacaatgttcaaattattgtccaatatatgcagcggagactactaattctacattgtttatgttattcctttttatgcttttatgttgatttgaattggtccttttattttaatttacaagcagtctggtttaggattcatgaaacaattacaacagaaactaggtcggaagcataaaaaatcttcatgtgggtatcttatgtgacctcattacctgattctagttttcaatttggaatatatagtttat

SEQ ID NO: 79549 - DNA, 1964 bp, Zea Mays
atatgctcccgcagccctcgtggaaaccaagggcggaccttcccctcctccaagcaaatccgaggcccacccacgggccgctcgaacatctgtcaccgccaagtggccccacccacccctcccctccgctgccccttcttctacaaataccccggccggccgcggccgttcccgaatcgagcggtgactggcgaggcaaaagcattgcgaccacagacagcgcgcgcttcaaggcctttttttttgagataacaaggaggagaggaggagatggcggtcacgatcacgtgggtgaaggcgaggcagatcttcgacagccgcggcaaccccaccgtcgaggtggacgtgggccttagcgacggcagctacgcgaggggggccgtacccagcggcgcatccactgggatatatgaggccttggagttgagggatggaggatctgattatcttggcaagggtgttcttaaggctgtcagcaatgtaaataacattattggaccagcaattgttggaaaggaccccactgagcaggttgagattgacaacttcatggtccaacagcttgatgggacctccaatgagtggggctggtgcaaacagaagcttggagcaaatgccatccttgcggtttcacttgcggtgtgcaaagctggagctatggtgaagaagattcctctttaccagcacatcgcaaatcttgctggaaacaaaactctggtgctccctgtacctgcctttaacgtgattaatggagggtcacatgctggaaacaagcttgccatgcaggagttcatgatcctcccaactggtgcctcctcgttcaaggaggccatgaagatgggagttgaggtgtaccacaacctgaagagcatcatcaagaagaagtacggtcaggatgcgacaaatgttggggatgaaggtggttttgcacctaacattcaggaaaacaaagaaggccttgaactattgaaggcagccatagaaaaggctggctacactggaaaggtggtcattggaatggatgttgctgcttctgagttcttcggtgagaaagacaagacttatgatcttaatttcaaggaggagaacaacgatggctcaaagaaaatttcaggcgacagcctgaaagacctgtacaagtcctttgtttctgagtaccctatcgagtcgatcgaagacccatttgatcaggacgactggagcacttatgccaaactcactgatgagattggacagaaagtgcagattgtaggagatgatcttctcgttaccaaccccaccagggtcgccaaggccatcaatgagaagacctgcaatgctctcctcttgaaggtgaaccaaatcgggtctgtgaccgagagtatcgaagctgtcaggatgtccaagcgcgccggatggggagtgatggcaagccacaggagtggcgagacagaggacaccttcattgctgacctctcagttggcctgtctacgggccaaatcaagacgggagctccttgccggtctgagcgcctggccaaatacaaccaggatcgaggaagagctcggtgatgccgcggtctacgccggagcaaagttcagggcaccagtggagccctactaagaaaggaagaggatggggatgttttcttgtggagctatactagctcgctgctgccttttgttacaatgtttgtacggtcgcaataaatgtatggtcgtgtttgctcgagagctactcaggtgattttgtcgtgggagcaccaaaagcagaaaagaactgtttttttcttctctctctctagattctgacgagtggtggtctgcactcgtcgtaatgtcgtttgcctaaactgattttgatggaacaggaaatcttgctggtcttgccatatgcgtgcgagtgactttcttgttccttatggtgtgtgaggccattttcgtattcagcatggaaaattacgggttcgttttgtagcgacagg

SEQ ID NO: 79550 - DNA, 1129 bp, Zea Mays
aagaagatcttctcacgtaggttgagaaaccccacgaacccctgccccacccatatatagcggcaccgtagcccatgtgagaaacgatcgggccttagacctatgctttggcgcgagacagacgagaggacctttttaaccatagcctgaaattcacttccatatggagtcgaacctaagacctaaggagtgttactcaggccatctaaacaactaggctagaggccctttcatgaaatttttgaagttcctcaaagggtgattaaaaaacgttttcatatctcctcatgaagttgcaaaaaaattactcaccatatcattggttacatgacctaccgattcaagtctttttctccacccgctaatcatcaatggtaattaaggaaattctcacaaactaattgtattatagaagctagagtctatgtgcaagtcaaacactcttgaaccctgcttaataaatctattgaagttgtttcgtagtgaagctggaaaactgaagccgcaattcttaaagtgaagccctcccaaacggggcctaaatgtcttcttaaggcctacagttccagttcacgattttctgaagcactcgatgaccagctccaccaaattttttggagctgagctggagctattccaaacaggaccttagtctctaaattgccaaacgatagaactaaatcagggactaaactgttttagtctgtagtccctcaatgaacaactaaaaggaactaaactatattaattctactttttggtgttctgaataattttagtttctaaaatcaaacaaaaactttagtccgtgaactaaagcccttaaatgacttctttattacagtactctcaactcttattctgatcttttctttattattttattttatttctttttctacatcttctcagctgaccatattacccctctttcggtttgcatctctctcgcagattgacgcgataaagaaatggctcgacaggaactccaacattcaaggtcgttcgccatcgccatctccatctccaaaccctgaaggcctgaatacctgctgcactcgcaaccccttcttcgcataggaagaagttgcgagagccaaggtccagcaccttgtcctccagcctcaag

SEQ ID NO: 79551 - DNA, 2711 bp, Zea Mays
acgcatgccaaattgccaatgtcgtctcatcgccgccttcctccgcctctctctcccctctcctcttctctcatctcccagcgggaaccgcggccggccccacgcgcgggcatgggcatgggcatgcatgccgtgcccgcacgcaagcactcacccacccactgcgggcgctcgtcgatcgccactttcggccccggctaaatcaggatatagaccagtgagggagcgacaagaggcggaggaagaggaggtggtgccggtggtcgtgctgctgctgctgctcgtggtggtggctgtgcaggtgcggagatcgtcgatcgatcgctgcggttcgtcggcggcggtgtcgagatgtcgatggacttcggtgccccggcggatgaccccaaggctttccgcaacatctgccgcgaccggatactgaaggacctgcttaagcctgacaaggataaggagaccaaaagctcatggaaggttcttataatggacaaattcacggtgaagatcatggcttatgcttgtaagatggcggaaattaccgatgcagggatttcgcttgtagaagatctgttcaagagaagggagccaatgccttcaatggatgcaatctactttcttcagccactgaaagaaaatgtcataatgcttctatctgacatgtctgggagatgcccactttacaggaaggcatacatcttcttcagctcaccgattcctaaagacttggttacttacataaagaatgacagtagtatgaatttggaattcttcactattgacatgcagggctttgtaactgaccatgatactgccctgattgatttatacggtccaagtgaacaaaattccaaaaagttcaacgatactataagcacaatggctactcgcattgcgactacatttgcatcattgaaggaatttccatgtgtgcggtatcgggcgccaaaaggagatgcttccacaacaactaaattcgatatggttccaaagtggcttgctactgctgtttgggaaattgtgtcaaaatataaatcaactattcctgaatttccccagaaggagacatgtgaactgctaattgtcgacaggcccatagatcagatagcacctgttattcatgaatggacctatgatgcaatgtgccatgatctactcgaaatggatggcaacaaatacatttatgaggtatcaaagatgggttcggaacctgaaaagaaggaatctttattagaggatcatgatcctctttggcttgaacttcgccatgctcacatagctgatgctagtgagaggttgtacgaaaagatgaacaattttgttgccaagaataaagcagcacaactttcaagagatggtggtgaagtctcaacacgggatctgcagaaaatcgttcaagcattaccccaatacagtgatcaagttgagaaattgacgctacatatagagattgctggaaaaatgaacaggtgtatcagggagtatgggctccgtgatattgggcaattggagcaggatttggtttttggagatgcgggagcgaaggaagtcatcagtatcctcaggtcaaagcaggatatgagcccagaaaacaaaatgaggttgctgattatatatgcaattgtatatccagagaagtttgaaggtgacaaaggggaaaagttgatgcagttagcgaagcttccacatgatgatatggatataataaattgtttaggatacttggatggttcaaatacaaaaaaatcatcaaggacgggtactttctctctcaaatttgatgcccaaaagaagaaaaatgctgccagaacagacaaacaagatggtgaggaaacatgggctttatcacgttttttcccacttattgaggagctgattgagaaactgagcaagggtgaattacctctaaaagagtacccatctatgagtgaaccaagttctgcttctgcttctcaagatgccacacaaactgcatcatcaactgcacgaccagcacaaaatccacaaccgatgtctatgagatcaaggaggacaccaacatgggcaaaatctcgtaattcggatgattcttcaagcagtgattcttcagtcctgagacacgcatcaggtgacttcaagaggctaggcaaccggatttttgtcttcatgattggtggagccactagatctgaactgcgcacggtgcacaagcttacaatgaaaatgaagcgcgaaatcgtcttgggctcttctagcatcgatgatcctccgcagtttatttcgaagctgaagtcgataggtagtgctaccaagacctagcttgtatgccgagcgataaaatgaattctcaccttatagtactcagtataagcttacacattatacatacttcaccaatgaacagctctacattttactaggatgttgtcggctgtcaccagcgacccattgattatcgtcgaactgatcacagttattattctcttaatttttttttaattgaggaagtgagctggcttgtctggatgtaaaataagaaatacgtacacaacgttttgtttgttatttgatgttcttgttgacaaacagataaagagagaagtcattaggaggttttgtaaaaaaggcctaaaattgatggttatatgatatagaaactgtattgcacggatctataacagaatatggataaaattgattatggagggacacaacttcctttgcttgctcccaac

SEQ ID NO: 79552 - DNA, 2911 bp, Zea Mays
gccaatgtcgtctcatcgccgccttcctccgcctctctctcccctctcctcttctctcatctcccagcgggaaccgcggccggccccacgcgcgggcatgggcatgggcatgcatgccgtgcccgcacgcaagcactcacccacccactgcgggcgctcgtcgatcgccactttcggccccggctaaatcaggatatagaccagtgagggagcgacaagaggcggaggaagaggaggtggtgccggtggtcgtgctgctgctgctgctcgtggtggtggctgtgcaggtgcggagatcgtcgatcgatcgctgcggttcgtcggcggcggtgtcgagatgtcgatggacttcggtgccccggcggatgaccccaaggctttccgcaacatctgccgcgaccggatactgaaggacctgcttaagcctgacaaggataaggagaccaaaagctcatggaaggttcttataatggacaaattcacggtgaagatcatggcttatgcttgtaagatggcggaaattaccgatgcagggatttcgcttgtagaagatctgttcaagagaagggagccaatgccttcaatggatgcaatctactttcttcagccactgaaagaaaatgtcataatgcttctatctgacatgtctgggagatgcccactttacaggaaggcatacatcttcttcagctcaccgattcctaaagacttggttacttacataaagaatgacagtagtgtaataccacgcatcggtgcactaagagagatgaatttggaattcttcactattgacatgcagggctttgtaactgaccatgatactgccctgattgatttatacggtccaagtgaacaaaattccaaaaagttcaacgatactataagcacaatggctactcgcattgcgactacatttgcatcattgaaggaatttccatgtgtgcggtatcgggcgccaaaaggagatgcttccacaacaactaaattcgatatggttccaaagtggcttgctactgctgtttgggaaattgtgtcaaaatataaatcaactattcctgaatttccccagaaggagacatgtgaactgctaattgtcgacaggcccatagatcagatagcacctgttattcatgaatggacctatgatgcaatgtgccatgatctactcgaaatggatggcaacaaatacatttatgaggtatcaaagatgggttcggaacctgaaaagaaggaatctttattagaggatcatgatcctctttggcttgaacttcgccatgctcacatagctgatgctagtgagaggttgtacgaaaagatgaacaattttgttgccaagaataaagcagcacaactttcaagagatggtggtgaagtctcaacacgggatctgcagaaaatcgttcaagcattaccccaatacagtgatcaagttgagaaattgacgctacatatagagattgctggaaaaatgaacaggtgtatcagggagtatgggctccgtgatattgggcaattggagcaggatttggtttttggagatgcgggagcgaaggaagtcatcagtatcctcaggtcaaagcaggatatgagcccagaaaacaaaatgaggttgctgattatatatgcaattgtatatccagagaagtttgaaggtgacaaaggggaaaagttgatgcagttagcgaagcttccacatgatgatatggatataataaattgtttaggatacttggatggttcaaatacaaaaaaatcatcaaggacgggtactttctctctcaaatttgatgcccaaaagaagaaaaatgctgccagaacagacaaacaagatggtgaggaaacatgggctttatcacgttttttcccacttattgaggcaccggaccgtggcatcctccccctgcgcaagccctggctgtatgccttgagggtctcagggtctgctcagcttcaggatgaagcaatcctccccgttcaccttcctctcaccaatacaccgcgcacgaacaaacatgcttcccgccatcaacggatccaggccctagagggcacgtggaagcgggcgaacagggcccttgatagaatgggcaccgaaccatggtgtgtggcgtcacacgagcttgccgttgcaccctgcgtgcaccttgcttctgcgaacagctagcttgatgtaccacatctcaggggccatctgccgcagcacgaagcgaccaggctcgccgccgcgtccagtgtcgcggttcttggtgaggcggctgtcgggaggggaaaggatcaccttcttctcaccaatgcaccgcgcacgagcaaacatgcttgccaccatcaacggatccaggccctaaagggcacagtgaagcgggcgaactagggccactgggtgcgcgggctctgtccttggcgctcgcgcgcgcaacgacctcaggatgctcctcggcgtcatggtctgcgccaccgagccactaccacacctcaatgtcaaggacactcccatcgagacttcatcggtgcagtacatcctgcagcagtaccttgcggcctccggagggcacaagcttctggcctccctgcctagcacctacgccatgggcatggtggccaccgagttcgagaccgccgaccgcctcaccaagaacaacgctggacatggcggcgcctggccgtttcgtgctgtggcagatggcccctaagatgtggtacatcgagctagctgtctgcgggagcagggtgcaacagcaagctcgtgtggcgccacacaccatggctcggtgctcattctgccaagggccctgaccggcgcagacgtgtgctctactgtcagcctacctggtcaggcttctcgactatcggacgtgaaaagaagccagaaggcccacgaagctgttgtcccttttgtgtcgccctg

SEQ ID NO: 79553 - DNA, 2807 bp, Zea Mays
gccaatgtcgtctcatcgccgccttcctccgcctctctctcccctctcctcttctctcatctcccagcgggaaccgcggccggccccacgcgcgggcatgggcatgggcatgcatgccgtgcccgcacgcaagcactcacccacccactgcgggcgctcgtcgatcgccactttcggccccggctaaatcaggatatagaccagtgagggagcgacaagaggcggaggaagaggaggtggtgccggtggtcgtgctgctgctgctgctcgtggtggtggctgtgcaggtgcggagatcgtcgatcgatcgctgcggttcgtcggcggcggtgtcgagatgtcgatggacttcggtgccccggcggatgaccccaaggctttccgcaacatctgccgcgaccggatactgaaggacctgcttaagcctgacaaggataaggagaccaaaagctcatggaaggttcttataatggacaaattcacggtgaagatcatggcttatgcttgtaagatggcggaaattaccgatgcagggatttcgcttgtagaagatctgttcaagagaagggagccaatgccttcaatggatgcaatctactttcttcagccactgaaagaaaatgtcataatgcttctatctgacatgtctgggagatgcccactttacaggaaggcatacatcttcttcagctcaccgattcctaaagacttggttacttacataaagaatgacagtagtatgaatttggaattcttcactattgacatgcagggctttgtaactgaccatgatactgccctgattgatttatacggtccaagtgaacaaaattccaaaaagttcaacgatactataagcacaatggctactcgcattgcgactacatttgcatcattgaagttaatcattagtagaaaattccatgtgttttgttacgctaaggaatttccatgtgtgcggtatcgggcgccaaaaggagatgcttccacaacaactaaattcgatatggttccaaagtggcttgctactgctgtttgggaaattgtgtcaaaatataaatcaactattcctgaatttccccagaaggagacatgtgaactgctaattgtcgacaggcccatagatcagatagcacctgttattcatgaatggacctatgatgcaatgtgccatgatctactcgaaatggatggcaacaaatacatttatgaggtatcaaagatgggttcggaacctgaaaagaaggaatctttattagaggatcatgatcctctttggcttgaacttcgccatgctcacatagctgatgctagtgagaggttgtacgaaaagatgaacaattttgttgccaagaataaagcagcacaactttcaagagatggtggtgaagtctcaacacgggatctgcagaaaatcgttcaagcattaccccaatacagtgatcaagttgagaaattgacgctacatatagagattgctggaaaaatgaacaggtgtatcagggagtatgggctccgtgatattgggcaattggagcaggatttggtttttggagatgcgggagcgaaggaagtcatcagtatcctcaggtcaaagcaggatatgagcccagaaaacaaaatgaggttgctgattatatatgcaattgtatatccagagaagtttgaaggtgacaaaggggaaaagttgatgcagttagcgaagcttccacatgatgatatggatataataaattgtttaggatacttggatggttcaaatacaaaaaaatcatcaaggacgggtactttctctctcaaatttgatgcccaaaagaagaaaaatgctgccagaacagacaaacaagatggtgaggaaacatgggctttatcacgttttttcccacttattgaggagctgattgagaaactgagcaagggtgaattacctctaaaagagtacccatctatgagtgaaccaagttctgcttctgcttctcaagatgccacacaaactgcatcatcaactgcacgaccagcacaaaatccacaaccgatgtctatgagatcaaggaggacaccaacatgggcaaaatctcgtaattcggatgattcttcaagcagtgattcttcagtcctgagacacgcatcaggtgacttcaagaggctaggcaaccggatttttgtcttcatgattggtggagccactagatctgaactgcgcacggtgcacaagcttacaatgaaaatgaagcgcgaaatcgtcttgggctcttctagcatcgatgatcctccgcagtttatttcggtaaaaactcaattcctgttttttaggttctactactatatgttcatgcaacaactctgcaagtgcagaagctgaagtcgataggtagtgctaccaagacctagcttgtatgccgagcgataaaatgaattctcaccttatagtactcagtataagcttacacattatacatacttcaccaatgaacagctctacattttactaggatgttgtcggctgtcaccagcgacccattgattatcgtcgaactgatcacagttattattctcttaatttttttttaattgaggaagtgagctggcttgtctggatgtaaaataagaaatacgtacacaacgttttgtttgttatttgatgttcttgttgacaaacagataaagagagaagtcattaggaggttttgtaaaaaaggcctaaaattgatggttatatgatatagaaactgtattgcacggatctataacagaatatggataaaattgattatggagggacacaacttcctttgcttgctcccaac

SEQ ID NO: 79554 - DNA, 2774 bp, Zea Mays
ctcatcgccgccttcctccgcctctctctcccctctcctcttctctcatctcccagcgggaaccgcggccggccccacgcgcgggcatgggcatgggcatgcatgccgtgcccgcacgcaagcactcacccacccactgcgggcgctcgtcgatcgccactttcggccccggctaaatcaggatatagaccagtgagggagcgacaagaggcggaggaagaggaggtggtgccggtggtcgtgctgctgctgctgctcgtggtggtggctgtgcaggtgcggagatcgtcgatcgatcgctgcggttcgtcggcggcggtgtcgagatgtcgatggacttcggtgccccggcggatgaccccaaggctttccgcaacatctgccgcgaccggatactgaaggacctgcttaagcctgacaaggataaggagaccaaaagctcatggaaggttcttataatggacaaattcacggtgaagatcatggcttatgcttgtaagatggcggaaattaccgatgcagggatttcgcttgtagaagatctgttcaagagaagggagccaatgccttcaatggatgcaatctactttcttcagccactgaaagaaaatgtcataatgcttctatctgacatgtctgggagatgcccactttacaggaaggcatacatcttcttcagctcaccgattcctaaagacttggttacttacataaagaatgacagtagtatgaatttggaattcttcactattgacatgcagggctttgtaactgaccatgatactgccctgattgatttatacggtccaagtgaacaaaattccaaaaagttcaacgatactataagcacaatggctactcgcattgcgactacatttgcatcattgaagttaatcattagtagaaaattccatgtgttttgttacgctaaggaatttccatgtgtgcggtatcgggcgccaaaaggagatgcttccacaacaactaaattcgatatggttccaaagtggcttgctactgctgtttgggaaattgtgtcaaaatataaatcaactattcctgaatttccccagaaggagacatgtgaactgctaattgtcgacaggcccatagatcagcttacaacaatttcatatgactgcaaagatagcacctgttattcatgaatggacctatgatgcaatgtgccatgatctactcgaaatggatggcaacaaatacatttatgaggtatcaaagatgggttcggaacctgaaaagaaggaatctttattagaggatcatgatcctctttggcttgaacttcgccatgctcacatagctgatgctagtgagaggttgtacgaaaagatgaacaattttgttgccaagaataaagcagcacaactttcaagagatggtggtgaagtctcaacacgggatctgcagaaaatcgttcaagcattaccccaatacagtgatcaagttgagaaattgacgctacatatagagattgctggaaaaatgaacaggtgtatcagggagtatgggctccgtgatattgggcaattggagcaggatttggtttttggagatgcgggagcgaaggaagtcatcagtatcctcaggtcaaagcaggatatgagcccagaaaacaaaatgaggttgctgattatatatgcaattgtatatccagagaagtttgaaggtgacaaaggggaaaagttgatgcaggatacttggatggttcaaatacaaaaaaatcatcaaggacgggtactttctctctcaaatttgatgcccaaaaggagctgattgagaaactgagcaagggtgaattacctctaaaagagtacccatctatgagtgaaccaagttctgcttctgcttctcaagatgccacacaaactgcatcatcaactgcacgaccagcacaaaatccacaaccgatgtctatgagatcaaggaggacaccaacatgggcaaaatctcgtaattcggatgattcttcaagcagtgattcttcagtcctgagacacgcatcaggtgacttcaagaggctaggcaaccggatttttgtcttcatgattggtggagccactagatctgaactgcgcacggtgcacaagcttacaatgaaaatgaagcgcgaaatcgtcttgggctcttctagcatcgatgatcctccgcagtttatttcggtaaaaactcaattcctgttttttaggttctactactatatgttcatgcaacaactctgcaagtgcagaagctgaagtcgataggtagtgctaccaagacctagcttgtatgccgagcgataaaatgaattctcaccttatagtactcagtataaggtatacattcgcttcttattggctccctgtctttcagtacttgttttattggtttaataggtttccttttgcagcttacacattatacatacttcaccaatgaacagctctacattttactaggatgttgtcggctgtcaccagcgacccattgattatcgtcgaactgatcacagttattattctcttaatttttttttaattgaggaagtgagctggcttgtctggatgtaaaataagaaatacgtacacaacgttttgtttgttatttgatgttcttgttgacaaacagataaagagagaagtcattaggaggttttgtaaaaaaggcctaaaattgatggttatatgatatagaaactgtattgcacggatctataacagaatatggataaaattgattatggagggacacaacttcctttgcttgctcccaac

SEQ ID NO: 79555 - DNA, 2693 bp, Zea Mays
ctctctcccctctcctcttctctcatctcccagcgggaaccgcggccggccccacgcgcgggcatgggcatgggcatgcatgccgtgcccgcacgcaagcactcacccacccactgcgggcgctcgtcgatcgccactttcggccccggctaaatcaggatatagaccagtgagggagcgacaagaggcggaggaagaggaggtggtgccggtggtcgtgctgctgctgctgctcgtggtggtggctgtgcaggtgcggagatcgtcgatcgatcgctgcggttcgtcggcggcggtgtcgagatgtcgatggacttcggtgccccggcggatgaccccaaggctttccgcaacatctgccgcgaccggatactgaaggacctgcttaagcctgacaaggataaggagaccaaaagctcatggaaggttcttataatggacaaattcacggtgaagatcatggcttatgcttgtaagatggcggaaattaccgatgcagggatttcgcttgtagaagatctgttcaagagaagggagccaatgccttcaatggatgcaatctactttcttcagccactgaaagaaaatgtcataatgcttctatctgacatgtctgggagatgcccactttacaggaaggcatacatcttcttcagctcaccgattcctaaagacttggttacttacataaagaatgacagtagtgtaataccacgcatcggtgcactaagagagatgaatttggaattcttcactattgacatgcagggctttgtaactgaccatgatactgccctgattgatttatacggtccaagtgaacaaaattccaaaaagttcaacgatactataagcacaatggctactcgcattgcgactacatttgcatcattgaaggaatttccatgtgtgcggtatcgggcgccaaaaggagatgcttccacaacaactaaattcgatatggttccaaagtggcttgctactgctgtttgggaaattgtgtcaaaatataaatcaactattcctgaatttccccagaaggagacatgtgaactgctaattgtcgacaggcccatagatcagatagcacctgttattcatgaatggacctatgatgcaatgtgccatgatctactcgaaatggatggcaacaaatacatttatgaggtatcaaagatgggttcggaacctgaaaagaaggaatctttattagaggatcatgatcctctttggcttgaacttcgccatgctcacatagctgatgctagtgagaggttgtacgaaaagatgaacaattttgttgccaagaataaagcagcacaactttcaagagatggtggtgaagtctcaacacgggatctgcagaaaatcgttcaagcattaccccaatacagtgatcaagttgagaaattgacgctacatatagagattgctggaaaaatgaacaggtgtatcagggagtatgggctccgtgatattgggcaattggagcaggatttggtttttggagatgcgggagcgaaggaagtcatcagtatcctcaggtcaaagcaggatatgagcccagaaaacaaaatgaggttgctgattatatatgcaattgtatatccagagaagtttgaaggtgacaaaggggaaaagttgatgcagttagcgaagcttccacatgatgatatggatataataaattgtttaggatacttggatggttcaaatacaaaaaaatcatcaaggacgggtactttctctctcaaatttgatgcccaaaagaagaaaaatgctgccagaacagacaaacaagatggtgaggaaacatgggctttatcacgttttttcccacttattgaggagctgattgagaaactgagcaagggtgaattacctctaaaagagtacccatctatgagtgaaccaagttctgcttctgcttctcaagatgccacacaaactgcatcatcaactgcacgaccagcacaaaatccacaaccgatgtctatgagatcaaggaggacaccaacatgggcaaaatctcgtaattcggatgattcttcaagcagtgattcttcagtcctgagacacgcatcaggtgacttcaagaggctaggcaaccggatttttgtcttcatgattggtggagccactagatctgaactgcgcacggtgcacaagcttacaatgaaaatgaagcgcgaaatcgtcttgggctcttctagcatcgatgatcctccgcagtttatttcgaagctgaagtcgataggtagtgctaccaagacctagcttgtatgccgagcgataaaatgaattctcaccttatagtactcagtataagcttacacattatacatacttcaccaatgaacagctctacattttactaggatgttgtcggctgtcaccagcgacccattgattatcgtcgaactgatcacagttattattctcttaatttttttttaattgaggaagtgagctggcttgtctggatgtaaaataagaaatacgtacacaacgttttgtttgttatttgatgttcttgttgacaaacagataaagagagaagtcattaggaggttttgtaaaaaaggcctaaaattgatggttatatgatatagaaactgtattgcacggatctataacagaatatggataaaattgattatggagggacacaacttcctttgcttgctcccaac

SEQ ID NO: 79556 - DNA, 2660 bp, Zea Mays
ctctctcccctctcctcttctctcatctcccagcgggaaccgcggccggccccacgcgcgggcatgggcatgggcatgcatgccgtgcccgcacgcaagcactcacccacccactgcgggcgctcgtcgatcgccactttcggccccggctaaatcaggatatagaccagtgagggagcgacaagaggcggaggaagaggaggtggtgccggtggtcgtgctgctgctgctgctcgtggtggtggctgtgcaggtgcggagatcgtcgatcgatcgctgcggttcgtcggcggcggtgtcgagatgtcgatggacttcggtgccccggcggatgaccccaaggctttccgcaacatctgccgcgaccggatactgaaggacctgcttaagcctgacaaggataaggagaccaaaagctcatggaaggttcttataatggacaaattcacggtgaagatcatggcttatgcttgtaagatggcggaaattaccgatgcagggatttcgcttgtagaagatctgttcaagagaagggagccaatgccttcaatggatgcaatctactttcttcagccactgaaagaaaatgtcataatgcttctatctgacatgtctgggagatgcccactttacaggaaggcatacatcttcttcagctcaccgattcctaaagacttggttacttacataaagaatgacagtagtatgaatttggaattcttcactattgacatgcagggctttgtaactgaccatgatactgccctgattgatttatacggtccaagtgaacaaaattccaaaaagttcaacgatactataagcacaatggctactcgcattgcgactacatttgcatcattgaaggaatttccatgtgtgcggtatcgggcgccaaaaggagatgcttccacaacaactaaattcgatatggttccaaagtggcttgctactgctgtttgggaaattgtgtcaaaatataaatcaactattcctgaatttccccagaaggagacatgtgaactgctaattgtcgacaggcccatagatcagatagcacctgttattcatgaatggacctatgatgcaatgtgccatgatctactcgaaatggatggcaacaaatacatttatgaggtatcaaagatgggttcggaacctgaaaagaaggaatctttattagaggatcatgatcctctttggcttgaacttcgccatgctcacatagctgatgctagtgagaggttgtacgaaaagatgaacaattttgttgccaagaataaagcagcacaactttcaagagatggtggtgaagtctcaacacgggatctgcagaaaatcgttcaagcattaccccaatacagtgatcaagttgagaaattgacgctacatatagagattgctggaaaaatgaacaggtgtatcagggagtatgggctccgtgatattgggcaattggagcaggatttggtttttggagatgcgggagcgaaggaagtcatcagtatcctcaggtcaaagcaggatatgagcccagaaaacaaaatgaggttgctgattatatatgcaattgtatatccagagaagtttgaaggtgacaaaggggaaaagttgatgcagttagcgaagcttccacatgatgatatggatataataaattgtttaggatacttggatggttcaaatacaaaaaaatcatcaaggacgggtactttctctctcaaatttgatgcccaaaagaagaaaaatgctgccagaacagacaaacaagatggtgaggaaacatgggctttatcacgttttttcccacttattgaggagctgattgagaaactgagcaagggtgaattacctctaaaagagtacccatctatgagtgaaccaagttctgcttctgcttctcaagatgccacacaaactgcatcatcaactgcacgaccagcacaaaatccacaaccgatgtctatgagatcaaggaggacaccaacatgggcaaaatctcgtaattcggatgattcttcaagtgattcttcagtcctgagacacgcatcaggtgacttcaagaggctaggcaaccggatttttgtcttcatgattggtggagccactagatctgaactgcgcacggtgcacaagcttacaatgaaaatgaagcgcgaaatcgtcttgggctcttctagcatcgatgatcctccgcagtttatttcgaagctgaagtcgataggtagtgctaccaagacctagcttgtatgccgagcgataaaatgaattctcaccttatagtactcagtataagcttacacattatacatacttcaccaatgaacagctctacattttactaggatgttgtcggctgtcaccagcgacccattgattatcgtcgaactgatcacagttattattctcttaatttttttttaattgaggaagtgagctggcttgtctggatgtaaaataagaaatacgtacacaacgttttgtttgttatttgatgttcttgttgacaaacagataaagagagaagtcattaggaggttttgtaaaaaaggcctaaaattgatggttatatgatatagaaactgtattgcacggatctataacagaatatggataaaattgattatggagggacacaacttcctttgcttgctcccaac

SEQ ID NO: 79557 - DNA, 2616 bp, Zea Mays
ctctctcccctctcctcttctctcatctcccagcgggaaccgcggccggccccacgcgcgggcatgggcatgggcatgcatgccgtgcccgcacgcaagcactcacccacccactgcgggcgctcgtcgatcgccactttcggccccggctaaatcaggatatagaccagtgagggagcgacaagaggcggaggaagaggaggtggtgccggtggtcgtgctgctgctgctgctcgtggtggtggctgtgcaggtgcggagatcgtcgatcgatcgctgcggttcgtcggcggcggtgtcgagatgtcgatggacttcggtgccccggcggatgaccccaaggctttccgcaacatctgccgcgaccggatactgaaggacctgcttaagcctgacaaggataaggagaccaaaagctcatggaaggttcttataatggacaaattcacggtgaagatcatggcttatgcttgtaagatggcggaaattaccgatgcagggatttcgcttgtagaagatctgttcaagagaagggagccaatgccttcaatggatgcaatctactttcttcagccactgaaagaaaatgtcataatgcttctatctgacatgtctgggagatgcccactttacaggaaggcatacatcttcttcagctcaccgattcctaaagacttggttacttacataaagaatgacagtagtgtaataccacgcatcggtgcactaagagagatgaatttggaattcttcactattgacatgcagggctttgtaactgaccatgatactgccctgattgatttatacggtccaagtgaacaaaattccaaaaagttcaacgatactataagcacaatggctactcgcattgcgactacatttgcatcattgaaggaatttccatgtgtgcggtatcgggcgccaaaaggagatgcttccacaacaactaaattcgatatggttccaaagtggcttgctactgctgtttgggaaattgtgtcaaaatataaatcaactattcctgaatttccccagaaggagacatgtgaactgctaattgtcgacaggcccatagatcagatagcacctgttattcatgaatggacctatgatgcaatgtgccatgatctactcgaaatggatggcaacaaatacatttatgaggtatcaaagatgggttcggaacctgaaaagaaggaatctttattagaggatcatgatcctctttggcttgaacttcgccatgctcacatagctgatgctagtgagaggttgtacgaaaagatgaacaattttgttgccaagaataaagcagcacaactttcaagagatggtggtgaagtctcaacacgggatctgcagaaaatcgttcaagcattaccccaatacagtgatcaagttgagaaattgacgctacatatagagattgctggaaaaatgaacaggtgtatcagggagtatgggctccgtgatattgggcaattggagcaggatttggtttttggagatgcgggagcgaaggaagtcatcagtatcctcaggtcaaagcaggatatgagcccagaaaacaaaatgaggttgctgattatatatgcaattgtatatccagagaagtttgaaggtgacaaaggggaaaagttgatgcagttagcgaagcttccacatgatgatatggatataataaattgtttaggatacttggatggttcaaatacaaaaaaatcatcaaggacgggtactttctctctcaaatttgatgcccaaaagaagaaaaatgctgccagaacagacaaacaagatggagctgattgagaaactgagcaagggtgaattacctctaaaagagtacccatctatgagtgaaccaagttctgcttctgcttctcaagatgccacacaaactgcatcatcaactgcacgaccagcacaaaatccacaaccgatgtctatgagatcaaggaggacaccaacatgggcaaaatctcgtaattcggatgattcttcaagcagtgattcttcagtcctgagacacgcatcaggtgacttcaagaggctaggcaaccggatttttgtcttcatgattggtggagccactagatctgaactgcgcacggtgcacaagcttacaatgaaaatgaagcgcgaaatcgtcttgggctcttctagcatcgatgatcctccgcagtttatttcgaagctgaagtcgataggtagtgctaccaagacctagcttgtatgccgagcgataaaatgaattctcaccttatagtactcagtataagctctacattttactaggatgttgtcggctgtcaccagcgacccattgattatcgtcgaactgatcacagttattattctcttaatttttttttaattgaggaagtgagctggcttgtctggatgtaaaataagaaatacgtacacaacgttttgtttgttatttgatgttcttgttgacaaacagataaagagagaagtcattaggaggttttgtaaaaaaggcctaaaattgatggttatatgatatagaaactgtattgcacggatctataacagaatatggataaaattgattatggagggacacaacttcctttgcttgctcccaac

SEQ ID NO: 79558 - DNA, 2686 bp, Zea Mays
ctcccctctcctcttctctcatctcccagcgggaaccgcggccggccccacgcgcgggcatgggcatgggcatgcatgccgtgcccgcacgcaagcactcacccacccactgcgggcgctcgtcgatcgccactttcggccccggctaaatcaggatatagaccagtgagggagcgacaagaggcggaggaagaggaggtggtgccggtggtcgtgctgctgctgctgctcgtggtggtggctgtgcaggtgcggagatcgtcgatcgatcgctgcggttcgtcggcggcggtgtcgagatgtcgatggacttcggtgccccggcggatgaccccaaggctttccgcaacatctgccgcgaccggatactgaaggacctgcttaagcctgacaaggataaggagaccaaaagctcatggaaggttcttataatggacaaattcacggtgaagatcatggcttatgcttgtaagatggcggaaattaccgatgcagggatttcgcttgtagaagatctgttcaagagaagggagccaatgccttcaatggatgcaatctactttcttcagccactgaaagaaaatgtcataatgcttctatctgacatgtctgggagatgcccactttacaggaaggcatacatcttcttcagctcaccgattcctaaagacttggttacttacataaagaatgacagtagtgtaataccacgcatcggtgcactaagagagatgaatttggaattcttcactattgacatgcagggctttgtaactgaccatgatactgccctgattgatttatacggtccaagtgaacaaaattccaaaaagttcaacgatactataagcacaatggctactcgcattgcgactacatttgcatcattgaaggaatttccatgtgtgcggtatcgggcgccaaaaggagatgcttccacaacaactaaattcgatatggttccaaagtggcttgctactgctgtttgggaaattgtgtcaaaatataaatcaactattcctgaatttccccagaaggagacatgtgaactgctaattgtcgacaggcccatagatcagatagcacctgttattcatgaatggacctatgatgcaatgtgccatgatctactcgaaatggatggcaacaaatacatttatgaggtatcaaagatgggttcggaacctgaaaagaaggaatctttattagaggatcatgatcctctttggcttgaacttcgccatgctcacatagctgatgctagtgagaggttgtacgaaaagatgaacaattttgttgccaagaataaagcagcacaactttcaagagatggtggtgaagtctcaacacgggatctgcagaaaatcgttcaagcattaccccaatacagtgatcaagttgagaaattgacgctacatatagagattgctggaaaaatgaacaggtgtatcagggagtatgggctccgtgatattgggcaattggagcaggatttggtttttggagatgcgggagcgaaggaagtcatcagtatcctcaggtcaaagcaggatatgagcccagaaaacaaaatgaggttgctgattatatatgcaattgtatatccagagaagtttgaaggtgacaaaggggaaaagttgatgcagttagcgaagcttccacatgatgatatggatataataaattgtttaggatacttggatggttcaaatacaaaaaaatcatcaaggacgggtactttctctctcaaatttgatgcccaaaagaagaaaaatgctgccagaacagacaaacaagatggtgaggaaacatgggctttatcacgttttttcccacttattgaggagctgattgagaaactgagcaagggtgaattacctctaaaagagtacccatctatgagtgaaccaagttctgcttctgcttctcaagatgccacacaaactgcatcatcaactgcacgaccagcacaaaatccacaaccgatgtctatgagatcaaggaggacaccaacatgggcaaaatctcgtaattcggatgattcttcaagtgattcttcagtcctgagacacgcatcaggtgacttcaagaggctaggcaaccggatttttgtcttcatgattggtggagccactagatctgaactgcgcacggtgcacaagcttacaatgaaaatgaagcgcgaaatcgtcttgggctcttctagcatcgatgatcctccgcagtttatttcgaagctgaagtcgataggtagtgctaccaagacctagcttgtatgccgagcgataaaatgaattctcaccttatagtactcagtataagcttacacattatacatacttcaccaatgaacagctctacattttactaggatgttgtcggctgtcaccagcgacccattgattatcgtcgaactgatcacagttattattctcttaatttttttttaattgaggaagtgagctggcttgtctggatgtaaaataagaaatacgtacacaacgttttgtttgttatttgatgttcttgttgacaaacagataaagagagaagtcattaggaggttttgtaaaaaaggcctaaaattgatggttatatgatatagaaactgtattgcacggatctataacagaatatggataaaattgattatggagggacacaacttcctttgcttgctcccaac

SEQ ID NO: 79559 - DNA, 2743 bp, Zea Mays
cttctctcatctcccagcgggaaccgcggccggccccacgcgcgggcatgggcatgggcatgcatgccgtgcccgcacgcaagcactcacccacccactgcgggcgctcgtcgatcgccactttcggccccggctaaatcaggatatagaccagtgagggagcgacaagaggcggaggaagaggaggtggtgccggtggtcgtgctgctgctgctgctcgtggtggtggctgtgcaggtgcggagatcgtcgatcgatcgctgcggttcgtcggcggcggtgtcgagatgtcgatggacttcggtgccccggcggatgaccccaaggctttccgcaacatctgccgcgaccggatactgaaggacctgcttaagcctgacaaggataaggagaccaaaagctcatggaaggttcttataatggacaaattcacggtgaagatcatggcttatgcttgtaagatggcggaaattaccgatgcagggatttcgcttgtagaagatctgttcaagagaagggagccaatgccttcaatggatgcaatctactttcttcagccactgaaagaaaatgtcataatgcttctatctgacatgtctgggagatgcccactttacaggaaggcatacatcttcttcagctcaccgattcctaaagacttggttacttacataaagaatgacagtagtgtaataccacgcatcggtgcactaagagagatgaatttggaattcttcactattgacatgcagggctttgtaactgaccatgatactgccctgattgatttatacggtccaagtgaacaaaattccaaaaagttcaacgatactataagcacaatggctactcgcattgcgactacatttgcatcattgaagttaatcattagtagaaaattccatgtgttttgttacgctaaggaatttccatgtgtgcggtatcgggcgccaaaaggagatgcttccacaacaactaaattcgatatggttccaaagtggcttgctactgctgtttgggaaattgtgtcaaaatataaatcaactattcctgaatttccccagaaggagacatgtgaactgctaattgtcgacaggcccatagatcagatagcacctgttattcatgaatggacctatgatgcaatgtgccatgatctactcgaaatggatggcaacaaatacatttatgaggtatcaaagatgggttcggaacctgaaaagaaggaatctttattagaggatcatgatcctctttggcttgaacttcgccatgctcacatagctgatgctagtgagaggttgtacgaaaagatgaacaattttgttgccaagaataaagcagcacaactttcaagagatggtggtgaagtctcaacacgggatctgcagaaaatcgttcaagcattaccccaatacagtgatcaagttgagaaattgacgctacatatagagattgctggaaaaatgaacaggtgtatcagggagtatgggctccgtgatattgggcaattggagcaggatttggtttttggagatgcgggagcgaaggaagtcatcagtatcctcaggtcaaagcaggatatgagcccagaaaacaaaatgaggttgctgattatatatgcaattgtatatccagagaagtttgaaggtgacaaaggggaaaagttgatgcagttagcgaagcttccacatgatgatatggatataataaattgtttaggatacttggatggttcaaatacaaaaaaatcatcaaggacgggtactttctctctcaaatttgatgcccaaaagaagaaaaatgctgccagaacagacaaacaagatggagctgattgagaaactgagcaagggtgaattacctctaaaagagtacccatctatgagtgaaccaagttctgcttctgcttctcaagatgccacacaaactgcatcatcaactgcacgaccagcacaaaatccacaaccgatgtctatgagatcaaggaggacaccaacatgggcaaaatctcgtaattcggatgattcttcaagcagtgattcttcagtcctgagacacgcatcaggtgacttcaagaggctaggcaaccggatttttgtcttcatgattggtggagccactagatctgaactgcgcacggtgcacaagcttacaatgaaaatgaagcgcgaaatcgtcttgggctcttctagcatcgatgatcctccgcagtttatttcggtaaaaactcaattcctgttttttaggttctactactatatgttcatgcaacaactctgcaagtgcagaagctgaagtcgataggtagtgctaccaagacctagcttgtatgccgagcgataaaatgaattctcaccttatagtactcagtataagcttacacattatacatacttcaccaatgaacagctctacattttactaggatgttgtcggctgtcaccagcgacccattgattatcgtcgaactgatcacagttattattctcttaatttttttttaattgaggaagtgagctggcttgtctggatgtaaaataagaaatacgtacacaacgttttgtttgttatttgatgttcttgttgacaaacagataaagagagaagtcattaggaggttttgtaaaaaaggcctaaaattgatggttatatgatatagaaactgtattgcacggatctataacagaatatggataaaattgattatggagggacacaacttcctttgcttgctcccaac

SEQ ID NO: 79560 - DNA, 2586 bp, Zea Mays
cacccacccactgcgggcgctcgtcgatcgccactttcggccccggctaaatcaggatatagaccagtgagggagcgacaagaggcggaggaagaggaggtggtgccggtggtcgtgctgctgctgctgctcgtggtggtggctgtgcaggtgcggagatcgtcgatcgatcgctgcggttcgtcggcggcggtgtcgagatgtcgatggacttcggtgccccggcggatgaccccaaggctttccgcaacatctgccgcgaccggatactgaaggacctgcttaagcctgacaaggataaggagaccaaaagctcatggaaggttcttataatggacaaattcacggtgaagatcatggcttatgcttgtaagatggcggaaattaccgatgcagggatttcgcttgtagaagatctgttcaagagaagggagccaatgccttcaatggatgcaatctactttcttcagccactgaaagaaaatgtcataatgcttctatctgacatgtctgggagatgcccactttacaggaaggcatacatcttcttcagctcaccgattcctaaagacttggttacttacataaagaatgacagtagtgtaataccacgcatcggtgcactaagagagatgaatttggaattcttcactattgacatgcagggctttgtaactgaccatgatactgccctgattgatttatacggtccaagtgaacaaaattccaaaaagttcaacgatactataagcacaatggctactcgcattgcgactacatttgcatcattgaaggaatttccatgtgtgcggtatcgggcgccaaaaggagatgcttccacaacaactaaattcgatatggttccaaagtggcttgctactgctgtttgggaaattgtgtcaaaatataaatcaactattcctgaatttccccagaaggagacatgtgaactgctaattgtcgacaggcccatagatcagcacctgttattcatgaatggacctatgatgcaatgtgccatgatctactcgaaatggatggcaacaaatacatttatgaggtatcaaagatgggttcggaacctgaaaagaaggaatctttattagaggatcatgatcctctttggcttgaacttcgccatgctcacatagctgatgctagtgagaggttgtacgaaaagatgaacaattttgttgccaagaataaagcagcacaactttcaagagatggtggtgaagtctcaacacgggatctgcagaaaatcgttcaagcattaccccaatacagtgatcaagttgagaaattgacgctacatatagagattgctggaaaaatgaacaggtgtatcagggagtatgggctccgtgatattgggcaattggagcaggatttggtttttggagatgcgggagcgaaggaagtcatcagtatcctcaggtcaaagcaggatatgagcccagaaaacaaaatgaggttgctgattatatatgcaattgtatatccagagaagtttgaaggtgacaaaggggaaaagttgatgcagttagcgaagcttccacatgatgatatggatataataaattgtttaggatacttggatggttcaaatacaaaaaaatcatcaaggacgggtactttctctctcaaatttgatgcccaaaagaagaaaaatgctgccagaacagacaaacaagatggtgaggaaacatgggctttatcacgttttttcccacttattgaggagctgattgagaaactgagcaagggtgaattacctctaaaagagtacccatctatgagtgaaccaagttctgcttctgcttctcaagatgccacacaaactgcatcatcaactgcacgaccagcacaaaatccacaaccgatgtctatgagatcaaggaggacaccaacatgggcaaaatctcgtaattcggatgattcttcaagcagtgattcttcagtcctgagacacgcatcaggtgacttcaagaggctaggcaaccggatttttgtcttcatgattggtggagccactagatctgaactgcgcacggtgcacaagcttacaatgaaaatgaagcgcgaaatcgtcttgggctcttctagcatcgatgatcctccgcagtttatttcgaagctgaagtcgataggtagtgctaccaagacctagcttgtatgccgagcgataaaatgaattctcaccttatagtactcagtataagcttacacattatacatacttcaccaatgaacagctctacattttactaggatgttgtcggctgtcaccagcgacccattgattatcgtcgaactgatcacagttattattctcttaatttttttttaattgaggaagtgagctggcttgtctggatgtaaaataagaaatacgtacacaacgttttgtttgttatttgatgttcttgttgacaaacagataaagagagaagtcattaggaggttttgtaaaaaaggcctaaaattgatggttatatgatatagaaactgtattgcacggatctataacagaatatggataaaattgattatggagggacacaacttcctttgcttgctcccaac

SEQ ID NO: 79561 - DNA, 2602 bp, Zea Mays
ccactgcgggcgctcgtcgatcgccactttcggccccggctaaatcaggatatagaccagtgagggagcgacaagaggcggaggaagaggaggtggtgccggtggtcgtgctgctgctgctgctcgtggtggtggctgtgcaggtgcggagatcgtcgatcgatcgctgcggttcgtcggcggcggtgtcgagatgtcgatggacttcggtgccccggcggatgaccccaaggctttccgcaacatctgccgcgaccggatactgaaggacctgcttaagcctgacaaggataaggagaccaaaagctcatggaaggttcttataatggacaaattcacggtgaagatcatggcttatgcttgtaagatggcggaaattaccgatgcagggatttcgcttgtagaagatctgttcaagagaagggagccaatgccttcaatggatgcaatctactttcttcagccactgaaagaaaatgtcataatgcttctatctgacatgtctgggagatgcccactttacaggaaggcatacatcttcttcagctcaccgattcctaaagacttggttacttacataaagaatgacagtagtgtaataccacgcatcggtgcactaagagagatgaatttggaattcttcactattgacatgcagggctttgtaactgaccatgatactgccctgattgatttatacggtccaagtgaacaaaattccaaaaagttcaacgatactataagcacaatggctactcgcattgcgactacatttgcatcattgaaggaatttccatgtgtgcggtatcgggcgccaaaaggagatgcttccacaacaactaaattcgatatggttccaaagtggcttgctactgctgtttgggaaattgtgtcaaaatataaatcaactattcctgaatttccccagaaggagacatgtgaactgctaattgtcgacaggcccatagatcagatagcacctgttattcatgaatggacctatgatgcaatgtgccatgatctactcgaaatggatggcaacaaatacatttatgaggtatcaaagatgggttcggaacctgaaaagaaggaatctttattagaggatcatgatcctctttggcttgaacttcgccatgctcacatagctgatgctagtgagaggttgtacgaaaagatgaacaattttgttgccaagaataaagcagcacaactttcaagagatggtggtgaagtctcaacacgggatctgcagaaaatcgttcaagcattaccccaatacagtgatcaagttgagaaattgacgctacatatagagattgctggaaaaatgaacaggtgtatcagggagtatgggctccgtgatattgggcaattggagcaggatttggtttttggagatgcgggagcgaaggaagtcatcagtatcctcaggtcaaagcaggatatgagcccagaaaacaaaatgaggttgctgattatatatgcaattgtatatccagagaagtttgaaggtgacaaaggggaaaagttgatgcagttagcgaagcttccacatgatgatatggatataataaattgtttaggatacttggatggttcaaatacaaaaaaatcatcaaggacgggtactttctctctcaaatttgatgcccaaaagaagaaaaatgctgccagaacagacaaacaagatggtgaggaaacatgggctttatcacgttttttcccacttattgaggagctgattgagaaactgagcaagggtgaattacctctaaaagagtacccatctatgagtgaaccaagttctgcttctgcttctcaagatgccacacaaactgcatcatcaactgcacgaccagcacaaaatccacaaccgatgtctatgagatcaaggaggacaccaacatgggcaaaatctcgtaattcggatgattcttcaagcagtgattcttcagtcctgagacacgcatcaggtgacttcaagaggctaggcaaccggatttttgtcttcatgattggtggagccactagatctgaactgcgcacggtgcacaagcttacaatgaaaatgaagcgcgaaatcgtcttgggctcttctagcatcgatgatcctccgcagtttatttcggtaaaaactcaattcctgttttttaggttctactactatatgttcatgcaacaactctgcaagtgcagaagctgaagtcgataggtagtgctaccaagacctagcttgtatgccgagcgataaaatgaattctcaccttatagtactcagtataaggatgttgtcggctgtcaccagcgacccattgattatcgtcgaactgatcacagttattattctcttaatttttttttaattgaggaagtgagctggcttgtctggatgtaaaataagaaatacgtacacaacgttttgtttgttatttgatgttcttgttgacaaacagataaagagagaagtcattaggaggttttgtaaaaaaggcctaaaattgatggttatatgatatagaaactgtattgcacggatctataacagaatatggataaaattgattatggagggacacaacttcctttgcttgctcccaac

SEQ ID NO: 79562 - DNA, 2495 bp, Zea Mays
ccactgcgggcgctcgtcgatcgccactttcggccccggctaaatcaggatatagaccagtgagggagcgacaagaggcggaggaagaggaggtggtgccggtggtcgtgctgctgctgctgctcgtggtggtggctgtgcaggtgcggagatcgtcgatcgatcgctgcggttcgtcggcggcggtgtcgagatgtcgatggacttcggtgccccggcggatgaccccaaggctttccgcaacatctgccgcgaccggatactgaaggacctgcttaagcctgacaaggataaggagaccaaaagctcatggaaggttcttataatggacaaattcacggtgaagatcatggcttatgcttgtaagatggcggaaattaccgatgcagggatttcgcttgtagaagatctgttcaagagaagggagccaatgccttcaatggatgcaatctactttcttcagccactgaaagaaaatgtcataatgcttctatctgacatgtctgggagatgcccactttacaggaaggcatacatcttcttcagctcaccgattcctaaagacttggttacttacataaagaatgacagtagtgtaataccacgcatcggtgcactaagagagatgaatttggaattcttcactattgacatgcagggctttgtaactgaccatgatactgccctgattgatttatacggtccaagtgaacaaaattccaaaaagttcaacgatactataagcacaatggctactcgcattgcgactacatttgcatcattgaaggaatttccatgtgtgcggtatcgggcgccaaaaggagatgcttccacaacaactaaattcgatatggttccaaagtggcttgctactgctgtttgggaaattgtgtcaaaatataaatcaactattcctgaatttccccagaaggagacatgtgaactgctaattgtcgacaggcccatagatcagatagcacctgttattcatgaatggacctatgatgcaatgtgccatgatctactcgaaatggatggcaacaaatacatttatgaggtatcaaagatgggttcggaacctgaaaagaaggaatctttattagaggatcatgatcctctttggcttgaacttcgccatgctcacatagctgatgctagtgagaggttgtacgaaaagatgaacaattttgttgccaagaataaagcagcacaactttcaagagatggtggtgaagtctcaacacgggatctgcagaaaatcgttcaagcattaccccaatacagtgatcaagttgagaaattgacgctacatatagagattgctggaaaaatgaacaggtgtatcagggagtatgggctccgtgatattgggcaattggagcaggatttggtttttggagatgcgggagcgaaggaagtcatcagtatcctcaggtcaaagcaggatatgagcccagaaaacaaaatgaggttgctgattatatatgcaattgtatatccagagaagtttgaaggtgacaaaggggaaaagttgatgcagttagcgaagcttccacatgatgatatggatataataaattgtttaggatacttggatggttcaaatacaaaaaaatcatcaaggacgggtactttctctctcaaatttgatgcccaaaagaagaaaaatgctgccagaacagacaaacaagatggtgaggaaacatgggctttatcacgttttttcccacttattgaggagctgattgagaaactgagcaagggtgaattacctctaaaagagtacccatctatgagtgaaccaagttctgcttctgcttctcaagatgccacacaaactgcatcatcaactgcacgaccagcacaaaatccacaaccgatgtctatgagatcaaggaggacaccaacatgggcaaaatctcgtaattcggatgattcttcaagcagtgattcttcagtcctgagacacgcatcaggtgacttcaagaggctaggcaaccggatttttgtcttcatgattggtggagccactagatctgaactgcgcacggtgcacaagcttacaatgaaaatgaagcgcgaaatcgtcttgggctcttctagcatcgatgatcctccgcagtttatttcgcttacacattatacatacttcaccaatgaacagctctacattttactaggatgttgtcggctgtcaccagcgacccattgattatcgtcgaactgatcacagttattattctcttaatttttttttaattgaggaagtgagctggcttgtctggatgtaaaataagaaatacgtacacaacgttttgtttgttatttgatgttcttgttgacaaacagataaagagagaagtcattaggaggttttgtaaaaaaggcctaaaattgatggttatatgatatagaaactgtattgcacggatctataacagaatatggataaaattgattatggagggacacaacttcctttgcttgctcccaac

SEQ ID NO: 79563 - DNA, 2550 bp, Zea Mays
ccactgcgggcgctcgtcgatcgccactttcggccccggctaaatcaggatatagaccagtgagggagcgacaagaggcggaggaagaggaggtggtgccggtggtcgtgctgctgctgctgctcgtggtggtggctgtgcaggtgcggagatcgtcgatcgatcgctgcggttcgtcggcggcggtgtcgagatgtcgatggacttcggtgccccggcggatgaccccaaggctttccgcaacatctgccgcgaccggatactgaaggacctgcttaagcctgacaaggataaggagaccaaaagctcatggaaggttcttataatggacaaattcacggtgaagatcatggcttatgcttgtaagatggcggaaattaccgatgcagggatttcgcttgtagaagatctgttcaagagaagggagccaatgccttcaatggatgcaatctactttcttcagccactgaaagaaaatgtcataatgcttctatctgacatgtctgggagatgcccactttacaggaaggcatacatcttcttcagctcaccgattcctaaagacttggttacttacataaagaatgacagtagtgtaataccacgcatcggtgcactaagagagatgaatttggaattcttcactattgacatgcagggctttgtaactgaccatgatactgccctgattgatttatacggtccaagtgaacaaaattccaaaaagttcaacgatactataagcacaatggctactcgcattgcgactacatttgcatcattgaaggaatttccatgtgtgcggtatcgggcgccaaaaggagatgcttccacaacaactaaattcgatatggttccaaagtggcttgctactgctgtttgggaaattgtgtcaaaatataaatcaactattcctgaatttccccagaaggagacatgtgaactgctaattgtcgacaggcccatagatcagatagcacctgttattcatgaatggacctatgatgcaatgtgccatgatctactcgaaatggatggcaacaaatacatttatgaggtatcaaagatgggttcggaacctgaaaagaaggaatctttattagaggatcatgatcctctttggcttgaacttcgccatgctcacatagctgatgctagtgagaggttgtacgaaaagatgaacaattttgttgccaagaataaagcagcacaactttcaagagatggtggtgaagtctcaacacgggatctgcagaaaatcgttcaagcattaccccaatacagtgatcaagttgagaaattgacgctacatatagagattgctggaaaaatgaacaggtgtatcagggagtatgggctccgtgatattgggcaattggagcaggatttggtttttggagatgcgggagcgaaggaagtcatcagtatcctcaggtcaaagcaggatatgagcccagaaaacaaaatgaggttgctgattatatatgcaattgtatatccagagaagtttgaaggtgacaaaggggaaaagttgatgcagttagcgaagcttccacatgatgatatggatataataaattgtttaggatacttggatggttcaaatacaaaaaaatcatcaaggacgggtactttctctctcaaatttgatgcccaaaagaagaaaaatgctgccagaacagacaaacaagatggtgaggaaacatgggctttatcacgttttttcccacttattgaggagctgattgagaaactgagcaagggtgaattacctctaaaagagtacccatctatgagtgaaccaagttctgcttctgcttctcaagatgccacacaaactgcatcatcaactgcacgaccagcacaaaatccacaaccgatgtctatgagatcaaggaggacaccaacatgggcaaaatctcgtaattcggatgattcttcaagcagtgattcttcagtcctgagacacgcatcaggtgacttcaagaggctaggcaaccggatttttgtcttcatgattggtggagccactagatctgaactgcgcacggtgcacaagcttacaatgaaaatgaagcgcgaaatcgtcttgggctcttctagcatcgatgatcctccgcagtttatttcgaagctgaagtcgataggtagtgctaccaagacctagcttgtatgccgagcgataaaatgaattctcaccttatagtactcagtataagctctacattttactaggatgttgtcggctgtcaccagcgacccattgattatcgtcgaactgatcacagttattattctcttaatttttttttaattgaggaagtgagctggcttgtctggatgtaaaataagaaatacgtacacaacgttttgtttgttatttgatgttcttgttgacaaacagataaagagagaagtcattaggaggttttgtaaaaaaggcctaaaattgatggttatatgatatagaaactgtattgcacggatctataacagaatatggataaaattgattatggagggacacaacttcctttgcttgctcccaac

SEQ ID NO: 79564 - DNA, 2259 bp, Zea Mays
cgtcgatcgatcgctgcggttcgtcggcggcggtgtcgagatgtcgatggacttcggtgccccggcggatgaccccaaggctttccgcaacatctgccgcgaccggatactgaaggacctgcttaagcctgacaaggataaggagaccaaaagctcatggaaggttcttataatggacaaattcacggtgaagatcatggcttatgcttgtaagatggcggaaattaccgatgcagggatttcgcttgtagaagatctgttcaagagaagggagccaatgccttcaatggatgcaatctactttcttcagccactgaaagaaaatgtcataatgcttctatctgacatgtctgggagatgcccactttacaggaaggcatacatcttcttcagctcaccgattcctaaagacttggttacttacataaagaatgacagtagtatgaatttggaattcttcactattgacatgcagggctttgtaactgaccatgatactgccctgattgatttatacggtccaagtgaacaaaattccaaaaagttcaacgatactataagcacaatggctactcgcattgcgactacatttgcatcattgaaggaatttccatgtgtgcggtatcgggcgccaaaaggagatgcttccacaacaactaaattcgatatggttccaaagtggcttgctactgctgtttgggaaattgtgtcaaaatataaatcaactattcctgaatttccccagaaggagacatgtgaactgctaattgtcgacaggcccatagatcagatagcacctgttattcatgaatggacctatgatgcaatgtgccatgatctactcgaaatggatggcaacaaatacatttatgaggtatcaaagatgggttcggaacctgaaaagaaggaatctttattagaggatcatgatcctctttggcttgaacttcgccatgctcacatagctgatgctagtgagaggttgtacgaaaagatgaacaattttgttgccaagaataaagcagcacaactttcaagagatggtggtgaagtctcaacacgggatctgcagaaaatcgttcaagcattaccccaatacagtgatcaagttgagaaattgacgctacatatagagattgctggaaaaatgaacaggtgtatcagggagtatgggctccgtgatattgggcaattggagcaggatttggtttttggagatgcgggagcgaaggaagtcatcagtatcctcaggtcaaagcaggatatgagcccagaaaacaaaatgaggttgctgattatatatgcaattgtatatccagagaagtttgaaggtgacaaaggggaaaagttgatgcagttagcgaagcttccacatgatgatatggatataataaattgtttaggatacttggatggttcaaatacaaaaaaatcatcaaggacgggtactttctctctcaaatttgatgcccaaaagaagaaaaatgctgccagaacagacaaacaagatggtgaggaaacatgggctttatcacgttttttcccacttattgaggcaccggaccgtggcatcctccccctgcgcaagccctggctgtatgccttgagggtctcagggtctgctcagcttcaggatgaagcaatcctccccgttcaccttcctctcaccaatacaccgcgcacgaacaaacatgcttcccgccatcaacggatccaggccctagagggcacgtggaagcgggcgaacagggcccttgatagaatgggcaccgaaccatggatgctcctcggcgtcatggtctgcgccaccgagccactaccacacctcaatgtcaaggacactcccatcgagacttcatcggtgcagtacatcctgcagcagtaccttgcggcctccggagggcacaagcttctggcctccctgcctagcacctacgccatgggcatggtggccaccgagttcgagaccgccgaccgcctcaccaagaacaacgctggacatggcggcgcctggccgtttcgtgctgtggcagatggcccctaagatgtggtacatcgagctagctgtctgcgggagcagggtgcaacagcaagctcgtgtggcgccacacaccatggctcggtgctcattctgccaagggccctgaccggcgcagacgtgtgctctactgtcagcctacctggtcaggcttctcgactatcggacgtgaaaagaagccagaaggcccacgaagctgttgtcccttttgtgtcgccctg

SEQ ID NO: 79565 - DNA, 2507 bp, Zea Mays
gtcgatcgatcgctgcggttcgtcggcggcggtgtcgagatgtcgatggacttcggtgccccggcggatgaccccaaggctttccgcaacatctgccgcgaccggatactgaaggacctgcttaagcctgacaaggataaggagaccaaaagctcatggaaggttcttataatggacaaattcacggtgaagatcatggcttatgcttgtaagatggcggaaattaccgatgcagggatttcgcttgtagaagatctgttcaagagaagggagccaatgccttcaatggatgcaatctactttcttcagccactgaaagaaaatgtcataatgcttctatctgacatgtctgggagatgcccactttacaggaaggcatacatcttcttcagctcaccgattcctaaagacttggttacttacataaagaatgacagtagtatgaatttggaattcttcactattgacatgcagggctttgtaactgaccatgatactgccctgattgatttatacggtccaagtgaacaaaattccaaaaagttcaacgatactataagcacaatggctactcgcattgcgactacatttgcatcattgaagttaatcattagtagaaaattccatgtgttttgttacgctaaggaatttccatgtgtgcggtatcgggcgccaaaaggagatgcttccacaacaactaaattcgatatggttccaaagtggcttgctactgctgtttgggaaattgtgtcaaaatataaatcaactattcctgaatttccccagaaggagacatgtgaactgctaattgtcgacaggcccatagatcagatagcacctgttattcatgaatggacctatgatgcaatgtgccatgatctactcgaaatggatggcaacaaatacatttatgaggtatcaaagatgggttcggaacctgaaaagaaggaatctttattagaggatcatgatcctctttggcttgaacttcgccatgctcacatagctgatgctagtgagaggttgtacgaaaagatgaacaattttgttgccaagaataaagcagcacaactttcaagaattctagaatgttggaatgacttatcatttggcatggagttcataaaaatgattgatgtttccattttcaactagagatggtggtgaagtctcaacacgggatctgcagaaaatcgttcaagcattaccccaatacagtgatcaagttgagaaattgacgctacatatagagattgctggaaaaatgaacaggtgtatcagggagtatgggctccgtgatattgggcaattggagcaggatttggtttttggagatgcgggagcgaaggaagtcatcagtatcctcaggtcaaagcaggatatgagcccagaaaacaaaatgaggttgctgattatatatgcaattgtatatccagagaagtttgaaggtgacaaaggggaaaagttgatgcagttagcgaagcttccacatgatgatatggatataataaattgtttaggatacttggatggttcaaatacaaaaaaatcatcaaggacgggtactttctctctcaaatttgatgcccaaaaggagctgattgagaaactgagcaagggtgaattacctctaaaagagtacccatctatgagtgaaccaagttctgcttctgcttctcaagatgccacacaaactgcatcatcaactgcacgaccagcacaaaatccacaaccgatgtctatgagatcaaggaggacaccaacatgggcaaaatctcgtaattcggatgattcttcaagcagtgattcttcagtcctgagacacgcatcaggtgacttcaagaggctaggcaaccggatttttgtcttcatgattggtggagccactagatctgaactgcgcacggtgcacaagcttacaatgaaaatgaagcgcgaaatcgtcttgggctcttctagcatcgatgatcctccgcagtttatttcggtaaaaactcaattcctgttttttaggttctactactatatgttcatgcaacaactctgcaagtgcagaagctgaagtcgataggtagtgctaccaagacctagcttgtatgccgagcgataaaatgaattctcaccttatagtactcagtataagcttacacattatacatacttcaccaatgaacagctctacattttactaggatgttgtcggctgtcaccagcgacccattgattatcgtcgaactgatcacagttattattctcttaatttttttttaattgaggaagtgagctggcttgtctggatgtaaaataagaaatacgtacacaacgttttgtttgttatttgatgttcttgttgacaaacagataaagagagaagtcattaggaggttttgtaaaaaaggcctaaaattgatggttatatgatatagaaactgtattgcacggatctataacagaatatggataaaattgattatggagggacacaacttcctttgcttgctcccaac

SEQ ID NO: 79566 - DNA, 2604 bp, Zea Mays
gtcggcggcggtgtcgagatgtcgatggacttcggtgccccggcggatgaccccaaggctttccgcaacatctgccgcgaccggatactgaaggacctgcttaagcctgacaaggataaggagaccaaaagctcatggaaggttcttataatggacaaattcacggtgaagatcatggcttatgcttgtaagatggcggaaattaccgatgcagggatttcgcttgtagaagatctgttcaagagaagggagccaatgccttcaatggatgcaatctactttcttcagccactgaaagaaaatgtcataatgcttctatctgacatgtctgggagatgcccactttacaggaaggcatacatcttcttcagctcaccgattcctaaagacttggttacttacataaagaatgacagtagtatgaatttggaattcttcactattgacatgcagggctttgtaactgaccatgatactgccctgattgatttatacggtccaagtgaacaaaattccaaaaagttcaacgatactataagcacaatggctactcgcattgcgactacatttgcatcattgaagttaatcattagtagaaaattccatgtgttttgttacgctaaggaatttccatgtgtgcggtatcgggcgccaaaaggagatgcttccacaacaactaaattcgatatggttccaaagtggcttgctactgctgtttgggaaattgtgtcaaaatataaatcaactattcctgaatttccccagaaggagacatgtgaactgctaattgtcgacaggcccatagatcagatagcacctgttattcatgaatggacctatgatgcaatgtgccatgatctactcgaaatggatggcaacaaatacatttatgaggtatcaaagatgggttcggaacctgaaaagaaggaatctttattagaggatcatgatcctctttggcttgaacttcgccatgctcacatagctgatgctagtgagaggttgtacgaaaagatgaacaattttgttgccaagaataaagcagcacaactttcaagagatggtggtgaagtctcaacacgggatctgcagaaaatcgttcaagcattaccccaatacagtgatcaagttgagaaattgacgctacatatagagattgctggaaaaatgaacaggtgtatcagggagtatgggctccgtgatattgggcaattggagcaggatttggtttttggagatgcgggagcgaaggaagtcatcagtatcctcaggtcaaagcaggatatgagcccagaaaacaaaatgaggttgctgattatatatgcaattgtatatccagagaagtttgaaggtgacaaaggggaaaagttgatgcagttagcgaagcttccacatgatgatatggatataataaattgtttaggatacttggatggttcaaatacaaaaaaatcatcaaggacgggtactttctctctcaaatttgatgcccaaaagaagaaaaatgctgccagaacagacaaacaagatggtgaggaaacatgggctttatcacgttttttcccacttattgaggcaccggaccgtggcatcctccccctgcgcaagccctggctgtatgccttgagggtctcagggtctgctcagcttcaggatgaagcaatcctccccgttcaccttcctctcaccaatacaccgcgcacgaacaaacatgcttcccgccatcaacggatccaggccctagagggcacgtggaagcgggcgaacagggcccttgatagaatgggcaccgaaccatggtgtgtggcgtcacacgagcttgccgttgcaccctgcgtgcaccttgcttctgcgaacagctagcttgatgtaccacatctcaggggccatctgccgcagcacgaagcgaccaggctcgccgccgcgtccagtgtcgcggttcttggtgaggcggctgtcgggaggggaaaggatcaccttcttctcaccaatgcaccgcgcacgagcaaacatgcttgccaccatcaacggatccaggccctaaagggcacagtgaagcgggcgaactagggccactgggtgcgcgggctctgtccttggcgctcgcgcgcgcaacgacctcaggatgctcctcggcgtcatggtctgcgccaccgagccactaccacacctcaatgtcaaggacactcccatcgagacttcatcggtgcagtacatcctgcagcagtaccttgcggcctccggagggcacaagcttctggcctccctgcctagcacctacgccatgggcatggtggccaccgagttcgagaccgccgaccgcctcaccaagaacaacgctggacatggcggcgcctggccgtttcgtgctgtggcagatggcccctaagatgtggtacatcgagctagctgtctgcgggagcagggtgcaacagcaagctcgtgtggcgccacacaccatggctcggtgctcattctgccaagggccctgaccggcgcagacgtgtgctctactgtcagcctacctggtcaggcttctcgactatcggacgtgaaaagaagccagaaggcccacgaagctgttgtcccttttgtgtcgccctg

SEQ ID NO: 79567 - DNA, 1791 bp, Zea Mays
gcatcactttgaaggtacatgacaacctttatcgatggtttgacgacgatgatgcgtcggaagaagcaataggtgaaaagtatattatttatttttatttatgtataaattaagatctcacggaacaccacgcgcagggcgcgtggcaatacactagtattaacaaagtacatttataagcacaacggagaccgtgcacgtccagtctggatggttcgcggacctccactccacgacccgaacgttcgggagaaggcaaattccagacaccacacaggacacagcgcattcggctaatttcctcgtctctccccaatccgaccacccccatccattcaccaacccgaaatagaaggccgtccccagccaccagcctccggagttcctccggcgatccccgtccccttgtgtgcgcgctccaggagggccttctgcctccagcttgcagagcccacctaattgctgcgagatggatagagggcagaacgggagggatgacgtcttcggacgcagggatccattttctgggtttggcttcggcccccacaggagcttgttttctggtctccttggggggagggatccatttgacgatccgttctttacccatccgttcgggggtcggatgatgggtgaccatgacatgtttgtacctagtccttttgggccgatgggagggccttttggggacatgaggaacggtgggtttatcgagcaagctcctcctaggggtaacagaagaaggcctgtgatcacagaggtcgaggaggatggtggagagaacgcagagcatggtaaccagcagcctaaccaagatccttatgttcaggagccagacgatgggattgatggacagaaggtggccaagtcgagctgcacagggatctcagtagggctaatagtggagggcagccgcaggctcgtactttcacatatcagagctcttccgtgacgtttggtggtattaatggagcttactacaccacttcaaagtctcggcggactggtagtgacgggatcactgtggaagaaagcaaggaagctgatacaacaactaaagaggctactcatagaatctcccgtggaatccatgacaagggacattccctgacaaggaaactgaattcggatgggaaggttgacaccacacagacactgcacaacctgaatgaagatgaactagctggatttgagcaatcatggaaggggaatgctggacattacttgcctgactggaaccacaatgctggtgcacctaatagcgataattctggtgaccgtagctccaatggacgtgaccggcgatcggcctcaggctgggcgcttcctgggaccgagcaaggccgtgatccgaggcgcaacgggaagccaaaatcacgggtcatccctatctcctgaagagcatggacggagtagatatatagagtagataaataaacagctggtttgtactactatgcaaggtttaggttcaagatcgtttcaaggaaacgacctgaggtccaggtaaccggagtccgcccagcacctcgcgtgctattgtctgattctgtagctgtacagtgctctgctaccttattatccgtgatgtgaaacaatttgtgtcgtccagtcttgctgtaaaatcatcatcgcgtatattgtaaacctgagtcggtatgtctgagttggctttgctgtgttgttgctagttgtttgggtcgctgaaggatgtgaagcgatctgcttctgtgtttgcgtaaaaaaaatagatgctctgctgctggctgtccaaaccgaaccagagccaga

SEQ ID NO: 79568 - DNA, 2022 bp, Zea Mays
gcatcactttgaaggtacatgacaacctttatcgatggtttgacgacgatgatgcgtcggaagaagcaataggtgaaaagtatattatttatttttatttatgtataaattaagatctcacggaacaccacgcgcagggcgcgtggcaatacactagtattaacaaagtacatttataagcacaacggagaccgtgcacgtccagtctggatggttcgcggacctccactccacgacccgaacgttcgggagaaggcaaattccagacaccacacaggacacagcgcattcggctaatttcctcgtctctccccaatccgaccacccccatccattcaccaacccgaaatagaaggccgtccccagccaccagcctccggagttcctccggcgatccccgtccccttgtgtgcgcgctccaggagggccttctgcctccagcttgcagagcccacctaattgctgcgagatggatagagggcagaacgggagggatgacgtcttcggacgcagggatccattttctgggtttggcttcggcccccacaggagcttgttttctggtctccttggggggagggatccatttgacgatccgttctttacccatccgttcgggggtcggatgatgggtgaccatgacatgtttgtacctagtccttttgggccgatgggagggccttttggggacatgaggaacggtgggtttatcgagcaagctcctcctaggggtaacagaagaaggcctgtgatcacagaggtcgaggaggatggtggagagaacgcagagcatggtaaccagcagcctaaccaagatccttatgttcaggagccagacgatgggattgatgaaggtggccaagtcgagctgcacagggatctcagtagggctaatagtggagggcagccgcaggctcgtactttcacatatcagagctcttccgtgacgtttggtggtattaatggagcttactacaccacttcaaagtctcggcggactggtagtgacgggatcactgtggaagaaagcaaggaagctgatacaacaactaaagaggctactcatagaatctcccgtggaatccatgacaaggtagataaatctttgctatgtcagagctgtatttggttaatcaaaattatattgaatagcccagtgcacacaggattgtgtacagagcacatatttgacttatcaattgataatggatcaaaaaatgcaaaaaaaaacttcaatttggtccagtataattattttttctttgtatttacaaataaaagagccttcaatttggtgcagtatagctattttttctttgtattttgtagggacattccctgacaaggaaactgaattcggatgggaaggttgacaccacacagacactgcacaacctgaatgaagatgaactagctggatttgagcaatcatggaaggggaatgctggacattacttgcctgactggaaccacaatgctggtgcacctaatagcgataattctggtgaccgtagctccaatggacgtgaccggcgatcggcctcaggctgggcgcttcctgggaccgagcaaggccgtgatccgaggcgcaacgggaagccaaaatcacgggtcatccctatctcctgaagagcatggacggagtagatatatagagtagataaataaacagctggtttgtactactatgcaaggtttaggttcaagatcgtttcaaggaaacgacctgaggtccaggtaaccggagtccgcccagcacctcgcgtgctattgtctgattctgtagctgtacagtgctctgctaccttattatccgtgatgtgaaacaatttgtgtcgtccagtcttgctgtaaaatcatcatcgcgtatattgtaaacctgagtcggtatgtctgagttggctttgctgtgttgttgctagttgtttgggtcgctgaaggatgtgaagcgatctgcttctgtgtttgcgtaaaaaaaatagatgctctgctgctggctgtccaaaccgaaccagagccaga

SEQ ID NO: 79569 - DNA, 1460 bp, Zea Mays
aacgatacgatgcttgcagagcccacctaattgctgcgagatggatagagggcagaacgggagggatgacgtcttcggacgcagggatccattttctgggtttggcttcggcccccacaggagcttgttttctggtctccttggggggagggatccatttgacgatccgttctttacccatccgttcgggggtcggatgatgggtgaccatgacatgtttgtacctagtccttttgggccgatgggagggccttttggggacatgaggaacggtgggtttatcgagcaagctcctcctaggggtaacagaagaaggcctgtgatcacagaggtcgaggaggatggtggagagaacgcagagcatggtaaccagcagcctaaccaagatccttatgttcaggagccagacgatgggattgatggtatgagcctggatgaattgatttacttgtctagtttcatggagttgttgcaaggatgatatgtatgtttcacatcttttgatttgttcctttgtagagacagaaggtggccaagtcgagctgcacagggatctcagtagggctaatagtggagggcagccgcaggctcgtactttcacatatcagagctcttccgtgacgtttggtggtattaatggagcttactacaccacttcaaagtctcggcggactggtagtgacgggatcactgtggaagaaagcaaggaagctgatacaacaactaaagaggctactcatagaatctcccgtggaatccatgacaagggacattccctgacaaggaaactgaattcggatgggaaggttgacaccacacagacactgcacaacctgaatgaagatgaactagctggatttgagcaatcatggaaggggaatgctggacattacttgcctgactggaaccacaatgctggtgcacctaatagcgataattctggtgaccgtagctccaatggacgtgaccggcgatcggcctcaggctgggcgcttcctgggaccgagcaaggccgtgatccgaggcgcaacgggaagccaaaatcacgggtcatccctatctcctgaagagcatggacggagtagatatatagagtagataaataaacagctggtttgtactactatgcaaggtttaggttcaagatcgtttcaaggaaacgacctgaggtccaggtaaccggagtccgcccagcacctcgcgtgctattgtctgattctgtagctgtacagtgctctgctaccttattatccgtgatgtgaaacaatttgtgtcgtccagtcttgctgtaaaatcatcatcgcgtatattgtaaacctgagtcggtatgtctgagttggctttgctgtgttgttgctagttgtttgggtcgctgaaggatgtgaagcgatctgcttctgtgtttgcgtaaaaaaaatagatgctctgctgctggctgtccaaaccgaaccagagccaga

SEQ ID NO: 79570 - DNA, 1854 bp, Zea Mays
acgtctgccccctggccacgcgtgtccaccccacgctttggcaccatcacgtccggaaaacaaaagagaaacgcccagaacccgtcgaaccaccaccaagcagcccaacccatcggttcgacaacttcacagaccagtgagtgacacacacccatgccgccgccgccgctcgcgcgccgcctactcctccagccgctgccgcgcggcgcgcgcgccctccacacgaccccggccccgcgccgcggcccgggggtgctggcctgccgcctggcgtcccgcgccgtggtccgcttcgcggggcccgaggcggcgcgcttcctccactcgctgctcaccaacgacctcctctccgccttctccgcggccggcgcgtcgtcgccgcagcggtacgcgcccacgccgaacgcgcccgcgcggggccccgcggcgcccgcctacgccgcgctgctcacgccgcagggcaggttcctctacgacctcttcctctaccggcccccgccgcggtcccagatgctcgaccgcacaggatccgcgccggagaccggtgaggcccccgaggggcacccgcacccgcaggaggtactcgcagacgttgacgccgccgaggtggacgacctcgtcgcctgctttaagagatatcgtttgagatccaaggttgaaatagacaatgtaagtgagaattttgcatgttggcaaagatttggacatgatgtagtgcacactgaaccttctactcaagaacctgaggctcaatccattgggtggggacaaggtgttgaccatgctggcgagtcagctgcgcaagggaacggtcatggatggcaatggctcaaagatcctcggttggactaccttggttacagaggaatttttccagctgacacgataccacccctagttgagtctgacaaagaagcagatgaacgccattatcaactttggcggatagaaaatggagtcgcagaaggcgaagcaatcccgctggagtacaatcttgctggcttgaacgccatttcgttcgagaagggctgctacatcgggcaggagcttatcgctcggacgcaccatcgcggtgtcatccggaagcgcctaatgccaatgaagttcgtcgacgggaatgggcaagaactcgagcaggccgtcgctccaggctcggaggtcgtggacgaggcttcaggcaagaaggtcggggcagtgagcaccgctctgggctcccgcgggatgggcctgctaagactcgaagaagcactgaaaccgggctcggtcctccgcgccggcggcaacagggacgtgagggtccaggcgatcaagccggactggtggccagccgagtggacacaggtgcttcaggaacagcgcgcagccgcttgacagcagcggagctgtatgtagtactggaccccaaacccaaaccctgcctgccgtcagttagtcgcctcttggaagaggacccaaacaatccccatagctaaccgttttcagcttcggtttttagtcttgttgtctggtgtatcaaggcggagcctgtttttttttttcctcgcagaagacgaggaaggcaggagggcctgtttctcttcctctctgcctgctgctgtgttcagctgcggcatctcgttcagaacgagatgagcaaactgtgtgagtgtgtgtgtggcccaaacaggcagtgtgttcgaataagtttatctgtactacactgaataataagtttctctgtctggatgatcttgtacaacgttttatattggacggtcatgggctcccggctctgtacgttgcgttgctctcgcatgtaaagcatttcatgctggggattgtctcagcattatacttttttttaggaactaaatt

SEQ ID NO: 79571 - DNA, 1772 bp, Zea Mays
acgtctgccccctggccacgcgtgtccaccccacgctttggcaccatcacgtccggaaaacaaaagagaaacgcccagaacccgtcgaaccaccaccaagcagcccaacccatcggttcgacaacttcacagaccagtgagtgacacacacccatgccgccgccgccgctcgcgcgccgcctactcctccagccgctgccgcgcggcgcgcgcgccctccacacgaccccggccccgcgccgcggcccgggggtgctggcctgccgcctggcgtcccgcgccgtggtccgcttcgcggggcccgaggcggcgcgcttcctccactcgctgctcaccaacgacctcctctccgccttctccgcggccggcgcgtcgtcgccgcagcggtacgcgcccacgccgaacgcgcccgcgcggggccccgcggcgcccgcctacgccgcgctgctcacgccgcagggcaggttcctctacgacctcttcctctaccggcccccgccgcggtcccagatgctcgaccgcacaggatccgcgccggagaccggtgaggcccccgaggggcacccgcacccgcaggaggtactcgcagacgttgacgccgccgaggtggacgacctcgtcgcctgctttaagagatatcgtttgagatccaaggttgaaatagacaatgtgttgaccatgctggcgagtcagctgcgcaagggaacggtcatggatggcaatggctcaaagatcctcggttggactaccttggttacagaggaatttttccagctgacacgataccacccctagttgagtctgacaaagaagcagatgaacgccattatcaactttggcggatagaaaatggagtcgcagaaggttcgactgagatcccaaaaggcgaagcaatcccgctggagtacaatcttgctggcttgaacgccatttcgttcgagaagggctgctacatcgggcaggagcttatcgctcggacgcaccatcgcggtgtcatccggaagcgcctaatgccaatgaagttcgtcgacgggaatgggcaagaactcgagcaggccgtcgctccaggctcggaggtcgtggacgaggcttcaggcaagaaggtcggggcagtgagcaccgctctgggctcccgcgggatgggcctgctaagactcgaagaagcactgaaaccgggctcggtcctccgcgccggcggcaacagggacgtgagggtccaggcgatcaagccggactggtggccagccgagtggacacaggtgcttcaggaacagcgcgcagccgcttgacagcagcggagctgtatgtagtactggaccccaaacccaaaccctgcctgccgtcagttagtcgcctcttggaagaggacccaaacaatccccatagctaaccgttttcagcttcggtttttagtcttgttgtctggtgtatcaaggcggagcctgtttttttttttcctcgcagaagacgaggaaggcaggagggcctgtttctcttcctctctgcctgctgctgtgttcagctgcggcatctcgttcagaacgagatgagcaaactgtgtgagtgtgtgtgtggcccaaacaggcagtgtgttcgaataagtttatctgtactacactgaataataagtttctctgtctggatgatcttgtacaacgttttatattggacggtcatgggctcccggctctgtacgttgcgttgctctcgcatgtaaagcatttcatgctggggattgtctcagcattatacttttttttaggaactaaatt

SEQ ID NO: 79572 - DNA, 1333 bp, Zea Mays
gtggaatttcacattctaaaaaaatagcttattccaatagtaagattccaattcctcaaaatgaaaggaaacaaacggcgccttatagttttgcggtgaacctgatatcgtttgagatccaaggttgaaatagacaatgtaagtgagaattttgcatgttggcaaagatttggacatgatgtagtgcacactgaaccttctactcaagaacctgaggctcaatccattgggtggggacaaggtgttgaccatgctggcgagtcagctgcgcaagggaacggtcatggatggcaatggctcaaagatcctcggttggactaccttggttacagaggaatttttccagctgacacgataccacccctagttgagtctgacaaagaagcagatgaacgccattatcaactttggcggatagaaaatggagtcgcagaaggttcgactgagatcccaaaaggcgaagcaatcccgctggagtacaatcttgctggcttgaacgccatttcgttcgagaagggctgctacatcgggcaggagcttatcgctcggacgcaccatcgcggtgtcatccggaagcgcctaatgccaatgaagttcgtcgacgggaatgggcaaggccgtcgctccaggctcggaggtcgtggacgaggcttcaggcaagaaggtcggggcagtgagcaccgctctgggctcccgcgggatgggcctgctaagactcgaagaagcactgaaaccgggctcggtcctccgcgccggcggcaacagggacgtgagggtccaggcgatcaagccggactggtggccagccgagtggacacaggtgcttcaggaacagcgcgcagccgcttgacagcagcggagctgtatgtagtactggaccccaaacccaaaccctgcctgccgtcagttagtcgcctcttggaagaggacccaaacaatccccatagctaaccgttttcagcttcggtttttagtcttgttgtctggtgtatcaaggcggagcctgtttttttttttcctcgcagaagacgaggaaggcaggagggcctgtttctcttcctctctgcctgctgctgtgttcagctgcggcatctcgttcagaacgagatgagcaaactgtgtgagtgtgtgtgtggcccaaacaggcagtgtgttcgaataagtttatctgtactacactgaataataagtttctctgtctggatgatcttgtacaacgttttatattggacggtcatgggctcccggctctgtacgttgcgttgctctcgcatgtaaagcatttcatgctggggattgtctcagcattatacttttttttaggaactaaatt

SEQ ID NO: 79573 - DNA, 3582 bp, Zea Mays
tattagagccaaacaaacatgcttatcaaattcagaacctaatacacattaggaactgggtcatcaaatacaacgatcagtagactggttaactacaataatcaaaactccactagcatgtaagtggcaactgggtcattgccccgtcattacaaaacatcagttcactaccatcgctcccacaatccatcatctctgaccgcaatacccagccagcctagcttccattccatcaccgtgtcatcacacgactcactcgctacttcgctagacactacacctcggcagcagcttgtaactcactcactcactgggtgctgctgagctgctgaaccacggcctccatggtcggccgctgacctggcgtctcgctcgtgcaatacgcagcaacagccgccagcctcgccgcctccgttctcgagaacgcgccgtcgaggttcgcgtcgaccaggccgccgaggtcgctgacagcggcggcgccgaccttcagctgggagacgtccctccttcccgtgaggacctggaggaccacgaccccgaacgcgaagacgtcgctcttgtccgtgaaccggcccgtggcggcgtactcgggcgcgaggtagcccatggcggcgctcgctttcagggccgagaagacgacgtcgtctgcgaggagcttgtgcagccccggcaccgagagcctcggcgccaggtggtggtcaaggaggatcttgtcggccgatatgttctggtgcaccaccggtggcttgctgcccttcttgctgtggaggccaatcaagaacggtagcaccggaagaaccatccttgacgtccagataccgcgacaggcagccattaaccatgaagtcatacacgaggaagcattcccctctccccctggagcagcagaatcccctcaggctgacaagattgtcgtgctgtaggagggtgagcatcttcagaccacgcaggaaatccgactcctcttgcttgcagctcgtcttgctgaggcttttgacagcgactaccgatccatcccgaaggatccctttgtacgtcgcggcggcgaagccactcttcccgagcaagttcacgtcggagaagtactgcgtcgcgcactctacctcctctaggttgaatctgaagctatcaccaactacttgaccgggtgatccaacaccagccccacctgcagacaacgggtcccagctgttcgagtactcgacgctgatcaaaggagaggcgctccttctgcaggcttccttctgctggaaatggtcggtgctgagcctgctatcagaaacctccagcgagcttccgatcttctgtttctgccggcggtaccaggagaacgcaaataaaccgcaaaatgcagcaccgatcaccgccgcgacaacagcgacgataagaactccttgggacgcgtttgcggactttgagcagctagcgcctgagcagccgtctggatttgctgattgaggcacctgccttgtcttgacagtaccgtctggtccaaaaggctcgggcttgctgggcttcaggccatcctctgaagaaaggcaaagctctagcaaactgaagccagcgccacaaagccctttgttattcatatactggaagccaccattcagtctcctcaatcctagcatccaacacagaattgtagtggttaaaataccatgaagactaacaaaaaaaagtacaagtttcagaaaggctatgagattattaccaacagggacactcccagaaagggtgttgttgcgaacatcaaagacctcaagcaatggaacctcagcaatcttggatgggattgaaccaaacaggctgttgaagctcaaatcaagccgtctcagctgtgttagctcaccaagggttgccggaatggctccatcaagctgattagactgcatcgcgagcacggttagcttattcaggttgcccagctggggaggtatgctgcctgtcaactgattgtaaccaagctgcaacactgcaaaagggtagtgagagaactatgtaaattaatttatggcattgcaaatcagcacttttgatgttaaaagaccaaactcatcagctcttttctgaactttcatgatagacgtgaccataacctggcctacgcagctagcatgtggactaattgcatgtgcaagtaaacaaataaacccctgtggcatccaaacgatactcctagtcgaatgcccattaggatacaaaatattactataaacctagttctacaaaacaccaaaacatgaacagaagaacgacagatcgacattggtggggaagacctaatcatcaaagccgtatccacatgtatgattagtcccggttcagatttcacaaagagcagaaaaaaaaggtaacacaaagagctcaaaatcaagtcaaatcgaagaaattccttctgtcctgctggcaaacgttctgtatctcagcgacagatccaatctgaagccacgccgcaaaaatagtcccctcagaagcagaaacaaaaatattgagtaaaatataccggtggccaatgcttcaactctcaaagaagctcgcacagatgtgcacgaataaaataaaatataaacatttgactgctacacactgctccaaaagaaaacccagaatagaaacgcaaaatcagagagtggttggtgagaagtatacacatgacccgtttcaaaaaaataaccgttgcactgattgtggcatgtaggtgctgggtgcagcacctagtaagaagcgagtgcatagcggttgaattttcacattgatgggcaactgcttttcgcgctttctgctcacaaatactctatcaaactctagtactatacagtagcagacgagtaaatgagccacctaaaaacaaaactgactttaagatgtctccattctgccaaaaaaaaacagcaagaaactgacgaaaaatggaataaccattttcgccatttgaaatacggatcctttgtaccaaaacgaggaaagaacggccatggatagtgcaatggttcttgaatcgctgaaaatggagcttacgcaacttgtacttaaacagtgccactttggtttgaaaagaaagcaagatatccagcatggaagacccctaaaaggatttctgtaacttagcaaaaggtgaagtagcccctttataaaggtcaaatggaggaagagaacatattcctcccccagtgttcaaatccgaaatacgaacgagctcagaatgtcaggcacgtaaaccccagtcaccaggcaagcgaaatgttcactgattactgaacccaggaaaagccaaccaagaagatgtcctttatccaactttccacccagaaaaacccgagaatgaaggcacggaaagctcaaaatctcaccttggaggttggcaatggcagcaatctccacgggcacgggcccggtgagatggttcacgtcgaggtacaggtccgtgagctcggacagcttcccaatctcccgcggaatgggccccttgatgccgttgtagtggaggtacagcccctggagccgccgcagcccggcgaccgccggcggcagggttcccgagagcccgcggccctgcagcgatacggcggtgacgcggccgtc

SEQ ID NO: 79574 - DNA, 2013 bp, Zea Mays
gccgccgaggctgatcccctttcccgtctccgcaccgcacacgcatcgagcggctcggcggctccgtctcatgagagccgtcgctgctgccgcctcgcccccgctccgcgccctcctcctcctctcccgccacccacgccgcgcaggcttcaccaactggccgtcgctgcctaggggccagaacgcaggacccacagccccgccggccgccaccgcccccaagcctgctgcgccgtccaggaggcaaggccgcggcctcactgccagcctgcctcgccaagtcgcccggatctcgacgccccacctgcggccgccggcgaccccgccaaggtgccctgacagacgccatcagagccacggagttcgtgcgctggctggttgtccgcggaagacggtccgccacctccctgctccaacctcgcacctccggttcaccatgaacccttcgtcgtcctcctcctcctctggcgggtaccactccagggccgctgccttcgcttccccgcagccacgcggcggtggcggcagacggcgtggtggcggccgcggccaagacgggagcgaccgcatcgacgcccttggccgcctgctgacgagggtgttgcgccacatggcggcggagctgcgcctagatatgaggaccgatggatacgtgcgcgtccgcgacctgctgaagctcaaccttcagaccttcgccaaggtccctctcaagtctcacactgttgacgagatcagggaggcagtcaggcgggataacaagcagagatttagtctgttggaggaagatggcgagctgttgatccgggcgaaccagggacacacagtaacaactgtcacatcagagagcctgctgaagcccattttgtcccctgatgaagtgtcagtttgtgtgcatggaacttacagaaaaaatcttgattcgattttgcaatctgggctaaagcggatggcaaggttacatgtacatttctcaagtggcttaccatcagacggagaagtaatcagtgatgggatgaagctttatatttcagacaacaaagtgatcttgacagaaggttttggttttgatggcgttgtccctgtgaaatactttgaaagaatcgaaacatggccaggacgagctccaataccgttccaaagataacaggccatgtttcagcattgctagttcgtacgtactgaaaaatgatttgtcatgatgtatcccggagaaccattttttttggtaattcacatacactattttggggggttggcttttttttttgggtgggggggagtcactttgattgtgttgggacctctcagatattcgtttgatgatttttgcatactctgtgaaaagccgtggttcttcgtgacctttttttttggatttttgtgtgtaacgaaaccgaaagacgagcgagttcttttcttcgtgcttgtcaaccgtatatcctaattatctgaattaggcgatgcaaatccatggcgcttaggacatgatatccgtgcatggagtatgagaagaagtatccagaggatgcagcaagcagaccttgaaatgaaaagtatcatcgatctgagagttgcctgctggctgggctggtgtccttcctgtaagttcattaccatctctgctcctggtgttagagctgattgacgtgcggatgatggcttttaaattttaatgtcatgaggcttgatcattcagaaatacagcatagcagtttggcaacttccagaagcatacgcctgaggagcgcaacgtcacttcgccaatatttttgtgtatgtgtgttaccaatcactggaaaaatactaacgtttttttccggaaattttgatcattcgttttattcaaaatatttatttaaaaatataaaattttaagtcaaacataaactaatttaaataataaaacaaattataaaaataaatgataactcattattttttaagtaaaataaatagttataatttttttaaaaaatcaacggtatcatatatttataaaatggagaaagtaac

SEQ ID NO: 79575 - DNA, 1879 bp, Zea Mays
atcccctttcccgtctccgcaccgcacacgcatcgagcggctcggcggctccgtctcatgagagccgtcgctgctgccgcctcgcccccgctccgcgccctcctcctcctctcccgccacccacgccgcgcaggcttcaccaactggccgtcgctgcctaggggccagaacgcaggacccacagccccgccggccgccaccgcccccaagcctgctgcgccgtccaggaggcaaggccgcggcctcactgccagcctgcctcgccaagtcgcccggatctcgacgccccacctgcggccgccggcgaccccgccaaggtgccctgacagacgccatcagagccacggagttcgtgcgctggctggttgtccgcggaagacggtccgccacctccctgctccaacctcgcacctccggttcaccatgaacccttcgtcgtcctcctcctcctctggcgggtaccactccagggccgctgccttcgcttccccgcagccacgcggcggtggcggcagacggcgtggtggcggccgcggccaagacgggagcgaccgcatcgacgcccttggccgcctgctgacgagggtgttgcgccacatggcggcggagctgcgcctagatatgaggaccgatggatacgtgcgcgtccgcgacctgctgaagctcaaccttcagaccttcgccaaggtccctctcaagtctcacactgttgacgagatcagggaggcagtcaggcgggataacaagcagagatttagtctgttggaggaagatggcgagctgttgatccgggcgaaccagggacacacagtaacagtataaggcagaatgtaaacatcttgatacatctagatgttagtaaagcacttaaagatgggatgaagctttatatttcagacaacaaagtgatcttgacagaaggttttggttttgatggcgttgtccctgtgaaatactttgaaagaatcgaaacatggccaggacgagctccaataccgttccaaagataacaggccatgtttcagcattgctagttcgtacgtactgaaaaatgatttgtcatgatgtatcccggagaaccattttttttggtaattcacatacactattttggggggttggcttttttttttgggtgggggggagtcactttgattgtgttgggacctctcagatattcgtttgatgatttttgcatactctgtgaaaagccgtggttcttcgtgacctttttttttggatttttgtgtgtaacgaaaccgaaagacgagcgagttcttttcttcgtgcttgtcaaccgtatatcctaattatctgaattaggcgatgcaaatccatggcgcttaggacatgatatccgtgcatggagtatgagaagaagtatccagaggatgcagcaagcagaccttgaaatgaaaagtatcatcgatctgagagttgcctgctggctgggctggtgtccttcctgtaagttcattaccatctctgctcctggtgttagagctgattgacgtgcggatgatggcttttaaattttaatgtcatgaggcttgatcattcagaaatacagcatagcagtttggcaacttccagaagcatacgcctgaggagcgcaacgtcacttcgccaatatttttgtgtatgtgtgttaccaatcactggaaaaatactaacgtttttttccggaaattttgatcattcgttttattcaaaatatttatttaaaaatataaaattttaagtcaaacataaactaatttaaataataaaacaaattataaaaataaatgataactcattattttttaagtaaaataaatagttataatttttttaaaaaatcaacggtatcatatatttataaaatggagaaagtaac

SEQ ID NO: 79576 - DNA, 1149 bp, Zea Mays
ctttcccgtctccgcaccgcacacgcatcgagcggctcggcggctccgtctcatgagagccgtcgctgctgccgcctcgcccccgctccgcgccctcctcctcctctcccgccacccacgccgcgcaggcttcaccaactggccgtcgctgcctaggggccagaacgcaggacccacagccccgccggccgccaccgcccccaagcctgctgcgccgtccaggaggcaaggccgcggcctcactgccagcctgcctcgccaagtcgcccggatctcgacgccccacctgcggccgccggcgaccccgccaaggtgccctgacagacgccatcagagccacggagttcgtgcgctggctggttgtccgcggaagacggtccgccacctccctgctccaacctcgcacctccggttcaccatgaacccttcgtcgtcctcctcctcctctggcgggtaccactccagggccgctgccttcgcttccccgcagccacgcggcggtggcggcagacggcgtggtggcggccgcggccaagacgggagcgaccgcatcgacgcccttggccgcctgctgacgagggtgttgcgccacatggcggcggagctgcgcctagatatgaggaccgatggatacgtgcgcgtccgcgacctgctgaagctcaaccttcagaccttcgccaaggtccctctcaagtctcacactgttgacgagatcagggaggcagtcaggcgggataacaagcagagatttagtctgttggaggaagatggcgagctgttgatccgggcgaaccagggacacacagtaacaactgtcacatcagagagcctgctgaagcccattttgtcccctgatgaagtgtcagtttgtgtgcatggaacttacagaaaaaatcttgattcgattttgcaatctgggctaaagcggatggcaaggttacatgtacatttctcaagtggcttaccatcagacggagaagtaatcagtggtctactcctctggtgggtaagttgggtgcttgacagtggatgtacaaatcacatgaccggggagaaagacatgtttcatacattgcaactaactcaagaagcacaagaaattgtttttggagatagtggcaagagtaaggtgattggtattggtaaaat

SEQ ID NO: 79577 - DNA, 1039 bp, Zea Mays
ctttcccgtctccgcaccgcacacgcatcgagcggctcggcggctccgtctcatgagagccgtcgctgctgccgcctcgcccccgctccgcgccctcctcctcctctcccgccacccacgccgcgcaggcttcaccaactggccgtcgctgcctaggggccagaacgcaggacccacagccccgccggccgccaccgcccccaagcctgctgcgccgtccaggaggcaaggccgcggcctcactgccagcctgcctcgccaagtcgcccggatctcgacgccccacctgcggccgccggcgaccccgccaaggtgccctgacagacgccatcagagccacggagttcgtgcgctggctggttgtccgcggaagacggtccgccacctccctgctccaacctcgcacctccggttcaccatgaacccttcgtcgtcctcctcctcctctggcgggtaccactccagggccgctgccttcgcttccccgcagccacgcggcggtggcggcagacggcgtggtggcggccgcggccaagacgggagcgaccgcatcgacgcccttggccgcctgctgacgagggtgttgcgccacatggcggcggagctgcgcctagatatgaggaccgatggatacgtgcgcgtccgcgacctgctgaagctcaaccttcagaccttcgccaaggtccctctcaagtctcacactgttgacgagatcagggaggcagtcaggcgggataacaagcagagatttagtctgttggaggaagatggcgagctgttgatccgggcgaaccagggacacacagtaacaactgtcacatcagagagcctgctgaagcccattttgtcccctgatgaagtgtcagtttgtgtgcatggaacttacagaaaaaatcttgattcgattttgcaatctgggctaaagcggatggcaaggttacatgtacatttctcaagtggcttaccatcagacggagaagtaatcagtggtttatgcgtccggaggctcaagttggatactcgatagcgggtgcacaaa

SEQ ID NO: 79578 - DNA, 1650 bp, Zea Mays
ctttcccgtctccgcaccgcacacgcatcgagcggctcggcggctccgtctcatgagagccgtcgctgctgccgcctcgcccccgctccgcgccctcctcctcctctcccgccacccacgccgcgcaggcttcaccaactggccgtcgctgcctaggggccagaacgcaggacccacagccccgccggccgccaccgcccccaagcctgctgcgccgtccaggaggcaaggccgcggcctcactgccagcctgcctcgccaagtcgcccggatctcgacgccccacctgcggccgccggcgaccccgccaaggtgccctgacagacgccatcagagccacggagttcgtgcgctggctggttgtccgcggaagacggcagtcaggcgggataacaagcagagatttagtctgttggaggaagatggcgagctgttgatccgggcgaaccagggacacacagtaacaactgtcacatcagagagcctgctgaagcccattttgtcccctgatgaagtgtcagtttgtgtgcatggaacttacagaaaaaatcttgattcgattttgcaatctgggctaaagcggatggcaaggttacatgtacatttctcaagtggcttaccatcagacggagaagtaatcagtgatgggatgaagctttatatttcagacaacaaagtgatcttgacagaaggttttggttttgatggcgttgtccctgtgaaatactttgaaagaatcgaaacatggccaggacgagctccaataccgttccaaagataacaggccatgtttcagcattgctagttcgtacgtactgaaaaatgatttgtcatgatgtatcccggagaaccattttttttggtaattcacatacactattttggggggttggcttttttttttgggtgggggggagtcactttgattgtgttgggacctctcagatattcgtttgatgatttttgcatactctgtgaaaagccgtggttcttcgtgacctttttttttggatttttgtgtgtaacgaaaccgaaagacgagcgagttcttttcttcgtgcttgtcaaccgtatatcctaattatctgaattaggcgatgcaaatccatggcgcttaggacatgatatccgtgcatggagtatgagaagaagtatccagaggatgcagcaagcagaccttgaaatgaaaagtatcatcgatctgagagttgcctgctggctgggctggtgtccttcctgtaagttcattaccatctctgctcctggtgttagagctgattgacgtgcggatgatggcttttaaattttaatgtcatgaggcttgatcattcagaaatacagcatagcagtttggcaacttccagaagcatacgcctgaggagcgcaacgtcacttcgccaatatttttgtgtatgtgtgttaccaatcactggaaaaatactaacgtttttttccggaaattttgatcattcgttttattcaaaatatttatttaaaaatataaaattttaagtcaaacataaactaatttaaataataaaacaaattataaaaataaatgataactcattattttttaagtaaaataaatagttataatttttttaaaaaatcaacggtatcatatatttataaaatggagaaagtaac

SEQ ID NO: 79579 - DNA, 1875 bp, Zea Mays
ctttcccgtctccgcaccgcacacgcatcgagcggctcggcggctccgtctcatgagagccgtcgctgctgccgcctcgcccccgctccgcgccctcctcctcctctcccgccacccacgccgcgcaggcttcaccaactggccgtcgctgcctaggggccagaacgcaggacccacagccccgccggccgccaccgcccccaagcctgctgcgccgtccaggaggcaaggccgcggcctcactgccagcctgcctcgccaagtcgcccggatctcgacgccccacctgcggccgccggcgaccccgccaaggtgccctgacagacgccatcagagccacggagttcgtgcgctggctggttgtccgcggaagacggtccgccacctccctgctccaacctcgcacctccggttcaccatgaacccttcgtcgtcctcctcctcctctggcgggacgagggtgttgcgccacatggcggcggagctgcgcctagatatgaggaccgatggatacgtgcgcgtccgcgacctgctgaagctcaaccttcagaccttcgccaaggtccctctcaagtctcacactgttgacgagatcagggaggcagtcaggcgggataacaagcagagatttagtctgttggaggaagatggcgagctgttgatccgggcgaaccagggacacacagtaacaactgtcacatcagagagcctgctgaagcccattttgtcccctgatgaagtgtcagtttgtgtgcatggaacttacagaaaaaatcttgattcgattttgcaatctgggctaaagcggatggcaaggttacatgtacatttctcaagtggcttaccatcagacggagaagtaatcagtgatgggatgaagctttatatttcagacaacaaagtgatcttgacagaaggttttggttttgatggcgttgtccctgtgaaatactttgaaagaatcgaaacatggccaggacgagctccaataccgttccaaagataacaggccatgtttcagcattgctagttcgtacgtactgaaaaatgatttgtcatgatgtatcccggagaaccattttttttggtaattcacatacactattttggggggttggcttttttttttgggtgggggggagtcactttgattgtgttgggacctctcagatattcgtttgatgatttttgcatactctgtgaaaagccgtggttcttcgtgacctttttttttggatttttgtgtgtaacgaaaccgaaagacgagcgagttcttttcttcgtgcttgtcaaccgtatatcctaattatctgaattaggcgatgcaaatccatggcgcttaggacatgatatccgtgcatggagtatgagaagaagtatccagaggatgcagcaagcagaccttgaaatgaaaagtatcatcgatctgagagttgcctgctggctgggctggtgtccttcctgtaagttcattaccatctctgctcctggtgttagagctgattgacgtgcggatgatggcttttaaattttaatgtcatgaggcttgatcattcagaaatacagcatagcagtttggcaacttccagaagcatacgcctgaggagcgcaacgtcacttcgccaatatttttgtgtatgtgtgttaccaatcactggaaaaatactaacgtttttttccggaaattttgatcattcgttttattcaaaatatttatttaaaaatataaaattttaagtcaaacataaactaatttaaataataaaacaaattataaaaataaatgataactcattattttttaagtaaaataaatagttataatttttttaaaaaatcaacggtatcatatatttataaaatggagaaagtaac

SEQ ID NO: 79580 - DNA, 1709 bp, Zea Mays
ctttcccgtctccgcaccgcacacgcatcgagcggctcggcggctccgtctcatgagagccgtcgctgctgccgcctcgcccccgctccgcgccctcctcctcctctcccgccacccacgccgcgcaggcttcaccaactggccgtcgctgcctaggggccagaacgcaggacccacagccccgccggccgccaccgcccccaagcctgctgcgccgtccaggaggcaaggccgcggcctcactgccagcctgcctcgccaagtcgcccggatctcgacgccccacctgcggccgccggcgaccccgccaaggtgccctgacagacgccatcagagccacggagttcgtgcgctggctggttgtccgcggaagacggtccgccacctccctgctccaacctcgcacctccggttcaccatgaacccttcgtcgtcctcctcctcctctggcgggtaccactccagggccgctgccttcgcttccccgcagccacgcggcggtggcggcagacggcgtggtggcggccgcggccaagacgggagcgaccgcatcgacgcccttggccgcctgctgacgagggtgttgcgccacatggcggcggagctgcgcctagatatgaggaccgatggatacgtgcgcgtccgcgacctgctgaagctcaaccttcagaccttcgccaaggtccctctcaagtctcacactgttgacgagatcagggaggcagtcaggcgggataacaagcagagatttagtctgttggaggaagatggcgagctgttgatccgggcgaaccagggacacacagtaacaactgtcacatcagagagcctgctgaagcccattttgtcccctgatgaagtgtcagtttgtgtgcatggaacttacagaaaaaatcttgattcgattttgcaatctgggctaaagcggatggcaaggttacatgtacatttctcaagtggcttaccatcagacggagaagtaatcagtgatgggatgaagctttatatttcagacaacaaagtgatcttgacagaaggttttggttttgatggcgttgtccctgtgaaatactttgaaagaatcgaaacatggccaggacgagctccaataccgttccaaagataacaggccatgtttcagcattgctagttcgcgatgcaaatccatggcgcttaggacatgatatccgtgcatggagtatgagaagaagtatccagaggatgcagcaagcagaccttgaaatgaaaagtatcatcgatctgagagttgcctgctggctgggctggtgtccttcctgtaagttcattaccatctctgctcctggtgttagagctgattgacgtgcggatgatggcttttaaattttaatgtcatgaggcttgatcattcagaaatacagcatagcagtttggcaacttccagaagcatacgcctgaggagcgcaacgtcacttcgccaatatttttgtgtatgtgtgttaccaatcactggaaaaatactaacgtttttttccggaaattttgatcattcgttttattcaaaatatttatttaaaaatataaaattttaagtcaaacataaactaatttaaataataaaacaaattataaaaataaatgataactcattattttttaagtaaaataaatagttataatttttttaaaaaatcaacggtatcatatatttataaaatggagaaagtaac

SEQ ID NO: 79581 - DNA, 1529 bp, Zea Mays
ctttcccgtctccgcaccgcacacgcatcgagcggctcggcggctccgtctcatgagagccgtcgctgctgccgcctcgcccccgctccgcgccctcctcctcctctcccgccacccacgccgcgcaggcttcaccaactggccgtcgctgcctaggggccagaacgcaggacccacagccccgccggccgccaccgcccccaagcctgctgcgccgtccaggaggcaaggccgcggcctcactgccagcctgcctcgccaagtcgcccggatctcgacgccccacctgcggccgccggcgaccccgccaaggtgccctgacagacgccatcagagccacggagttcgtgcgctggctggttgtccgcggaagacggcagtcaggcgggataacaagcagagatttagtctgttggaggaagatggcgagctgttgatccgggcgaaccagggacacacagtaacagtataaggcagaatgtaaacatcttgatacatctagatgttagtaaagcacttaaagatgggatgaagctttatatttcagacaacaaagtgatcttgacagaaggttttggttttgatggcgttgtccctgtgaaatactttgaaagaatcgaaacatggccaggacgagctccaataccgttccaaagataacaggccatgtttcagcattgctagttcgtacgtactgaaaaatgatttgtcatgatgtatcccggagaaccattttttttggtaattcacatacactattttggggggttggcttttttttttgggtgggggggagtcactttgattgtgttgggacctctcagatattcgtttgatgatttttgcatactctgtgaaaagccgtggttcttcgtgacctttttttttggatttttgtgtgtaacgaaaccgaaagacgagcgagttcttttcttcgtgcttgtcaaccgtatatcctaattatctgaattaggcgatgcaaatccatggcgcttaggacatgatatccgtgcatggagtatgagaagaagtatccagaggatgcagcaagcagaccttgaaatgaaaagtatcatcgatctgagagttgcctgctggctgggctggtgtccttcctgtaagttcattaccatctctgctcctggtgttagagctgattgacgtgcggatgatggcttttaaattttaatgtcatgaggcttgatcattcagaaatacagcatagcagtttggcaacttccagaagcatacgcctgaggagcgcaacgtcacttcgccaatatttttgtgtatgtgtgttaccaatcactggaaaaatactaacgtttttttccggaaattttgatcattcgttttattcaaaatatttatttaaaaatataaaattttaagtcaaacataaactaatttaaataataaaacaaattataaaaataaatgataactcattattttttaagtaaaataaatagttataatttttttaaaaaatcaacggtatcatatatttataaaatggagaaagtaac

SEQ ID NO: 79582 - DNA, 1259 bp, Zea Mays
ctctccctctggcatgacgagggtgttgcgccacatggcggcggagctgcgcctagatatgaggaccgatggatacgtgcgcgtccgcgacctgctgaagctcaaccttcagaccttcgccaaggtccctctcaagtctcacactgttgacgagatcagggaggcagtcaggcgggataacaagcagagatttagtctgttggaggaagatggcgagctgttgatccgggcgaaccagggacacacagtaacaatgggatgaagctttatatttcagacaacaaagtgatcttgacagaaggttttggttttgatggcgttgtccctgtgaaatactttgaaagaatcgaaacatggccaggacgagctccaataccgttccaaagataacaggccatgtttcagcattgctagttcgtacgtactgaaaaatgatttgtcatgatgtatcccggagaaccattttttttggtaattcacatacactattttggggggttggcttttttttttgggtgggggggagtcactttgattgtgttgggacctctcagatattcgtttgatgatttttgcatactctgtgaaaagccgtggttcttcgtgacctttttttttggatttttgtgtgtaacgaaaccgaaagacgagcgagttcttttcttcgtgcttgtcaaccgtatatcctaattatctgaattaggcgatgcaaatccatggcgcttaggacatgatatccgtgcatggagtatgagaagaagtatccagaggatgcagcaagcagaccttgaaatgaaaagtatcatcgatctgagagttgcctgctggctgggctggtgtccttcctgtaagttcattaccatctctgctcctggtgttagagctgattgacgtgcggatgatggcttttaaattttaatgtcatgaggcttgatcattcagaaatacagcatagcagtttggcaacttccagaagcatacgcctgaggagcgcaacgtcacttcgccaatatttttgtgtatgtgtgttaccaatcactggaaaaatactaacgtttttttccggaaattttgatcattcgttttattcaaaatatttatttaaaaatataaaattttaagtcaaacataaactaatttaaataataaaacaaattataaaaataaatgataactcattattttttaagtaaaataaatagttataatttttttaaaaaatcaacggtatcatatatttataaaatggagaaagtaac

SEQ ID NO: 79583 - DNA, 575 bp, Zea Mays
gcctccaccacgcgagcctcaaaacctaacgctgtccgccgccacctctcctccggcatcgacgagggtaaggagctcaaggtcaagggccccgtgcggatgcctaccaaggtgctccacatcaccaccaggaagtctccctgtggagaaggtaccaacacctgggatcgctttgagatgaggattcacaagagggtgatcgatctcgtcagtacaccagacgttgtcaagcagatcacctcaatcaccattgaaccaggtgtcgaggttgaggtgactatcagtgacgcttaatatggtagccttatcatttcaaaaggcttctagtgaacaggatattttcaattcctagtgagaacttgtgtaacagaggaatccaagtatttcatatcaaagtttaaaagtcttatcgagggttcgcggtatggatgtatcctgtttcaaatgatttctcctaatgtatgaatgaaaacggttaatggatgccccagtatgcattgcttttcatgacgtgagaaatatagattctgtttcagatgttatcagatgaaccagagttgcctgtttcactgtac

SEQ ID NO: 79584 - DNA, 689 bp, Zea Mays
atctcctaaaacgtagcagcaggcttgacagccactgaaacgtaatttattattcttattattccaacgaaccactcttgaaatgaaatttggcttacagtgcacaaacttaagatccgaaatagaaacttgctacaaacaactaacgttacagactcaaaacttaatcccgtgaaagagaaaaaacagaacaaaagaaatgtatttcctcagcacaagcctatcacttcaatcaagctgcgtggtagtatcgcacgctttattaattcttgacgaaagtgctcagcacatcgaagtagtcggggaaggtcttccgggtgcacccagggtcccggatggtcacggggacctcggcacaggcggcaagggagaaggccatggccatcctgtggtcgtcgtacgtgtcgatcgccgtcacgttcagcttctccggcggcgtgatgatgcagtagtccggcccttcctcaacagatgctcccagctgtggaaaacacagacagcaaccgaggatggagcgaccgcaggcaagccgctaagaggcagcgagctatggaaagacgacgtgagacatgtgaagtatgtagccttaccttggttagctccgtccggatcgcaaccatcctctcggtctcctttactctccaggaagccacgtctctgatggctgtcgggccatcggcaaagagggc

SEQ ID NO: 79585 - DNA, 462 bp, Zea Mays
ccggcggcgcggcgaggtccagcgacacggtgcccgcggcggccttggtcgccatggccgccattgccgacgccgatggttggtagggcgggcggcctgggcgcgcggggttggggagagtgggttggtttggttcgcctcgcggttggtggcgtggactggactgccacctgcacggggtcggggaggaagaaatagaagcgggctgggagccggtgaggtgagcctaggacctgacaactgagagagaggaacggcaagctctcgctgcctgccaccaacccccgcgacacgacgcgctgcagcggtgccgtctagtagcagatctgggcgcgagagagaccatgagaggggcgagggggaagtaggtgggcgcatccggcgggccggagttagttgttggtttttttcttcgtcttccttttccacaagtgtgcacactggacacgaatgaaacgttag

SEQ ID NO: 79586 - DNA, 1446 bp, Zea Mays
aaacgaaccagagggagagtttgatcctttcgagttggatcccagtgaagtttacacgttagaagatttccttgccgaggatgaaatattagatgaatttggaaggaagatcgaagagaatttgaaggttgcaatcgatggagaagcatcgaatccacctcgccgcagacgcctctccggaatcaggagagttattccaaggaatcgacaagcgagcagatgtcactggtaaagatggccactcaccactccaaaagtgtactgcggcaattcggatgcttgcatatggcagctcagctgatcaacttgatgaagttttgaagattggcacaagcacggctttagagtgtttgggaaattttgccaaaggggtgatagaatgctttggtccagagtacttgcgtcctccaaggagtgacgagctagaaaatatacttcaacaaaatgagtctcgtggttttccagggatgataggaagcattgactgtatgcattgggcttggaagaattgcccaaaaggttgggccggcatgtttacacgtggtgacaaaggcgttcctactatgattcttgaagcagttgcatcacgagatcttcgcatatggcatgctttttttggtactgccggatctcaaaatgacattaatgtattgaataagtctacactgttcatcgacgttctaagaggagaagctccaaaggtacattacactgttaatgggaatcaatatgaaactccatattatcttgccgataggatatatccagagtgggcagtcttcgtgaagactatacatcttcctcagttagaaaaagacaaattatttgcactacgtcaagaatctacaaggaaagatgttgaatgcgcgttcggtgtgctacaatctcgttttgatattgttcgctgaccagcacgtttatggaagaggaaggatgttgtgaacataatgcaagcttgtgttatacttcataatatgatagtcgaagatgaaaaagaatcggttacaattccgttggacttgaacgagaatccaagtccaactattgtgctaccaccggaagtgcgtactagtgacaatcctaacccctgcttcgtggaggtgctacagagaaacgctgctctccgtgctcgctcaactcatactcagcttaggacagatttggttgaacacatatggcaacactatggaaacaatcaaaattagattgacatgaagctatgtattcatactaattgtttcctattttgcaatgtcatttcatgattcgggtatcaaatgatataattataaattatattatgtttatataaatcatgtcttaattgagtatcttgatgagctcttaaacatgcagcaaaatagctacaaagatccaatgtatacttgatcaatacagatcaataaaggctttttatgaattaaatagtacatagacagtcttacc

SEQ ID NO: 79587 - DNA, 1522 bp, Zea Mays
aaacgaaccagagggagagtttgatcctttcgagttggatcccagtgaagtttacacgttagaagatttccttgccgaggatgaaatattagatgaatttggaaggaagatcgaagagaatttgaaggttgcaatcgatggagaagcatcgaatccacctcgccgcagacgcctctccggaatcaggagagttattccaaggaatcgacaaggaggttccgtatgagaaggccgctttttcttcgcattgtggaaaaacttggtgagtggtcctcttattttacacagcgagcagatgtcactggtaaagatggccactcaccactccaaaagtgtactgcggcaattcggatgcttgcatatggcagctcagctgatcaacttgatgaagttttgaagattggcacaagcacggctttagagtgtttgggaaattttgccaaaggggtgatagaatgctttggtccagagtacttgcgtcctccaaggagtgacgagctagaaaatatacttcaacaaaatgagtctcgtggttttccagggatgataggaagcattgactgtatgcattgggcttggaagaattgcccaaaaggttgggccggcatgtttacacgtggtgacaaaggcgttcctactatgattcttgaagcagttgcatcacgagatcttcgcatatggcatgctttttttggtactgccggatctcaaaatgacattaatgtattgaataagtctacactgttcatcgacgttctaagaggagaagctccaaaggtacattacactgttaatgggaatcaatatgaaactccatattatcttgccgataggatatatccagagtgggcagtcttcgtgaagactatacatcttcctcagttagaaaaagacaaattatttgcactacgtcaagaatctacaaggaaagatgttgaatgcgcgttcggtgtgctacaatctcgttttgatattgttcgctgaccagcacgtttatggaagaggaaggatgttgtgaacataatgcaagcttgtgttatacttcataatatgatagtcgaagatgaaaaagaatcggttacaattccgttggacttgaacgagaatccaagtccaactattgtgctaccaccggaagtgcgtactagtgacaatcctaacccctgcttcgtggaggtgctacagagaaacgctgctctccgtgctcgctcaactcatactcagcttaggacagatttggttgaacacatatggcaacactatggaaacaatcaaaattagattgacatgaagctatgtattcatactaattgtttcctattttgcaatgtcatttcatgattcgggtatcaaatgatataattataaattatattatgtttatataaatcatgtcttaattgagtatcttgatgagctcttaaacatgcagcaaaatagctacaaagatccaatgtatacttgatcaatacagatcaataaaggctttttatgaattaaatagtacatagacagtcttacc

SEQ ID NO: 79588 - DNA, 2260 bp, Zea Mays
cgtctcaggaggacttgaagcagttcaggcaatggggaagcagaacaccgggccaccctgagaactttgagactccaggagttgaagttaccaccgggcctcttggtcagggtatcgccaatgccgttgggttggcacttgctgagaagcacctggctgcccgcttcaacaagcctgacagtgagatcgtcgaccactacacgtacgttattttgggagatggctgccaaatggagggtattgctaatgaagcttgctccttggctggacactggggtcttggcaagctgattgctttctacgatgacaaccacatttccatcgacggagacacggagattgcattcacagaggacgtgagcacccgcttcgaggctcttgggtggcacacgatctgggttaagaatgggaacaccggatatgatgacatccgcgcagccattaaggaggcgaaggcagttactgacaagcccaccttgatcaaggtgactaccacgatcggttttggatctcccaacaaggccaactcatacagtgttcatggaagtgcactgggtgccaaagaggttgaagcaaccaggcagaaccttggatggccctatgacacattctttgtaccagaggacgtcaagagtcactggagccgccacacacccgaaggtgctgcacttgaggctgattggaacgctaagtttgcagagtacgagaagaagtatgcagatgatgcagcaaccttgaaaagtatcatcacgggggagttacccactggctgggttgatgctcttcctaaatacactccagagagcccaggagatgccaccaggaacctctcccagcagtgcctgaacgcccttgctaatgttgtgcctggtcttatcggaggcagtgctgatcttgcatcctccaacatgactctgctgaagatgtttggtgacttccagaaggatacagctgaagagcgcaatgtccgcttcggagtcagagagcacggaatgggcgccatttgcaacggcattgctctgcacagcccagggtttgttccgtactgtgctacattctttgtcttcactgattacatgagaggtgccatgaggatctcggccctgtctgaagccggagtcatctatgtcatgacccacgactctattggtctcggagaagatggcccgacccatcagcccatcgagcacctggtgagcttccgtgcgatgccgaacatactgatgctccgccctgctgatggcaacgagactgccggagcatacaaagtcgcggtcctcaacaggaagaggccgtccatcctcgctctctccaggcaaaagctccctcacctgcctggcacctcgatcgagggcgtggagaagggcgggtacaccatctctgacaactcgaccggcaacaagcctgacatcattgtgatgggcaccggctccgagctggagatcgcggccaaggccgccgacgagctgaggaaggaggggaagacggtccgcgtcgtctcgttcgtctcctgggaactctttgatgagcagtcggatgagtacaaggagagcgtcctccctgccgccgtcacagcgaggatcagcatcgaggccgggtccactctcggctggcagaagtacgtcggagcccagggcaaggccattggcatcgacaagttcggcgcgagtgctcctgccgggacgatctacaaggagtacggcatcaccgtggagagcatcattgcagctgccaagagcttttaagagctaacaacggtctggagttttttttattgtcgtcgttgatgccaaaggaacactgtacctagaggacagtcctatgcctcggagcttggaataatgatgatggagggagcggaaggatgcctgccatttgttggagcgtgcgtggtagtatttctaggcctgtaataaacaatgcctttttccatttacgttgttggttttatccggtgaccctcacacgattcatcaaggtggtgagcctggctattaaatcgggtgctgttttttttttgggtaaacattggcaatggccttactgtcttgcagcagtgctttttcgtttgctggattgtgggtttaagatgctgcattttggctcttttgttgatacattttcccattggcttttgtttgtgatacatacatagcatttatatattaagctcaataatgtgacgttttatttcggtttctcttgaaatcaaacggaacttggcaagaaccattgcgacctttgtgcccaactttaccgc

SEQ ID NO: 79589 - DNA, 1955 bp, Zea Mays
gtatcagatttggggcactgtagctcgctttacaagaatgtagctacaggggcataacataacatgagcgtcgcctttttttcccctttcttcggttcttcccatgaagcagacagctcccactgcatggcttctccagttctcctttggcatgtgcagtcgctcactaccggtaccgtgagcataagacccagggcaggcgaagtggccgcttccatcagcagaagcctacgtgcagactcagctcactcccaatatcatccaacctgcagcccagggcacggaccaactcccactccccgtgcaggcgcactatgcataggacggggaaacaggcatgctaggccaacaagacagcacgatctgggaatcggattacgacccgtcaccagagccattcatggaaccaagatgcatgccaatcctgagcagtaccaccaacaggtagtaggagctagaagaacaccccacaaaaccaaaccaaccgcgcagcaataacaaacactcggtctatttgagcagcgtggctgcctctccaggcccggtaaggaagcacgaacacccaaaaataaactcaacgcactgacctgtatcggattgatttgatatcaacacaaagaaaggcaccgtttgctaggcagaatgtggcggaggctgtccttttagcatgcatggctccatcccacttgcaaagttgctgctccacaattgctagtgacctaagctcagtgcttccaccgttatgacctgtttacacgccataacgaacttttattatagccacaagattcaggaaggtccggcacgatagagacacttgcttttacaaattacaggggagaaatccatgtgaattaggttttattattaccatggcagtcgctgtaagcaagaattaggtttcattataaagttacttgtccaatgaacttaccatgaagtgatcaaactcgattgctggcacagatggacaagcaagcagcactgactctccatggtgattgccatgtggctcaaaaccagagccctttcgggtcatagttataatgtttctccctgtcctgaggagttactactacaatagctgtctgttggccctttgaaattttaaaaaaaaattcccttccaatttgcacgatagaatatgaatcgtacagttgacctccatgactctgacttcacttgtttctatgtcatattttgtagatccaaagcaataccagctagcattaaatatcttaacatattaaagacagcaaggtaaactacaagcttccttgttcagttagtctaatcaatcaggcttcagcacatgtttaatgtccgaccagagattaagctgccaatagcccaatcaaggctgggccaggccaatggcaataccagtggataagcccgatgaatctctgcagagagagagagggatgaacttgctggcaatccacaccaacttaaataccaaatccagtttcacaaatgggagatgaaaaagctcatagacccaaatagtaactaccaagttttgtttcaattaatcacgaaaatgaatatttaagggcaaaacttctaaaatggccttgccgatacaggaaaaaaaagttgctgataaaaaaaactgaagcgacctatcaattaaatccaatccaaaacaaaggacaaaattagtaagatattcaaaggttctcagtcctcattccagaattctgaaggtggaagctggcagaacttaatggcataaacgatgaaaagagctaccttgtatattatatgtaaactaggataaattagtcaaaacaacacggaagattgttctagcaacctggggtagagcttcagtttgtcatcagggacagtcgaccccaacagattttgaggaatccaatggaaaattagtgaatatagtgctaatacttcctaatgaccccacctattttcggacaagactctgatgatcg

SEQ ID NO: 79590 - DNA, 2474 bp, Zea Mays
cactaatagaaggatgaaggagaattccagggtcatagggtcaaaagagaaggatttggaacattcaattcccatcatatgtacaatatgagatgattttatacaaagcccagaccaacttcaagtcagcaatagttgaaaaagaataataataaaacagtttggaattggggaactgggatccaaattttaagtccttgtgaatcataaaagtttgtggagcaatccccattgttccaaacaggcactaatgcaaattacacaactaaacagcatctacaaatccttgtaggcgattctgtggcaacagaatctttgttttttccctgagtgacatagaaaatataggagaagtcacatttgaatattaagccaacatgtattcggacccttaaaagtaggggttcctatagcgtaagagcaaagtgaaagtatacagatgaacttcagcaagtcagaactcagaagtacattcagtatcataagctcagttttaactatgtaaagaaaatgaacatctagaacgacctcatctcaatgattgtgtataaaatttaaggcaaaaccaaactgcattgcttaacacacatatggttgttgtcaatacccaattacagtaagacaaaatgtagccaactcaaaaggaaaaacaaaaggatatggactatataccagtctatgacacttgtcctctggtgggacatacaacgccgatatcaccactggcacgaaggagatgccaactcctaacccctcatagctcgaattcaccatccaactttagcgcctcagctgcagcggcagcctcctcttcctcatcatcaatggcaaagtacgaaggtgactgccatggctcaaaaccagagccctttcgggtcatagttacactgtttctccctatcctgaggagttactacagtagcagtctgttggcctttcgaaattaaaaaaatgccttccaatttgcacgatagaatatgaatcgtacaaccattcagttgacttccatgactctgccttcacttgtttctatgtcatcttttgtagatccaaagcaataccagctagcattagttatcttaacattagcactcagctgcagatgtctattatggtcattatgcacacaaacagcaactaactaagcaacacagaactgaaacatattaaaaacaaaaggtaaagtacaagtttccttgttcagtcggtgtaactaaaagcagtggcttaacatcttatcaatcaggcttcagtacttgtttaacgtccgatcataggccaggccatgggcccatggcagtaccagtggataagcccattgaatatgtgaagagagaggaaaggaacttactggcaaggcacaccaaattaaataccaaatccagtttcacaaatgggagatggaatggaaaagctcataaacccaaatagtaactaccaagttttttgtccattaatcacgaaaggaaaatttgtaaaaatttccttgcagatagagaaaaaaaaagacaacaaaattaagagtggctgatagaaaaacttaagcaacctatcaattaaatccaatccaaaataaagaaccaaattaggaagatattcaaaggttctcagtccttattccagaattctgaagttggagtctggcagctgacagaacttaatggcatatttgatgatgaaaagagctaccttgtatattatgttaaactaggataaactagtcaaaacaacatggaacaccgttctattaaccagggtagagctacagtttgtcacccggccacccgggtcagtcgacccccgatggattttgagaattccaatggaaaattagtgcatatagtgctaatacttccaaatgaccccacctattttcagacaagactttgatgatcatctggcctagattcacccctgctaataacaatctaccattgccaaatgtgcccctgcttctccctccctcttctcaacagttctaactccaatttgaaaaaacatcccagttcaaacagtaatgcaacttggcccttccttccaatatacaatccttcaacggaatcctcaaactataaagtgagtagagtagtgacttacaatctcagacagtgtaaaagagggcacccagtcaaatgattaggtattgaagagatacctgaccactaaatagaaggatgaaggagaattccagtgtcacaatcacaaggtcaagaagagaaggatttggaacattcatgtgtacaatatgagatgcttttatacaaagcccatatcagcttcaagtcagcaatgaatggaaaagaataataataaaataatttggaattggggaactgggatccaaatttcaagtccttgtgaatcctaaaagtttgtagagcaatccccatcgttccaaacaggccctaatgcaaattacacaagtagacagcatctgcaactccttgtaggcgattctgtggcaacagaatctt

SEQ ID NO: 79591 - DNA, 2118 bp, Zea Mays
acattggacgaaaagccagattctgctatttctcacgctatctcccactcgcggcgccggcgactacaccattgaaacccacaggccacacagcgcaggaacaaaaaacggcggcgcgataagaagggcgccgctgttggcgccgggccggcccgctcccgagcggtgtccttcttcaggaagggcatacctagtggatgctcattgccggaaaagtgcctgacaaacctggcgaagggtccaacaaagacctgggcaccacgttggacatggaaaggggtcctattctgtgaatggagtgctgaacggctgatgagtgatgaggggcgatgatgctcaaccttttctggattgcatggcactgaacaatgaaggcagctacgagtgtctaattagagctaaccctctctcctcttgaagcttattttaatcacccctttttgtttgtggttctgcctaggatagtcattcagagatgtgacaaccagcacagttccacttacattgagatgactaagttgcgctgcaagagaaatgtgaagtcgttttgcatgattgaataagggtgatgctgagcccttcttttataggttatgttatcatgctttatgttttatccttttgttttatactaactcttgagtgactatgatggttcaaatttccattagagagctgtgcactaaaggagatgtcctccatcttgatttgagatcttctgagctggtactgcagatacagtccaaacaaaaagctattctgtctccatttgttgtgtaactaggatggcttgtacctcactagtcactacctccatctcgaaaggaatgcaattttgtctatgcaccctgacaagcattcgttttgggggcagtggtaagtacaagtaaccagttatgcggccatgggagagacagaaagagagagagagagagaggttacattgtgcttccactataaattgcacttgctatgatgataatggttgaatctgagccactcaagtgacctttttcctcctagtaccactgtctgaatactcctgcccccttacccccaattcccatggtgttttaatgattggttttgctgatgttgcagctaatgagacagctaatctgctctttgaattggttaaagcttttattctgttttgtactcgtgtgctcatatctgcttgttcttttgtgctactttgcaagtcctgttgatgatatgccctgattttgggctgttcttcatttgccttgctgctggatttgaacctgcgcccttggttaatgtttgtaggactgatatgctaagttagttccatgtcataagttcctacctaagtgccgctcaataacgatgaaataaaattccaatgtgaggcaatgatctgtatcatggttgacacaagcacctttgagcaatcaaggctgctatgttgttaaccttgctcttagaggacatggaaatggactcgaatatgtgaaatggactgctgacgaagggcgatgatgctcaaccttttcggagtcgcacgccattgagcaaccaaggcagctgcgtgtctggtagcctatttaataatccctttttgtttgtggttctgcctaggatggtcacctggatggatatatgacaaccaggacagttccactcacaataggatgagtagattgggcagaaagagaagggagggcctgatttctatgattgagcaaaggagatgctgagctgagcccctttcagcttctgcactctaccatcttctgagctgatgatacctgggatattctttgacgtttgctgctttactacgatggcccatgccttactagaagctgtttagtccatcacggattctttatggagtttcccaatctaaatctctggtagctggtgtttgaatctttcaatgtcagaaatgtagtggttattggctagggatccatgaggctgcggtgtgtcttaccaatcagagatctatctgtctgttatggtatcttttacgctaattctttaattcaataattatgagattttggtgatgactggtcaaaattgagccagctctgtaattcataattcatagtttggtaattcaataattatgagattttggtgtacaga

SEQ ID NO: 79592 - DNA, 6381 bp, Zea Mays
acattggacgaaaagccagattctgctatttctcacgctatctcccactcgcggcgccggcgactacaccattgaaacccacaggccacacagcgcaggaacaaaaaacggcggcgcgataagaagggcgccgctgttggcgccgggccggcccgctcccgagcggtgtccttcttcaggctgcccttcacttgtctttctgctggatctggacctgctacctgggtcaatattattgagaatttgagactaatatggcaagtcagtatcatctcatatgcacctacctaaatgcccctcaagaataaaaaaaacaagtttccagtgtggggcagtgatcaataactatggctgacaaaagcgccttggagcaatcaaggctgctatgggtaccaaactggaatactcatgtccatctcttggagatcttttcaattagctctaatgatagtggctttgtccctggatggtcatgccctcttcatgtgtgataaccggggcaactccacttatcatgtcaggagaagttgatgtggtgataaaagatgatggggataaggttaaatgattgggcaaaggcgaagctgagcccccctttcaacacatacatgcaaagaaaagggaataagaaacatgagtttatgttgtctcttcccttttctgttgaatatgttgttgctgtgtgttttcttgtctaacctacatattttctaactccattccttttgttgcatttgtcaaacaccatgcatttacctttggattccatttatcagtaggttgagatgtttcctagtttctgacattgattctgctataattgtttgcaatagccgtgttttgcatgatggatactttctgataactttgttcatcccagaatttattgcagaatttcatgagttatgtctcactactgttggaactgggtagtttggaaataagagggcattgtgttttcccaattacttcttctggtccatcataactattacagctgtgcagggtgcaacattggtccgttttggtagttcctatgcatccctttgttcttcagatattttttgtcgcttgtctgatggtcttcctttcttgtttggaactgttcttcagtggctgtgacgatcaaatgccccagctccataaagctattacgttttagcattctggattcttacctttggtattttgctcaatatgctgctaaactaggatggcttgtaccatgtacaagcaaccggtttgcaactagttgttgtcattgctatggtggtggtgtagtatatatccaactgaacaatcctactcaaaaagttcatttagaaagggatggagggagtacacgtttcttctgcaagtattgtgttgatactggggcacatctgagccatccaacatgacattactctttttgttctgtcatatacttttgtttacgagtctatttcgtctgtgtatcctaccattttcagtgatttcaacttgggatcaggatcatgatactgatggggcgaattgtcaacattgatttgatgtcacaatattcttgacttgggtaaattcggtgcatagattcctcgtgtttttggtttggatgctcaaacttagttggatgaattgctcattttgttctaaagaacgattttcttttccacactcatttaactagattcaatcgtccactaatacttataagtggttcgctaatgtgtccttacttctgtggcatgaggcattagtggtcctaatcacgtcccatggccttgatgaatcttgattgatcagtcaaacggatacacatgctacatcatagccatgagcacgactgtactttctggtcatgtgcgtgaaagcttctctatgcatgtgctattcacatatgagcagactatttctttctgtgttgttcacatgcatatcaatcgattttgccaagtgcggaaacattgggagttgggatgacaagttgttggagagggttttctttcaatcctgccaaaaaaaccaagattgggagtgggttctgggaaatattggagatgctttgattgggattagtggttgttcacatatcttcgctactgatggctggaacatgaatacttctcctgattcgctgcattggtgatctccttcccctgcagttgcctctggaacatttaacttttttgccatcttctctccttcacccttgccttttctccccttcctcttctctccgcttgtgctctctttcatgttgatcactgggtggcagctgccgctctatgcaggtgccttggtcttgttgggccctttgccaggtcttaatccggcactttgctggcgacagaatcacttgctgcaaaagctgaatccttagagcttttcagtgttgagagacaactgattagttccaaaggtaggaagttaatctccagctaggtaacgactcgttgatagctatgaaagctaggttttacggcttacagaaccttgttaagcaaggaatcagcaccacagctgggaatgtttgtgccattttcacttccagctcctgctctaatcaagtcaattccaacttggactatcacacagatagtgctaggcgagtaatcactaatcaggtaagttgacttgccataggggcacacacttgcctgttcagccatccctttttgttcgtggttttgcctaggatggtcacttggatgacaacaagcacagttcctgttggaactgcgacttctgaggtggtatgtgtggtgaggggaaggttgaggctcaggaccacggagcttgggcaccgtggctgctagctggaagagtcgaagggacgaggaactgttcacgcagcgtggcgaacagtagttgtaggtgaatagtgacgcgaatgaacagtaccttggatgaaccgtatgcggcgagcagtatatgggtttggggaagcacgggcaagatacttgcctgcttactctttcattgatcgaagggtacattagcaaccgtccttatctaatattttatctaaccaatttcttatccttctaaacaaactctgtttgttctcatacatccaaacaaactctatccccagactacgactggcgcttatccatctaaacaactagctgattttattagggctgttgtgctgccggtcataacagttccactcacattaggatgagtaaattgggcagcaagagaagggaggacctggtttctatgattgagcacaggtgatgctaagccctttttgtatggtttatgctgcgatgctttatgactatgtttttttgtttcatactgcacttgggtggctatgatggttcaactttccattaacgagcttctgcactctactaccatcttatgagctggactgggatattttatgatgtttgctgcttaactaggatggcccatgccttactagaaggtggttctatctctgtttgcttcttaactaggatgccttgcgcctctagcagtcacccaaaaaaaaacaagtctactgctggctggctggattggatacatgtattggtcatgatgattctctcgtcattactctttagcacagatgcgctgcagtgatgatccccagatccactgctgttgcctgtgttgccatctgctctgatgaccctgttcacccctgccttttcttctcgtgttcaccttgtctcctctctctctctctctctgtgtgtgtgtgtgtgtgttctgcaccgcaggaagggcatacctagtggatgctcattgccggaaaagtgcctgacaaacctggcgaagggtccaacaaagacctgggcaccacgttggacatggaaaggggtcctattctgtgaatggagtgctgaacggctgatgagtgatgaggggcgatgatgctcaaccttttctggattgcatggcactgaacaatgaaggcagctacgagtgtctaattagagctaaccctctctcctcttgaagcttattttaatcacccctttttgtttgtggttctgcctaggatagtcattcagagatgtgacaaccagcacagttccacttacattgagatgactaagttgcgctgcaagagaaatgtgaagtcgttttgcatgattgaataagggtgatgctgagcccttcttttataggttatgttatcatgctttatgttttatccttttgttttatactaactcttgagtgactatgatggttcaaatttccattagagagctgtgcactaaaggagatgtcctccatcttgatttgagatcttctgagctggtactgcagatacagtccaaacaaaaagctattctgtctccatttgttgtgtaactaggatggcttgtacctcactagtcactacctccatctcgaaaggaatgcaattttgtctatgcaccctgacaagcattcgttttgggggcagtggtaagtacaagtaaccagttatgcggccatgggagagacagaaagagagagagagagagaggttacattgtgcttccactataaattgcacttgctatgatgataatggttgaatctgagccactcaagtgacctttttcctcctagtaccactgtctgaatactcctgcccccttacccccaattcccatggtgttttaatgattggttttgctgatgttgcagctaatgagacagctaatctgctctttgaattggttaaagcttttattctgttttgtactcgtgtgctcatatctgcttgttcttttgtgctactttgcaagtcctgttgatgatatgccctgattttgggctgttcttcatttgccttgctgctggatttgaacctgcgcccttggttaatgtttgtaggactgatatgctaagttagttccatgtcataagttcctacctaagtgccgctcaataacgatgaaataaaattccaatgtgaggcaatgatctgtatcatggttgacacaagcacctttgagcaatcaaggctgctatgttgttaaccttgctcttagaggacatggaaatggactcgaatatgtgaaatggactgctgacgaagggcgatgatgctcaaccttttcggagtcgcacgccattgagcaaccaaggcagctgcgtgtctggtagcctatttaataatccctttttgtttgtggttctgcctaggatggtcacctggatggatatatgacaaccaggacagttccactcacaataggatgagtagattgggcagaaagagaagggagggcctgatttctatgattgagcaaaggagatgctgagctgagcccctttcgtatggtttatgcagcggtgctttatggctctgttttttgtttcataccgcgcttgagtggctaagattgttctgctttccattacagagcttctgcactctaccatcttctgagctgatgatacctgggatattctttgacgtttgctgctttactacgatggcccatgccttactagaaggtgattctatatctgtttgctgctttaactaggatgccttgcaccttagagcatctctagcagtcaccaaaagaaaagacaggttgtgcatccttgacaacaaattcacctccccatgatagggagtagcggtcatccgtgtatctctgcgtgttttttccaagcgttgatagattcgggagttgtagcaagttctttttttttcttgttcatgtcagattgagtggtttgtttttttttcttacacaattgccattgtgctgataatggttagatttgagtcactcaagttacctccttttcttctagtacgactgcacccctcgctccggcggtttgtattgccgctgatccagttaatgtgctctttgagtcggttcatactttctattccgttttgtatcttgtactgtgtcgtcttgttcttttgtgctcttttccatgtcctgttggcgctcttcacttgtctggggcaccggccaccgctgcgccattccccgtctcgctccaacacgtggtagcaacggtggccgccacctcttctcggtttgcttggacttctctactgccgttgccgcttcacggatcagtaataaatcttacaagcctgtttacaaatgctattcattttgcagctgtttagtccatcacggattctttatggagtttcccaatctaaatctctggtagctggtgtttgaatctttcaatgtcagaaatgtagtggttattggctagggatccatgaggctgcggtgtgtcttaccaatcagagatctatctgtctgttatggtatcttttacgctaattctttaattcaataattatgagattttggtgatgactggtcaaaattgagccagctctgtaattcataattcatagtttggtaattcaataattatgagattttggtgtacaga

SEQ ID NO: 79593 - DNA, 6564 bp, Zea Mays
acattggacgaaaagccagattctgctatttctcacgctatctcccactcgcggcgccggcgactacaccattgaaacccacaggccacacagcgcaggaacaaaaaacggcggcgcgataagaagggcgccgctgttggcgccgggccggcccgctcccgagcggtgtccttcttcaggtccgccctccggagcaacccctctcacttccccgccgcgccgcgtcggactgcggaccccttgggcttgcgacggtgctgctcagctgctgctgctggggtcggggctcgtgctcgggcgacgcgggatttgagtcgccattattggatttttcttccattgattgcgaacattttgttctggctgcccttcacttgtctttctgctggatctggacctgctacctgggtcaatattattgagaatttgagactaatatggcaagtcagtatcatctcatatgcacctacctaaatgcccctcaagaataaaaaaaacaagtttccagtgtggggcagtgatcaataactatggctgacaaaagcgccttggagcaatcaaggctgctatgggtaccaaactggaatactcatgtccatctcttggagatcttttcaattagctctaatgatagtggctttgtccctggatggtcatgccctcttcatgtgtgataaccggggcaactccacttatcatgtcaggagaagttgatgtggtgataaaagatgatggggataaggttaaatgattgggcaaaggcgaagctgagcccccctttcaacacatacatgcaaagaaaagggaataagaaacatgagtttatgttgtctcttcccttttctgttgaatatgttgttgctgtgtgttttcttgtctaacctacatattttctaactccattccttttgttgcatttgtcaaacaccatgcatttacctttggattccatttatcagtaggttgagatgtttcctagtttctgacattgattctgctataattgtttgcaatagccgtgttttgcatgatggatactttctgataactttgttcatcccagaatttattgcagaatttcatgagttatgtctcactactgttggaactgggtagtttggaaataagagggcattgtgttttcccaattacttcttctggtccatcataactattacagctgtgcagggtgcaacattggtccgttttggtagttcctatgcatccctttgttcttcagatattttttgtcgcttgtctgatggtcttcctttcttgtttggaactgttcttcagtggctgtgacgatcaaatgccccagctccataaagctattacgttttagcattctggattcttacctttggtattttgctcaatatgctgctaaactaggatggcttgtaccatgtacaagcaaccggtttgcaactagttgttgtcattgctatggtggtggtgtagtatatatccaactgaacaatcctactcaaaaagttcatttagaaagggatggagggagtacacgtttcttctgcaagtattgtgttgatactggggcacatctgagccatccaacatgacattactctttttgttctgtcatatacttttgtttacgagtctatttcgtctgtgtatcctaccattttcagtgatttcaacttgggatcaggatcatgatactgatggggcgaattgtcaacattgatttgatgtcacaatattcttgacttgggtaaattcggtgcatagattcctcgtgtttttggtttggatgctcaaacttagttggatgaattgctcattttgttctaaagaacgattttcttttccacactcatttaactagattcaatcgtccactaatacttataagtggttcgctaatgtgtccttacttctgtggcatgaggcattagtggtcctaatcacgtcccatggccttgatgaatcttgattgatcagtcaaacggatacacatgctacatcatagccatgagcacgactgtactttctggtcatgtgcgtgaaagcttctctatgcatgtgctattcacatatgagcagactatttctttctgtgttgttcacatgcatatcaatcgattttgccaagtgcggaaacattgggagttgggatgacaagttgttggagagggttttctttcaatcctgccaaaaaaaccaagattgggagtgggttctgggaaatattggagatgctttgattgggattagtggttgttcacatatcttcgctactgatggctggaacatgaatacttctcctgattcgctgcattggtgatctccttcccctgcagttgcctctggaacatttaacttttttgccatcttctctccttcacccttgccttttctccccttcctcttctctccgcttgtgctctctttcatgttgatcactgggtggcagctgccgctctatgcaggtgccttggtcttgttgggccctttgccaggtcttaatccggcactttgctggcgacagaatcacttgctgcaaaagctgaatccttagagcttttcagtgttgagagacaactgattagttccaaaggtaggaagttaatctccagctaggtaacgactcgttgatagctatgaaagctaggttttacggcttacagaaccttgttaagcaaggaatcagcaccacagctgggaatgtttgtgccattttcacttccagctcctgctctaatcaagtcaattccaacttggactatcacacagatagtgctaggcgagtaatcactaatcaggtaagttgacttgccataggggcacacacttgcctgttcagccatccctttttgttcgtggttttgcctaggatggtcacttggatgacaacaagcacagttcctgttggaactgcgacttctgaggtggtatgtgtggtgaggggaaggttgaggctcaggaccacggagcttgggcaccgtggctgctagctggaagagtcgaagggacgaggaactgttcacgcagcgtggcgaacagtagttgtaggtgaatagtgacgcgaatgaacagtaccttggatgaaccgtatgcggcgagcagtatatgggtttggggaagcacgggcaagatacttgcctgcttactctttcattgatcgaagggtacattagcaaccgtccttatctaatattttatctaaccaatttcttatccttctaaacaaactctgtttgttctcatacatccaaacaaactctatccccagactacgactggcgcttatccatctaaacaactagctgattttattagggctgttgtgctgccggtcataacagttccactcacattaggatgagtaaattgggcagcaagagaagggaggacctggtttctatgattgagcacaggtgatgctaagccctttttgtatggtttatgctgcgatgctttatgactatgtttttttgtttcatactgcacttgggtggctatgatggttcaactttccattaacgagcttctgcactctactaccatcttatgagctggactgggatattttatgatgtttgctgcttaactaggatggcccatgccttactagaaggtggttctatctctgtttgcttcttaactaggatgccttgcgcctctagcagtcacccaaaaaaaaacaagtctactgctggctggctggattggatacatgtattggtcatgatgattctctcgtcattactctttagcacagatgcgctgcagtgatgatccccagatccactgctgttgcctgtgttgccatctgctctgatgaccctgttcacccctgccttttcttctcgtgttcaccttgtctcctctctctctctctctctgtgtgtgtgtgtgtgtgttctgcaccgcaggaagggcatacctagtggatgctcattgccggaaaagtgcctgacaaacctggcgaagggtccaacaaagacctgggcaccacgttggacatggaaaggggtcctattctgtgaatggagtgctgaacggctgatgagtgatgaggggcgatgatgctcaaccttttctggattgcatggcactgaacaatgaaggcagctacgagtgtctaattagagctaaccctctctcctcttgaagcttattttaatcacccctttttgtttgtggttctgcctaggatagtcattcagagatgtgacaaccagcacagttccacttacattgagatgactaagttgcgctgcaagagaaatgtgaagtcgttttgcatgattgaataagggtgatgctgagcccttcttttataggttatgttatcatgctttatgttttatccttttgttttatactaactcttgagtgactatgatggttcaaatttccattagagagctgtgcactaaaggagatgtcctccatcttgatttgagatcttctgagctggtactgcagatacagtccaaacaaaaagctattctgtctccatttgttgtgtaactaggatggcttgtacctcactagtcactacctccatctcgaaaggaatgcaattttgtctatgcaccctgacaagcattcgttttgggggcagtggtaagtacaagtaaccagttatgcggccatgggagagacagaaagagagagagagagagaggttacattgtgcttccactataaattgcacttgctatgatgataatggttgaatctgagccactcaagtgacctttttcctcctagtaccactgtctgaatactcctgcccccttacccccaattcccatggtgttttaatgattggttttgctgatgttgcagctaatgagacagctaatctgctctttgaattggttaaagcttttattctgttttgtactcgtgtgctcatatctgcttgttcttttgtgctactttgcaagtcctgttgatgatatgccctgattttgggctgttcttcatttgccttgctgctggatttgaacctgcgcccttggttaatgtttgtaggactgatatgctaagttagttccatgtcataagttcctacctaagtgccgctcaataacgatgaaataaaattccaatgtgaggcaatgatctgtatcatggttgacacaagcacctttgagcaatcaaggctgctatgttgttaaccttgctcttagaggacatggaaatggactcgaatatgtgaaatggactgctgacgaagggcgatgatgctcaaccttttcggagtcgcacgccattgagcaaccaaggcagctgcgtgtctggtagcctatttaataatccctttttgtttgtggttctgcctaggatggtcacctggatggatatatgacaaccaggacagttccactcacaataggatgagtagattgggcagaaagagaagggagggcctgatttctatgattgagcaaaggagatgctgagctgagcccctttcgtatggtttatgcagcggtgctttatggctctgttttttgtttcataccgcgcttgagtggctaagattgttctgctttccattacagagcttctgcactctaccatcttctgagctgatgatacctgggatattctttgacgtttgctgctttactacgatggcccatgccttactagaaggtgattctatatctgtttgctgctttaactaggatgccttgcaccttagagcatctctagcagtcaccaaaagaaaagacaggttgtgcatccttgacaacaaattcacctccccatgatagggagtagcggtcatccgtgtatctctgcgtgttttttccaagcgttgatagattcgggagttgtagcaagttctttttttttcttgttcatgtcagattgagtggtttgtttttttttcttacacaattgccattgtgctgataatggttagatttgagtcactcaagttacctccttttcttctagtacgactgcacccctcgctccggcggtttgtattgccgctgatccagttaatgtgctctttgagtcggttcatactttctattccgttttgtatcttgtactgtgtcgtcttgttcttttgtgctcttttccatgtcctgttggcgctcttcacttgtctggggcaccggccaccgctgcgccattccccgtctcgctccaacacgtggtagcaacggtggccgccacctcttctcggtttgcttggacttctctactgccgttgccgcttcacggatcagtaataaatcttacaagcctgtttacaaatgctattcattttgcagctgtttagtccatcacggattctttatggagtttcccaatctaaatctctggtagctggtgtttgaatctttcaatgtcagaaatgtagtggttattggctagggatccatgaggctgcggtgtgtcttaccaatcagagatctatctgtctgttatggtatcttttacgctaattctttaattcaataattatgagattttggtgatgactggtcaaaattgagccagctctgtaattcataattcatagtttggtaattcaataattatgagattttggtgtacaga

SEQ ID NO: 79594 - DNA, 6881 bp, Zea Mays
attttagcgtgtacaccatggttcataatggcatctggatgaaacccattcatttgatggcaatatagcaaaacccacgtttcataatgacacaattccaaatttctccctgctgggtgcttgttgccggcgcgaagggtccaacgaagacacgggtgcctccgtgcctgccatagggttggcattgtgtgctgcgatctgatattctgctttgagcacatgataccttgccactctgctttgctccgaatgttcctagccgtatgctcctcatcctcaccacctcggttcatttggatgggcaatgcgtaagggatcaggaattcaggatctggagatataaagaggtgtttttctgacttgagcgaagtcccaagtgaaaatttatttagtccaaccatgttggccatggaaatggactcggaccgatgaatggattgctgatgaggggcgatgatgttcaaccttttataaattgcctgccattgagcaatagtatctatcagagctaaccctcttccctcatgaagcctattttaatcatccctttttgtttgtggctctgactaggatggtcatttggatatgtgacaaccagcacagttccacttacattgggattagggatgaaaacggatacttattcggatatcatcaccaccacaccactcccatggcggctgcccttcacttgtctttctgctggatctggacctgctacctgggtcaatattattgagaatttgagactaatatggcaagtcagtatcatctcatatgcacctacctaaatgcccctcaagaataaaaaaaacaagtttccagtgtggggcagtgatcaataactatggctgacaaaagcgccttggagcaatcaaggctgctatgggtaccaaactggaatactcatgtccatctcttggagatcttttcaattagctctaatgatagtggctttgtccctggatggtcatgccctcttcatgtgtgataaccggggcaactccacttatcatgtcaggagaagttgatgtggtgataaaagatgatggggataaggttaaatgattgggcaaaggcgaagctgagcccccctttcaacacatacatgcaaagaaaagggaataagaaacatgagtttatgttgtctcttcccttttctgttgaatatgttgttgctgtgtgttttcttgtctaacctacatattttctaactccattccttttgttgcatttgtcaaacaccatgcatttacctttggattccatttatcagtaggttgagatgtttcctagtttctgacattgattctgctataattgtttgcaatagccgtgttttgcatgatggatactttctgataactttgttcatcccagaatttattgcagaatttcatgagttatgtctcactactgttggaactgggtagtttggaaataagagggcattgtgttttcccaattacttcttctggtccatcataactattacagctgtgcagggtgcaacattggtccgttttggtagttcctatgcatccctttgttcttcagatattttttgtcgcttgtctgatggtcttcctttcttgtttggaactgttcttcagtggctgtgacgatcaaatgccccagctccataaagctattacgttttagcattctggattcttacctttggtattttgctcaatatgctgctaaactaggatggcttgtaccatgtacaagcaaccggtttgcaactagttgttgtcattgctatggtggtggtgtagtatatatccaactgaacaatcctactcaaaaagttcatttagaaagggatggagggagtacacgtttcttctgcaagtattgtgttgatactggggcacatctgagccatccaacatgacattactctttttgttctgtcatatacttttgtttacgagtctatttcgtctgtgtatcctaccattttcagtgatttcaacttgggatcaggatcatgatactgatggggcgaattgtcaacattgatttgatgtcacaatattcttgacttgggtaaattcggtgcatagattcctcgtgtttttggtttggatgctcaaacttagttggatgaattgctcattttgttctaaagaacgattttcttttccacactcatttaactagattcaatcgtccactaatacttataagtggttcgctaatgtgtccttacttctgtggcatgaggcattagtggtcctaatcacgtcccatggccttgatgaatcttgattgatcagtcaaacggatacacatgctacatcatagccatgagcacgactgtactttctggtcatgtgcgtgaaagcttctctatgcatgtgctattcacatatgagcagactatttctttctgtgttgttcacatgcatatcaatcgattttgccaagtgcggaaacattgggagttgggatgacaagttgttggagagggttttctttcaatcctgccaaaaaaaccaagattgggagtgggttctgggaaatattggagatgctttgattgggattagtggttgttcacatatcttcgctactgatggctggaacatgaatacttctcctgattcgctgcattggtgatctccttcccctgcagttgcctctggaacatttaacttttttgccatcttctctccttcacccttgccttttctccccttcctcttctctccgcttgtgctctctttcatgttgatcactgggtggcagctgccgctctatgcaggtgccttggtcttgttgggccctttgccaggtcttaatccggcactttgctggcgacagaatcacttgctgcaaaagctgaatccttagagcttttcagtgttgagagacaactgattagttccaaaggtaggaagttaatctccagctaggtaacgactcgttgatagctatgaaagctaggttttacggcttacagaaccttgttaagcaaggaatcagcaccacagctgggaatgtttgtgccattttcacttccagctcctgctctaatcaagtcaattccaacttggactatcacacagatagtgctaggcgagtaatcactaatcaggtaagttgacttgccataggggcacacacttgcctgttcagccatccctttttgttcgtggttttgcctaggatggtcacttggatgacaacaagcacagttcctgttggaactgcgacttctgaggtggtatgtgtggtgaggggaaggttgaggctcaggaccacggagcttgggcaccgtggctgctagctggaagagtcgaagggacgaggaactgttcacgcagcgtggcgaacagtagttgtaggtgaatagtgacgcgaatgaacagtaccttggatgaaccgtatgcggcgagcagtatatgggtttggggaagcacgggcaagatacttgcctgcttactctttcattgatcgaagggtacattagcaaccgtccttatctaatattttatctaaccaatttcttatccttctaaacaaactctgtttgttctcatacatccaaacaaactctatccccagactacgactggcgcttatccatctaaacaactagctgattttattagggctgttgtgctgccggtcataacagttccactcacattaggatgagtaaattgggcagcaagagaagggaggacctggtttctatgattgagcacaggtgatgctaagccctttttgtatggtttatgctgcgatgctttatgactatgtttttttgtttcatactgcacttgggtggctatgatggttcaactttccattaacgagcttctgcactctactaccatcttatgagctggactgggatattttatgatgtttgctgcttaactaggatggcccatgccttactagaaggtggttctatctctgtttgcttcttaactaggatgccttgcgcctctagcagtcacccaaaaaaaaacaagtctactgctggctggctggattggatacatgtattggtcatgatgattctctcgtcattactctttagcacagatgcgctgcagtgatgatccccagatccactgctgttgcctgtgttgccatctgctctgatgaccctgttcacccctgccttttcttctcgtgttcaccttgtctcctctctctctctctctctgtgtgtgtgtgtgtgtgttctgcaccgcaggaagggcatacctagtggatgctcattgccggaaaagtgcctgacaaacctggcgaagggtccaacaaagacctgggcaccacgttggacatggaaaggggtcctattctgtgaatggagtgctgaacggctgatgagtgatgaggggcgatgatgctcaaccttttctggattgcatggcactgaacaatgaaggcagctacgagtgtctaattagagctaaccctctctcctcttgaagcttattttaatcacccctttttgtttgtggttctgcctaggatagtcattcagagatgtgacaaccagcacagttccacttacattgagatgactaagttgcgctgcaagagaaatgtgaagtcgttttgcatgattgaataagggtgatgctgagcccttcttttataggttatgttatcatgctttatgttttatccttttgttttatactaactcttgagtgactatgatggttcaaatttccattagagagctgtgcactaaaggagatgtcctccatcttgatttgagatcttctgagctggtactgcagatacagtccaaacaaaaagctattctgtctccatttgttgtgtaactaggatggcttgtacctcactagtcactacctccatctcgaaaggaatgcaattttgtctatgcaccctgacaagcattcgttttgggggcagtggtaagtacaagtaaccagttatgcggccatgggagagacagaaagagagagagagagagaggttacattgtgcttccactataaattgcacttgctatgatgataatggttgaatctgagccactcaagtgacctttttcctcctagtaccactgtctgaatactcctgcccccttacccccaattcccatggtgttttaatgattggttttgctgatgttgcagctaatgagacagctaatctgctctttgaattggttaaagcttttattctgttttgtactcgtgtgctcatatctgcttgttcttttgtgctactttgcaagtcctgttgatgatatgccctgattttgggctgttcttcatttgccttgctgctggatttgaacctgcgcccttggttaatgtttgtaggactgatatgctaagttagttccatgtcataagttcctacctaagtgccgctcaataacgatgaaataaaattccaatgtgaggcaatgatctgtatcatggttgacacaagcacctttgagcaatcaaggctgctatgttgttaaccttgctcttagaggacatggaaatggactcgaatatgtgaaatggactgctgacgaagggcgatgatgctcaaccttttcggagtcgcacgccattgagcaaccaaggcagctgcgtgtctggtagcctatttaataatccctttttgtttgtggttctgcctaggatggtcacctggatggatatatgacaaccaggacagttccactcacaataggatgagtagattgggcagaaagagaagggagggcctgatttctatgattgagcaaaggagatgctgagctgagcccctttcgtatggtttatgcagcggtgctttatggctctgttttttgtttcataccgcgcttgagtggctaagattgttctgctttccattacagagcttctgcactctaccatcttctgagctgatgatacctgggatattctttgacgtttgctgctttactacgatggcccatgccttactagaaggtgattctatatctgtttgctgctttaactaggatgccttgcaccttagagcatctctagcagtcaccaaaagaaaagacaggttgtgcatccttgacaacaaattcacctccccatgatagggagtagcggtcatccgtgtatctctgcgtgttttttccaagcgttgatagattcgggagttgtagcaagttctttttttttcttgttcatgtcagattgagtggtttgtttttttttcttacacaattgccattgtgctgataatggttagatttgagtcactcaagttacctccttttcttctagtacgactgcacccctcgctccggcggtttgtattgccgctgatccagttaatgtgctctttgagtcggttcatactttctattccgttttgtatcttgtactgtgtcgtcttgttcttttgtgctcttttccatgtcctgttggcgctcttcacttgtctggggcaccggccaccgctgcgccattccccgtctcgctccaacacgtggtagcaacggtggccgccacctcttctcggtttgcttggacttctctactgccgttgccgcttcacggatcagtaataaatcttacaagcctgtttacaaatgctattcattttgcagctgtttagtccatcacggattctttatggagtttcccaatctaaatctctggtagctggtgtttgaatctttcaatgtcagaaatgtagtggttattggctagggatccatgaggctgcggtgtgtcttaccaatcagagatctatctgtctgttatggtatcttttacgctaattctttaattcaataattatgagattttggtgatgactggtcaaaattgagccagctctgtaattcataattcatagtttggtaattcaataattatgagattttggtgtacaga

SEQ ID NO: 79595 - DNA, 3274 bp, Zea Mays
ccacgagaaagagagagccaccacgccaccaacaaaaggcaagcgagggactggaaaacaaaagggagacgctcctggcgggtgagcgggcccaccggaggcagcggacgctataaaagaggcctcggcgccccaccgtaaccctcgcctcggtcacgacgcgcagtcgcccattccgcatctcgccctcccgtcccgtccgtccgttctccgattggccgccgcccgcctcgccctcctcgtcaacaaaagcccaccgcaagcgagcgagcgagccaccccgcccgatagccgccgccgccgtcccgcccccacccgactcctcctgaccgccggcgtggggtgcccgggctccacctccggcgacgacaccctccccgccgcgcgcgcccccaccgcctgctccgtttgcgggggtagccggggctccggcctcggcggctttcaaagccccctccctcacaacaggatccaaaatcccgtcctagacttcttctacctccccttccagaacttcctcttttggcatcccggacggtcgatctcgacccccttcgatttcgattcatctcttcttatcgattgatctttcttctagcttatttcgtatactgtcattttgattccttccttcttcccgccgccggtagctaatcccaaatcccaatcgaatcgactcccccctgttcgtcggattctcttcctccgtccgcacccagctaacgccaccgaaaacagaaaatttacccgccgcccaaaaaaaaacagaaaggctaacctccttttttctctctctatctttctctccatctgtggacttctccggttttgtttgacgagatgcctgcgctcgccgtcgacgccgcgacacccgtggcgcacgccttcgcgtcctgcgacgcggcgcgcttccccgccccgcccgtggtgggccccgccgccgcggccgaggccgccccctggtcggccgacctctccgcggcgctctacaacgtggacggctggggcgcgccctacttcttcgtcaacgacgacggcgacgtggccgtgcgcccgcacggcgccgcgactctcccgggccaggagatcgacctggccaaggtcgtggccaaggccgcgggcccgcgcgccggaggcgggctcggcctgccgctgccgctgctcgtgcgcttccccgacgtcctgcgccaccgcgtcgagacgctcaacgccgccttcggctacgccgtccgctccaccggctacggctcaaggtaccagggcgtgtacccggtcaagtgcaaccaggacaggtacgtcgtcgaggacattgtggagttcggcgcgccctttgggttcggcctcgaggccggctccaagcccgagctgctgctcgccatgagctgcctcgccgcgcgcggcggcctggacgccctgctcatctgcaacgggtacaaggacgacggctacgtctcgctcgcgctcatggcgcgctccatgggcctcaacaccgtcatcgtgctcgagcaggaggaggagctcgacattgtcgtcgaggccagccgccgcctcggcgtgcgccccgtcgtcggcatgcgcgccaagctgcgcaccaagcacgccggccacttcggctccacgtccggggagaagggcaagttcggcctcagcgccgcgcagatactgtccgtggtcaccaagctcaaggccatcgatctactgcgagctcgcccgcctcggcgcggacatgcgcgtcatcgacgtcggcggcggcctcggcattgactacgacgggacccactcggcgcagaccgacatgtcggtggcgtacagcctggaggagtacgcgggcgccgtggtggccgccgtgggccgcgtgtgtgaccgcaagggggtgcagcaccccatcatctgcagcgagagcggccgcgcgctggtgtcgcaccactcggtcctggtgttcgaggccttctcggctacggcgccgggacgcctggacgcggccacggcctacctcctcgacgagctcacggacgactgccgcgccgactaccgcaacgtgatggccgccgccgtgcgcggcgactacgacacgtgcggcctgtacgccgaccagctgaagcggcggtccgcggagcagttcaaggagggggtccttggcctggagcacctcgccgcggtggacgccttctgcgagctcgtcgcccgcggcatgggcgcgcccgagccgccgcgcacctaccacatcaacctgtccgtgttcacctccctgccggacatgtgggccatcgggcagcagttccccatcatcccgatccagcggctgcaggagcggcccgccgtcgacggcgtgctctcggacctcacctgcgacagcgacggcaaggtgagcgagttcatcggcgggaggcacagcctgccgctgcacgagctgcccacccacgccactcgcggctactacctgggcatgttcctcgggggcgcctaccaggaggccctcggcgggctgcacaaccttttcggcgggcccagcgtggtgcgcgtgtcccagtgcgacgggccccactgctttgccgtgacgcgcgccgccgcgggcccgtcctgcgccgacgtgctccgcgcgatgcagcacgagcccgaggtgatgtacgaggtgctgaagcagaggaccgacggcgccacggccgccgccctcgcccgggccttcggcgcaatgccgtacctggtgttcgaccccgaggccgccgtgatgtccggcggcgagagcagcgactcggagcggtcggccgccggcgccgccgaggaggaagacgatgaggagtgggagttcatgcgcgggctcaccgtctgatgacgtgcccgcccgcccgccccgggtgaaacaaggcgagtccgtcgccaggaagttgtcagtggccggccggcgttggtttacataataacccccaccgcccggtgttgtatcgtgtcgtggtcgtagtcgtcgggtgtctcgtcgtcgccggagttgtttggcgccacctttttattccgaacgcgtcagtgtccactgttcgcctttccttttttttctctctctttcatgggaataatctgaaggaaactaatagcaagtttctctttaactggaaatttcgttttttcaagaattcattctgtctgttgctgtgtcggttccgctctcccgttgcgtggtgcgctgccaccggagaacaccttcctctcgtctcgacgtcgtcgctttctcttttcttctccatcgtcgcgtcgtgggcagggggcaggtgtcacggcc

SEQ ID NO: 79596 - DNA, 2131 bp, Zea Mays
ctcaccctgcaccaggtcaaatcctgcgcacgccgagacccgaggcccgtgccgaccctccgcatttcaaattccctcggctttcccttctcccttcgaccgatcctccggccaggccagccttcaaacacctcgccgacgccgccgtgcccgtcccggcgcggacgggcgctagaggcaggtaccccgtcctccccgcatggacagcgacgacgaggagatgtgcgacgccgcctcctccgccccgtcctcgcccgccgccggcggcggggtgggagagggggaggaggaggagggcggcgtagatgacggcaggcgcgggagcgagggggtggtgatcatggaggtcacgtggttccaggtggacctggactatgagttcgacgcgcccaggtggttcgaccttgcccaagaggaggcgccgctggatgccgctgcggcgcaagagtggttcacctccgcccccagctacccgccctctcccttaattgctaagatgttagctgaggatcttgggttacaaaccattagaagcattgcagatacagatgatctgcattgttctacagcttctcacgaatgttctagtggcatgggaccaaaaatccgtcagcttgaagttaaaataggacgaaaagcttgcaatggtgcatcagaaaatgaacgccgttctcactatcaaactaccatgaagggcaattctttgagaggttccacactgatgaagcctactgccagccaattagccaagcaaaacagaccggcacagttaaagaatttgacacagaataaaaagtcagtgggagttataagagagagaagtaccataagctcaaacgattgcaattaccaatccactaaaagacaaagattagagaatgggcatctcaacaaggctgctgctactgctatccagcatgagtttattcataaaaatcatgaaaagaatgttatgaatcaaaacatggatcagcccactgttctgcccagattgaagattacaattcctagatcacctgatttggcaacaaagctaagagcagagaggtcaaaagctcaaagagcagtgccaactcttccaaagcagttaaatgacttaattcaacgggttgcaccctctgctcctacagttcaagtcgcaccaactagaaagcaggtagttcaacctttttgggctactggtcatcaacatgcaagcagacaacacgaggatgttgggtcaaatgtggcagcatgtacatccaatcatgcaaggcatcttaagagcgtagataacaaaaccgaagataccaggcatggtctgtttaaatttaaagcccgtccgttggatagaaagatgttagagaacaaaggtgatggtgtatttcgatgtgcaaaaaggaatacaactgtgcctaaggaatttaacctatcaacaggcaggaaagccaatccagctccgttgtctgaactatttaacaagctttctttaactgcgggtgcacatcaaaatcgtggagtagggcgtcagatcagggatctgccaaattatatcactaccaagagaacatgattggtaacatgcatcgctagtctgacacacttccatttttttcactttccagactcatgtcaatgaagaagtagaatatacaggatttctcttttgatagttagtgcctggtttaggctcaacgtcaccccacccgcacagagaccaagcgtttgttttggtgttttggacagttgactcagaaggaagctcgcatcctcctaacctgctcatacattatttgagattaagagcaccatcgctgaggtcgagtgtggaggcactgattctcgtctcggtcatagagttgcttctgctgagcatgttacagttatctcagctgcccggagccaatgagtcatggctgtgatggggtggtttttgtacagcaagagataaaccatagtgtaggggcggctcactcggtggatctgcagccctgcgggctcccgcagagactccaaagtgtaacgtattgcaatcgtcttggcaaggtcgtgctcttcttttcgtctttggcatggtctccattccagatgcgctgtgcggtgcaggacaaaaatctcgttgctgctgacaacagcaccgccagcgccagga

SEQ ID NO: 79597 - DNA, 2096 bp, Zea Mays
caaatcctgcgcacgccgagacccgaggcccgtgccgaccctccgcatttcaaattccctcggctttcccttctcccttcgaccgatcctccggccaggccagccttcaaacacctcgccgacgccgccgtgcccgtcccggcgcggacgggcgctagaggcaggtaccccgtcctccccgcatggacagcgacgacgaggagatgtgcgacgccgcctcctccgccccgtcctcgcccgccgccggcggcggggtgggagagggggaggaggaggagggcggcgtagatgacggcaggcgcgggagcgagggggtggtgatcatggaggtcacgtggttccaggtggacctggactatgagttcgacgcgcccaggtggttcgaccttgcccaagaggaggcgccgctggatgccgctgcggcgcaagagtggttcacctccgcccccagctacccgccctctcccttaattgctaagatgttagctgaggatcttgggttacaaaccattagaagcattgcagatacagatgatctgcattgttctacagcttctcacgaatgttctagtggcatgggaccaaaaatccgtcagcttgaagttaaaataggacgaaaagcttgcaatggtgcatcagaaaatgaacgccgttctcactatcaaactaccatgaagggcaattctttgagaggttccacactgatgaagcctactgccagccaattagccaagcaaaacagaccggcacagttaaagaatttgacacagaataaaaagtcagtgggagttataagagagagaagtaccataagctcaaacgattgcaattaccaatccactaaaagacaaagattagagaatgggcatctcaacaaggctgctgctactgctatccagcatgagtttattcataaaaatcatgaaaagaatgttatgaatcaaaacatggatcagcccactgttctgcccagattgaagattacaattcctagatcacctgatttggcaacaaagctaagagcagagaggtcaaaagctcaaagagcagtgccaactcttccaaagcagttaaatgacttaattcaacgggttgcaccctctgctcctacagttcaagtcgcaccaactagaaagcaggtagttcaacctttttgggctactggtcatcaacatgcaagcagacaacacgaggatgttgggtcaaatgtggcagcatgtacatccaatcatgcaaggcatcttaagagcgtagataacaaaaccgaagataccaggcatggtctgtttaaatttaaagcccgtccgttggatagaaagatgttagagaacaaaggtgatggtgtatttcgatgtgcaaaaaggaatacaactgtgcctaaggaatttaacctatcaacaggcaggaaagccaatccagctccgttgtctgaactatttaacaagctttctttaactgcgggtgcacatcaaaatcgtggagtagggcgtcagatcagggatctgccaaattatatcactaccaaggactgcaaagagaacatgattggtaacatgcatcgctagtctgactcatgtcaatgaagaagtagaatatacaggatttctcttttgatagttagtgcctggtttaggctcaacgtcaccccacccgcacagagaccaagcgtttgttttggtgttttggacagttgactcagaaggaagctcgcatcctcctaacctgctcatacattatttgagattaagagcaccatcgctgaggtcgagtgtggaggcactgattctcgtctcggtcatagagttgcttctgctgagcatgttacagttatctcagctgcccggagccaatgagtcatggctgtgatggggtggtttttgtacagcaagagataaaccatagtgtaggggcggctcactcggtggatctgcagccctgcgggctcccgcagagactccaaagtgtaacgtattgcaatcgtcttggcaaggtcgtgctcttcttttcgtctttggcatggtctccattccagatgcgctgtgcggtgcaggacaaaaatctcgttgctgctgacaacagcaccgccagcgccagga

SEQ ID NO: 79598 - DNA, 2088 bp, Zea Mays
cgaggcccgtgccgaccctccgcatttcaaattccctcggctttcccttctcccttcgaccgatcctccggccaggccagccttcaaacacctcgccgacgccgccgtgcccgtcccggcgcggacgggcgctagaggcaggtaccccgtcctccccgcatggacagcgacgacgaggagatgtgcgacgccgcctcctccgccccgtcctcgcccgccgccggcggcggggtgggagagggggaggaggaggagggcggcgtagatgacggcaggcgcgggagcgagggggtggtgatcatggaggtcacgtggttccaggtggacctggactatgagttcgacgcgcccaggtggttcgaccttgcccaagaggaggcgccgctggatgccgctgcggcgcaagagtggttcacctccgcccccagctacccgccctctcccttaattgctaagatgttagctgaggatcttgggttacaaaccattagaagcattgcagatacagatgatctgcattgttctacagcttctcacgaatgttctagtggcatgggaccaaaaatccgtcagcttgaagttaaaataggacgaaaagcttgcaatggtgcatcagaaaatgaacgccgttctcactatcaaactaccatgaagggcaattctttgagaggttccacactgatgaagcctactgccagccaattagccaagcaaaacagaccggcacagttaaagaatttgacacagaataaaaagtcagtgggagttataagagagagaagtaccataagctcaaacgattgcaattaccaatccactaaaagacaaagattagagaatgggcatctcaacaaggctgctgctactgctatccagcatgagtttattcataaaaatcatgaaaagaatgttatgaatcaaaacatggatcagcccactgttctgcccagattgaagattacaattcctagatcacctgatttggcaacaaagctaagagcagagaggtcaaaagctcaaagagcagtgccaactcttccaaagcagttaaatgacttaattcaacgggttgcaccctctgctcctacagttcaagtcgcaccaactagaaaggtagttcaacctttttgggctactggtcatcaacatgcaagcagacaacacgaggatgttgggtcaaatgtggcagcatgtacatccaatcatgcaaggcatcttaagagcgtagataacaaaaccgaagataccaggcatggtctgtttaaatttaaagcccgtccgttggatagaaagatgttagagaacaaaggtgatggtgtatttcgatgtgcaaaaaggaatacaactgtgcctaaggaatttaacctatcaacaggcaggaaagccaatccagctccgttgtctgaactatttaacaagctttctttaactgcgggtgcacatcaaaatcgtggagtagggcgtcagatcagggatctgccaaattatatcactaccaagagaacatgattggtaacatgcatcgctagtctgacacacttccatttttttcactttccagactcatgtcaatgaagaagtagaatatacaggatttctcttttgatagttagtgcctggtttaggctcaacgtcaccccacccgcacagagaccaagcgtttgttttggtgttttggacagttgactcagaaggaagctcgcatcctcctaacctgctcatacattatttgagattaagagcaccatcgctgaggtcgagtgtggaggcactgattctcgtctcggtcatagagttgcttctgctgagcatgttacagttatctcagctgcccggagccaatgagtcatggctgtgatggggtggtttttgtacagcaagagataaaccatagtgtaggggcggctcactcggtggatctgcagccctgcgggctcccgcagagactccaaagtgtaacgtattgcaatcgtcttggcaaggtcgtgctcttcttttcgtctttggcatggtctccattccagatgcgctgtgcggtgcaggacaaaaatctcgttgctgctgacaacagcaccgccagcgccagga

SEQ ID NO: 79599 - DNA, 2104 bp, Zea Mays
cgaggcccgtgccgaccctccgcatttcaaattccctcggctttcccttctcccttcgaccgatcctccggccaggccagccttcaaacacctcgccgacgccgccgtgcccgtcccggcgcggacgggcgctagaggcaggtaccccgtcctccccgcatggacagcgacgacgaggagatgtgcgacgccgcctcctccgccccgtcctcgcccgccgccggcggcggggtgggagagggggaggaggaggagggcggcgtagatgacggcaggcgcgggagcgagggggtggtgatcatggaggtcacgtggttccaggtggacctggactatgagttcgacgcgcccaggtggttcgaccttgcccaagaggaggcgccgctggatgccgctgcggcgcaagagtggttcacctccgcccccagctacccgccctctcccttaattgctaagatgttagctgaggatcttgggttacaaaccattagaagcattgcagatacagatgatctgcattgttctacagcttctcacgaatgttctagtggcatgggaccaaaaatccgtcagcttgaagttaaaataggacgaaaagcttgcaatggtgcatcagaaaatgaacgccgttctcactatcaaactaccatgaagggcaattctttgagaggttccacactgatgaagcctactgccagccaattagccaagcaaaacagaccggcacagttaaagaatttgacacagaataaaaagtcagtgggagttataagagagagaagtaccataagctcaaacgattgcaattaccaatccactaaaagacaaagattagagaatgggcatctcaacaaggctgctgctactgctatccagcatgagtttattcataaaaatcatgaaaagaatgttatgaatcaaaacatggatcagcccactgttctgcccagattgaagattacaattcctagatcacctgatttggcaacaaagctaagagcagagaggtcaaaagctcaaagagcagtgccaactcttccaaagcagttaaatgacttaattcaacgggttgcaccctctgctcctacagttcaagtcgcaccaactagaaagcaggtagttcaacctttttgggctactggtcatcaacatgcaagcagacaacacgaggatgttgggtcaaatgtggcagcatgtacatccaatcatgcaaggcatcttaagagcagcgtagataacaaaaccgaagataccaggcatggtctgtttaaatttaaagcccgtccgttggatagaaagatgttagagaacaaaggtgatggtgtatttcgatgtgcaaaaaggaatacaactgtgcctaaggaatttaacctatcaacaggcaggaaagccaatccagctccgttgtctgaactatttaacaagctttctttaactgcgggtgcacatcaaaatcgtggagtagggcgtcagatcagggatctgccaaattatatcactaccaaggactgcaaagagaacatgattggtaacatgcatcgctagtctgacacacttccatttttttcactttccagactcatgtcaatgaagaagtagaatatacaggatttctcttttgatagttagtgcctggtttaggctcaacgtcaccccacccgcacagagaccaagcgtttgttttggtgttttggacagttgactcagaaggaagctcgcatcctcctaacctgctcatacattatttgagattaagagcaccatcgctgaggtcgagtgtggaggcactgattctcgtctcggtcatagagttgcttctgctgagcatgttacagttatctcagctgcccggagccaatgagtcatggctgtgatggggtggtttttgtacagcaagagataaaccatagtgtaggggcggctcactcggtggatctgcagccctgcgggctcccgcagagactccaaagtgtaacgtattgcaatcgtcttggcaaggtcgtgctcttcttttcgtctttggcatggtctccattccagatgcgctgtgcggtgcaggacaaaaatctcgttgctgctgacaacagcaccgccagcgccagga

SEQ ID NO: 79600 - DNA, 2063 bp, Zea Mays
cgaggcccgtgccgaccctccgcatttcaaattccctcggctttcccttctcccttcgaccgatcctccggccaggccagccttcaaacacctcgccgacgccgccgtgcccgtcccggcgcggacgggcgctagaggcaggtaccccgtcctccccgcatggacagcgacgacgaggagatgtgcgacgccgcctcctccgccccgtcctcgcccgccgccggcggcggggtgggagagggggaggaggaggagggcggcgtagatgacggcaggcgcgggagcgagggggtggtgatcatggaggtcacgtggttccaggtggacctggactatgagttcgacgcgcccaggtggttcgaccttgcccaagaggaggcgccgctggatgccgctgcggcgcaagagtggttcacctccgcccccagctacccgccctctcccttaattgctaagatgttagctgaggatcttgggttacaaaccattagaagcattgcagatacagatgatctgcattgttctacagcttctcacgaatgttctagtggcatgggaccaaaaatccgtcagcttgaagttaaaataggacgaaaagcttgcaatggtgcatcagaaaatgaacgccgttctcactatcaaactaccatgaagggcaattctttgagaggttccacactgatgaagcctactgccagccaattagccaagcaaaacagaccggcacagttaaagaatttgacacagaataaaaagtcagtgggagttataagagagagaagtaccataagctcaaacgattgcaattaccaatccactaaaagacaaagattagagaatgggcatctcaacaaggctgctgctactgctatccagcatgagtttattcataaaaatcatgaaaagaatgttatgaatcaaaacatggatcagcccactgttctgcccagattgaagattacaattcctagatcacctgatttggcaacaaagctaagagcagagaggtcaaaagctcaaagagcagtgccaactcttccaaagcagttaaatgacttaattcaacgggttgcaccctctgctcctacagttcaagtcgcaccaactagaaagcaggtagttcaacctttttgggctactggtcatcaacatgcaagcagacaacacgaggatgttgggtcaaatgtggcagcatgtacatccaatcatgcaaggcatcttaagagcgtagataacaaaaccgaagataccaggcatggtctgtttaaatttaaagcccgtccgttggatagaaagatgttagagaacaaaggtgatggtgtatttcgatgtgcaaaaaggaatacaactgtgcctaaggaatttaacctatcaacaggcaggaaagccaatccagctccgttgtctgaactatttaacaagctttctttaactgcgggtgcacatcaaaatcgtggagtagggcgtcagatcagggatctgccaaattatatcactaccaagagaacatgattggtaacatgcatcgctagtctgactcatgtcaatgaagaagtagaatatacaggatttctcttttgatagttagtgcctggtttaggctcaacgtcaccccacccgcacagagaccaagcgtttgttttggtgttttggacagttgactcagaaggaagctcgcatcctcctaacctgctcatacattatttgagattaagagcaccatcgctgaggtcgagtgtggaggcactgattctcgtctcggtcatagagttgcttctgctgagcatgttacagttatctcagctgcccggagccaatgagtcatggctgtgatggggtggtttttgtacagcaagagataaaccatagtgtaggggcggctcactcggtggatctgcagccctgcgggctcccgcagagactccaaagtgtaacgtattgcaatcgtcttggcaaggtcgtgctcttcttttcgtctttggcatggtctccattccagatgcgctgtgcggtgcaggacaaaaatctcgttgctgctgacaacagcaccgccagcgccagga

SEQ ID NO: 79601 - DNA, 1211 bp, Zea Mays
aattgctctacgtgaacgaagcttctggaaactcgctggcccgatggcatcggaggccgcgattgctcgtgcgcagtgcctccttcgcttccgccgctggtcgccactgccgcttcttcctctcccttcccctcccgctaccacacgagcagcttcctgccgccgcagcgtacgcatggcctcgtcggacggctctgccgcggccctgcccagcgctaccgtcgatgtgcccggcgccggggcccctgtcctcgtcgtgggcgcgccggggctccccgaggctgacttcaggaacgcggtggagtcgtcgctgttcaagcagtggctgcggaacctgcagtcggagaagggcgtcctcacctacgggaggctgagcctcacgcgggttctcatccagggcgttgacatgttcgggaaacgggtgggctttctcaagttcaaggctgatatcgtggacgaggaaaccaaaaccaaggaattgtctttgcaagagggcccgcggttgctgtgttgattcttttggagtcgaatggagaaacatatgctgtgcttaccgaacaggttagagttcctattggaaaattcctgttggagctgcctgctgggatgctagatgacgaaaaaggtgattttgttggcaccgcagtccgtgaggtggaagaagagactggtataaagctgaatatagaagacatggttgatcttacggcactgctggaccctgctactggaggtcgaatgctaccatcaccgggtggctgcgacgaagagattggcctgttcctgtacaggggccgcgttgacgaggagaccataagatcgctccaggggaaggaaaccgggctgcgcgaccacggtgagctgatcaagctgcgcgtggttccgtacagcgagctctggcggtcgaccggcgacgcgaaagcactctccgcgatagccctgtacgagatggccaagagggaaggcctgctgccgcagccgacgccgtcggccaacttgtgaagacctgctagcactttaaaacagtggtggccgtcatgcctgtaaaatggaaggaggaacgtcactcgcgaaaccaaatcatatatatctctatctcttcgtttggtataacgcgcttaagcttgtctgtttgtgttatgtatacatatactaataatttaaaaataaaagtataatcgtgtttaaataaatatttcatttaatcctat

SEQ ID NO: 79602 - DNA, 1116 bp, Zea Mays
aattgctctacgtgaacgaagcttctggaaactcgctggcccgatggcatcggaggccgcgattgctcgtgcgcagtgcctccttcgcttccgccgctggtcgccactgccgcttcttcctctcccttcccctcccgctaccacacgagcagcttcctgccgccgcagcgtacgcatggcctcgtcgctgttcaagcagtggctgcggaacctgcagtcggagaagggcgtcctcacctacgggaggctgagcctcacgcgggttctcatccagggcgttgacatgttcgggaaacgggtgggctttctcaagttcaaggctgatatcgtggacgaggaaaccaaaaccaaggaattgtctttgcaagagggcccgcggttgctgtgttgattcttttggagtcgaatggagaaacatatgctgtgcttaccgaacaggttagagttcctattggaaaattcctgttggagctgcctgctgggatgctagatgacgaaaaaggtgattttgttggcaccgcagtccgtgaggtggaagaagagactggtataaagctgaatatagaagacatggttgatcttacggcactgctggaccctgctactggaggtcgaatgctaccatcaccggtaactggccaaaacttctattcacctgggtggctgcgacgaagagattggcctgttcctgtacaggggccgcgttgacgaggagaccataagatcgctccaggggaaggaaaccgggctgcgcgaccacggtgagctgatcaagctgcgcgtggttccgtacagcgagctctggcggtcgaccggcgacgcgaaagcactctccgcgatagccctgtacgagatggccaagagggaaggcctgctgccgcagccgacgccgtcggccaacttgtgaagacctgctagcactttaaaacagtggtggccgtcatgcctgtaaaatggaaggaggaacgtcactcgcgaaaccaaatcatatatatctctatctcttcgtttggtataacgcgcttaagcttgtctgtttgtgttatgtatacatatactaataatttaaaaataaaagtataatcgtgtttaaataaatatttcatttaatcctat

SEQ ID NO: 79603 - DNA, 1088 bp, Zea Mays
aattgctctacgtgaacgaagcttctggaaactcgctggcccgatggcatcggaggccgcgattgctcgtgcgcagtgcctccttcgcttccgccgctggtcgccactgccgcttcttcctctcccttcccctcccgctaccacacgagcagcttcctgccgccgcagcgtacgcatggcctcgtcgctgttcaagcagtggctgcggaacctgcagtcggagaagggcgtcctcacctacgggaggctgagcctcacgcgggttctcatccagggcgttgacatgttcgggaaacgggtgggctttctcaagttcaaggctgatatcgtggacgaggaaaccaaaaccaaggaattgtctttgcaagagggcccgcggttgctgtgttgattcttttggagtcgaatggagaaacatatgctgtgcttaccgaacaggttagagttcctattggaaaattcctgttggagctgcctgctgggatgctagatgacgaaaaaggtgattttgttggcaccgcagtccgtgaggtggaagaagagactggtataaagctgaatatagaagacatggttgatcttacggcactgctggaccctgctactggaggtcgaatgctaccatcaccgggtggctgcgacgaagagattggcctgttcctgtacaggggccgcgttgacgaggagaccataagatcgctccaggggaaggaaaccgggctgcgcgaccacggtgagctgatcaagctgcgcgtggttccgtacagcgagctctggcggtcgaccggcgacgcgaaagcactctccgcgatagccctgtacgagatggccaagagggaaggcctgctgccgcagccgacgccgtcggccaacttgtgaagacctgctagcactttaaaacagtggtggccgtcatgcctgtaaaatggaaggaggaacgtcactcgcgaaaccaaatcatatatatctctatctcttcgtttggtataacgcgcttaagcttgtctgtttgtgttatgtatacatatactaataatttaaaaataaaagtataatcgtgtttaaataaatatttcatttaatcctat

SEQ ID NO: 79604 - DNA, 2223 bp, Zea Mays
aaaccatttcttggtctctgtatcaaagttattcctgttctctttcagaattcgttgcatcaaccaaagcaagatcctgttgtgacattggatcatatatttggaacggaaccaatgaagattacaagcccccctacaggttctgaaattgctcttgcacttagagtcttggaaggttgttgccttttatatagccgatgcacagctctggcccacaaatacaaggctgtgaaggtactcttgaatatattagccagccgaggtccaactgagcaaggagtttgcttggacacactgatatcgctgatgttggactcaccctccaatcagatggatttcgaagaatacagtggacttgaaaaggttgctgaacttttaaaggatgtgcaagtggaaaagcatataagattgaaatgtggggaattcctattgttgctcattggacatgtttttgtgaaggaaaactctcccatacatgaacaaatgaaaaatctgtttggtgagcagtgcgcatcacttatatgggcagcaagccggttcggctccaccttggatgcagagcaaaggcagacgaccttgcaaatacaagcaatgagagttgtcgaatccttggaaccctactaggactggtgcattcatctgtgtaacttacggtttcatggagtgtggacttctgttgcgaacaaacatggagaaaagatatctgtgatctcaactgaaatatggagccagtcaaactagttgaggggtacaactttgatgaccatactacaagtgatgtccgtgtttgctttaaactgattgatgagcagccggaatggttttcctgccactcatctgttctttcccaaaacagcaagtatttttcagatcggcttggtcaaaatgatatccgctctaatagttgcgttgaaattgaatgcccaagagctcagtatgaccattatgtcaagatgttgaagttgatgtatcttcccggggaatcaattgtagattcatttgattctgttaaatcagctctgggtgttcttcgagcatcaaattcactcggatgcgagttggttaccaaaggatgtattgcatacattgaagctgtcccatgggatgataatgaggaggaggagatattagaagtagctcggagccttggctcagatgcagtgtctctattagctcgtctgcatgccccaagtgcagacgctgttaagaatgtcttcatctctgccatacgatttgctacgtgcatggaaacgctgttccctccttttctggatgacctcaagacttctgctcaggagcaaactgactttatgatccatgaagacgatgaaactgctctggttatgatggatgaagatgtcagatctgtggtgcaggaaggtataacaaaactgttatctggacttaggaccgggcttgatctgttggcaaccgagtttgatcaatcacctgatcaagcagagaaagggattctgtgtagcttagctgacatcgactgggtagctaatctgtcaaccaagattgagatgacgcacgcctttgtttctggctggtcagaaatgtcgggccatattctttcagtggttcaggacagcaagtatagctcaggcttgtgggctgtcaaggcaaagcttatcgaagtgactggaaaggccctggacgctgttggctacggcacagtggttctcccggcaccatctagattccatctcctgaagacatggcttccttatatccaaacgacaaaacgttcgctggatggaaatagcaagggcgaaatgtctctgcagatggattcagacatgtggcagaatgtggagagcgcaatagtctcgatggtgctagcgctgccgtctgatgaccaggccgatatcctgtcggagtggatgaagaacgcagagcagttcaggtatcctgatctcaccgaggcattcgaggtgtggtgctatcgcagcaaaacagcaaagagaaggcttgtgggaggactgaatgggtctagctctagcaatcccacagttagctcctaaggctactgttagtttggcctttttgttgtagcccctgatcagctaaactggccggttggtaccaagtatatgcagccaactgtatccccatcgttgtatgctgtaaagcaactgctcatgttttatatacttcagtttcattgcagtgccagcttatgttcggttcagtaaggaaagtagcctaatcttgtttcat

SEQ ID NO: 79605 - DNA, 1882 bp, Zea Mays
gatatttatcccttcccccgttctctttcttctcaaccagtatcggaacgcccaacagggaaaaaaacgacgcccagagcgccgggccatcccgcccatacctacgttagcacgttcgctgggctccgatctctccgccgccccaaacccgacggcccccaccgtccgacctaaaccaataatacggcgaaatagctgccaccgcaactcctggtccgacctgacgtgcatagcgccagggctaccgaagttcgcttccgattcgatctccacagctccgacccgaccgccgcatctccgctcttactcgaagtttcatggagtgtggacttctgttgcgaacaaacatggagaaaagatatctgtgatctcaactgaaatatggagccagtcaaactagttgaggggtacaactttgatgaccatactacaagtgatgtccgtgtttgctttaaactgattgatgagcagccggaatggttttcctgccactcatctgttctttcccaaaacagcaagtatttttcagatcggcttggtcaaaatgatatccgctctaatagttgcgttgaaattgaatgcccaagagctcagtatgaccattatgtcaagatgttgaagttgatgtatcttcccggggaatcaattgtagattcatttgattctgttaaatcagctctgggtgttcttcgagcatcaaattcactcggatgcgagttggttaccaaaggatgtattgcatacattgaagctgtcccatgggatgataatgaggaggaggagatattagaagtagctcggagccttggctcagatgcagtgtctctattagctcgtctgcatgccccaagtgcagacgctgttaagaatgtcttcatctctgccatacgatttgctacgtgcatggaaacgctgttccctccttttctggatgacctcaagacttctgctcaggagcaaactgactttatgatccatgaagacgatgaaactgctctggttatgatggatgaagatgtcagatctgtggtgcaggaaggtataacaaaactgttatctggacttaggaccgggcttgatctgttggcaaccgagtttgatcaatcacctgatcaagcagagaaagggattctgtgtagcttagctgacatcgactgggtagctaatctgtcaaccaagattgagatgacgcacgcctttgtttctggctggtcagaaatgtcgggccatattctttcagtggttcaggacagcaagtatagctcaggcttgtgggctgtcaaggcaaagcttatcgaagtgactggaaaggccctggacgctgttggctacggcacagtggttctcccggcaccatctagattccatctcctgaagacatggcttccttatatccaaacgacaaaacgttcgctggatggaaatagcaagggcgaaatgtctctgcagatggattcagacatgtggcagaatgtggagagcgcaatagtctcgatggtgctagcgctgccgtctgatgaccaggccgatatcctgtcggagtggatgaagaacgcagagcagttcaggtatcctgatctcaccgaggcattcgaggtgtggtgctatcgcagcaaaacagcaaagagaaggcttgtgggaggactgaatgggtctagctctagcaatcccacagttagctcctaaggctactgttagtttggcctttttgttgtagcccctgatcagctaaactggccggttggtaccaagtatatgcagccaactgtatccccatcgttgtatgctgtaaagcaactgctcatgttttatatacttcagtttcattgcagtgccagcttatgttcggttcagtaaggaaagtagcctaatcttgtttcat

SEQ ID NO: 79606 - DNA, 297 bp, Zea Mays
tggacgatagggagaaaactgtgctgaggtgcatttttaactggatgattcatatatattacaggtagtcataaggctacgtacactggattatattgtaaggcatacactaccatttgcttttctttttctgttctagtgttctgtatatactctactatacatcactagcttaattactgactatctgctctggttttcatttccgagactgatactacctgtccacgttttaggatgtgtgacctgaccaggggcacacacacacacatcgggcggcgatcaaaacttgcggat

SEQ ID NO: 79607 - DNA, 729 bp, Zea Mays
gccgggtgcgccgccacgtagcacgtcgtcgcggccgcctggatggaatggagggaccgggctttttcgtcattccgagctcggatcggacagacaaatggaacagagcggcgtatatatgtgacaggggcagaggaacggacgattcgtcatacgggtggcgactactgacctgaggaatcgtcttgaggagcttggacgccaggaagaacactgtgtctgcatgcaagtgaacatggcatgagaatgaggacgtcttcgtcttgtttgttaggcaatggaagcaacatctgcttctctgtcgtgctcagggaaaaagtagacgagaagaacggaagaagggaagagaaagcggtggcggcgtactggtgatgaggccgtcgcggtcgcggatgagacgggtccggacgatgccggggtggacgcagttggccgtgacgttggcgcccatctcgctgagccggtcggcgagcgctctggtgtgcaggacgttggcgagcttggacagcgcgtacgccctcgtcggatcatacggtctgttgcatatattggggtgaggtcagccagcagccagtcaagtcagtcgtcagaggctagctgatgaacgagatgacggggaaaagcgagctagctagcacagcacggagcgagcacacgcacatcttcctccgtgtgacgcggtcgaggtagccgagggcgtcgccgtcgccggggaaccagctgtggatg

SEQ ID NO: 79608 - DNA, 1126 bp, Zea Mays
aaaagatctagtagcctcacccctgcagaaaaatatcaattttggacccattgctgcctgtaacaggtggagttctcatctaatatttctgtagtatgtcataggatattttggctattaaggctgaccagattcagtgtcccagctgcccctatgatcctgtgctgtgctggtgcatgggagccacatcattgggctcatatgttggtggcactcaaggaaacacccttccctgcatgttgaacatgtgtagggacaccttgccccatattcagctatttatagggcttggttttggacagatttccctccctgccttaagctccagccatagtccactatgggggcgtggggatcctggtgttttgctggtgttaaccttccccacagcgacctagtttgcttcagccagtgcatcatgtgaccatggtgaccatgcaacccgagtgctcttctcaccgtggctagtttggagttcacgaattgtctggcatggattcaagaatacaagaactgtctgccaagtgttatttctttctggtctatgattcacaaaaaacatctgctttgttagacttctctatagtttggaggggctattggtgcaatcaactactaattcagaaagggaatatgataatgaaaagaatgcaaatcttgtatatgacaaagactacacaagtgcacaggctgccatatctggtactggtagttcagacatgatcatgtaaattcatttgttaaaacaatgttgctgcagaatggtaactgaagtaccatgtaacgtagctcttgatcatccagcatgccataaatagcccatcttgaccaggacttgagcacaataccgccatagcccttatccctattaactggcagacagaagtcaggccatcataaagcatatgtttatctggaacgagactgtgcatgaatttacctacattcactcactattatatcgatagtttttgccttttgcttcttttcgaatagtaaaacagcaagaagtgctttcaagacaattctcggcactacctggaaaacaagaatgaaagccaaaactcttaattgcgaaaaacattaatttccccctgctgtgtactatgcagacagtaaataaaag

SEQ ID NO: 79609 - DNA, 2180 bp, Zea Mays
taaggctgaccagattcagtgtcccagctgcccctatgatcctgtgctgtgctggtgcatgggagccacatcattgggctcatatgttggtggcactcaaggaaacacccttccctgcatgttgaacatgtgtagggacaccttgccccatattcagctatttatagggcttggttttggacagatttccctccctgccttaagctccagccatagtccactatgggggcgtggggatcctggtgttttgctggtgttaaccttccccacagcgacctagtttgcttcagccagtgcatcatgtgaccatggtgaccatgcaacccgagtgctcttctcaccgtggctagaaaacgaagaagagatcgaagtgactcaagagaagacatcaccacctttgaaatctcaggcagggacttggctctacttcgacatctgcgagtccgagcctgactcgtctataaacaaaggcaagccccggtgcatgcaaccccttccttgtgtttttaaatacttttcgcacactttaagtctagtgaaatgtgcattaagtttataggagttgcttgaaaccctttgatgcattaccttccttgatatccatacccgttatagatacttctttggaagtatcaaaatttgatttacaaaaatgcttagccctgcttagatcttgtggatggaagttgtcttttgcgttaaggccttgctcaggggttatcctgaggaaagatgacttctacctgcaagaatatattttcattgggagcatggtgggatcttactgcaaagttccctgtgatgctcttttcatcctaaggaacagaaacaatcctaaggatggaaatacttaaatcgagacttgggctaggaacaggtgatgttctacccaggttgattaaggattgaatgcgtatgtaggcttgatagagtaaggactatcttagctagccgcataccctggaaatgggacagggtaagctttgcctcgggcagactaaggccagaataagataacacgaaatgagcgtggagcggtggcgggagtagcgtgtaccctccgtggcaagaggctggacggtggtgtatctgtgctctcggtttgcgtgaacctgatctggtcttaagaaccctggggtcgagttgacatatgcaaggattaagtgctacatatgtcgtgtggttagagatcctcagctgagtaaatcgattcggatcgccgttatatccccggagagtggagacttgatcactgccctacaacctaagtcaggatgtgaacttcgtaaataaaaatgatgttgtattgatgagatgatgaaattagactagaggcaaacagagtctattaatatttaatctggcgttaaaatattgaaagtaaggactcactttagtaagctatttctgcaaaagtatctaagttgattcttgctaaagcctctccttgattcctatttatccagcatacccttgagagtcttttctttagtcgggtaagacttgctgagtaattccatactcagggtttatccctttgttgtttttaggtgaggaagcgacaaatttttgttgcttttgctccaaggtggtatcaaatgaagaaaagcaagagtgaagatgcgggaggacgtggtcctccatataggactttttgtttaaagctatcgggaggagtttttgcctcccttgatatgtgtactactcagcactcgtttatagctctggtctgtaataagtaacttgatcttactttctaaataaatgtaagtttatgtaatagcttccgcatttctttatctccgatgttctgtaatgtctgcaagacgggtgaaacgttcctggtaaggtaagaaagaagataccgaacttgtcgagtgattcaggaacatctacagggttgtctgatgtctgttggacaaggacaactgtaggtgggcctaattacttgggaggttccgtcacaggtacggccgattgagaacccccgaacacattccaatcgaaccaattaccttatttacttttcctgccctaggagtagatgtagcatagttctagttgtagtcttccacatatccacctccatccctattcgactctacgtcgtctagatccgtcttgggtggcctgccgatcccaagacaaccctaggatctcacccctcccgggggcaagat

SEQ ID NO: 79610 - DNA, 1806 bp, Zea Mays
tcctctcctttttgaagcttcctaatacgagtattttcttatcaaatggtgaaatataaaaccctctcatttatatggtctctacgggtacctcactattatactatatgtataggtggagacgcacccaccctttatttgcttcagactttagagacgatcgagtcagtataatactattataaaggttgttttattaattaagtcagaatgggattgcagaagaagatacatagttgtctgacgcattgctgctactcgttgattccttcccgaccaccgctttgcgcccgccgttgtttcggacattgacagacaggctcacagccgtgtgccatttcatatagagccatctagttgataatttggtcaaaaccaattaccttctgcctacaattggttcatattttgtaggtaactgaatccaattcccctcaggatcctttacatggcttctgtctgaggcaaatgattaaagaaacaaaggagcttgaatcacacggaagagtctgcaaacaatatgtgggggataactatagtaagttgcatctaagtataaactatgctacccccttctaaccaaggatcaagaaaaacgtgatcttcacagaagaaaaaactcaacccatgctgtagaaagcctcctttcctcttatatagtcatgcatgatattgcaatcttgcatgcacactatgatatggcccccaaaatatgaatcagtaaaattaattcaaaacatggatagatgaatttactgctgagttcataaatgcagatctagtgactggttgagttcttgaggtcctcctcggtgaagttggtcatcatcttggtgatgatgaagccggtgatggcgaactccgtgatgaagggccggtgatgtcaaacgtcttcatcctctcttctcaaagtgcgtagcgcaaggatggtggtccaacgatgtgctggtcagctcgtccaggagacgtgggcggcagttgcggctacggcgggggcggcgtcgacgggagacggagatgtgagagcctccgtgccgttggagatggttgtggtggggcatggaccgggagcgaggggaagaagtggggcgcgtcacggagctggatcctactcgacgcggtcggggacgagcaggtgctggacgccgataagtacgccatcatgtgccacgtcgacatcaacgtgcgtgacctccgcatcctcgacccgctgctatcctacccctcagcgaggtggcgttgctgctgctgccgatcgatcgtcatgggggtgggacggcgcgcgctcggcggcgccagcccaagctccagctccatgccacaagtcttcttgcttgctggcaacgctgcgagctttgggacttggatgctctctgtttcctatagaaacacgcgcgctggctgctgcacttgcacggagggagaaagcttgggattcagatgcgatggatggcggacgtgggcggggataagcagatgctccgcacagatccactccctttggcaggagtcaccgtgatgaagggccggtgatttgaggatggagcgcgggattcgtcaccatagaaggaagcctccgcgggcgggattcgcggcagatttggcagactggcgattcacggatccatggattcgtcgatccatctcaagtcgcacaaggaaaggggcaggcaggcgctgttgggggaggggggcaaggctgccatgccgtcccgcgatttgtgggctcgatctcgcttcgcgagaggaaaggggagccgatctcgcgtcgcgcggccgtggatgggagccggcgctgtgggggag

SEQ ID NO: 79611 - DNA, 2877 bp, Zea Mays
cccaactccgtccgctccaacagcggcgaacccaacgcaccccaccgcacactcacaggcgccagcctagcccacgctgttgttctcctctctcagtcgcctcgccccaccgtgtctccctcccctcggtgtcgtcaatcaccgcacccgctgctgctagcccgcaactccctcgcttcctgcacccacatccccgcggcgctacctgcctacccagatcccgctcgccggtggtgccctcctcagtcctcactctcccgccgctggcgccgccggagcgagggggactgcccataccctactaggacgagcagtaggaggcggaggggcgagatccggcggaggccgccccgatgggggacttcaatgtggcactggtgatcgtggcggcggtggtcagcgtgctggtgctgctcgtcagcgtctaccttctcgtcaactaccagcaccccgacgacgtcaaccaggcctacttccccaagctcgtcgtcgtgctcggcctcaccgtcgccgtcctctccatcctcatgctccccgccgacgtcgccaaccgccaggcatgccgcaaggccgtctacaacggcgcctgcagcctcacgctccccatgaggacgctctggctcgtcgtttacatcgttgacgccgtcctcgtcttcctcgtcatccccttcgcaatgttctactacgagggcgaccaggacaagtccgtcgggaagaggctcaggaccgcgctcatctgggtcgtcgcgtccgcggtagtgtgcggcctcgtcctcggcatcctatacggattggagtgacatcctgaaagctactggagtaccatttctagtgtagttcaattaaaaaaaagtggtgtcctttgcccgaaccttgtggtggattccagcgtttccctgcattggtgttcggattgaagcgacatctttgagctccgaacctttttttccctatcctaattcaatcttttatcgctacaagcctacaactgcccaaacccagaattcagttaccttgttctcttcccgtgtttcatgaacttggtttatatttctttctactgtgtatatgtgtttctttccctcaggggattttatttagtttacggaacaagattagcttgtctccttgttttacagttatatgaccgtcagacaaaactgtacaacttttttggtagttgcaatgcgcaggatggtatgccttgatggaaaccttatttttaccttatatacagatcctattgcacaaatttctgataattaacaacatgcgatgattatggatacacatttatgtcatcaaatgataaacagatatcatcaagttcctaactttcagcaatgtcaaaccttttcagttttgtgatggtgtgtgtttacctaagtaggctgatcccatctccattttgtcgcttcaggacttgttggtaaagtggacttcactgtcaggcacctatcttcctcggtccagacatttccaaactcattttctggattctcaagtggccagccgtgcattagtccattgactcgtcagtgtgcggcttctactgcaccggctaactcgcaaacaacttggacaatgcgtgctaccttccctgaatatgtggttgctcttactacaattgttggatctgtgcttttcacgatatttggtggtgtcggaattgcctgccttccattgggacttatattctcatttgttcggcgtccaaaagctgtaattacacgctcacaatatataaaggaagcaactgaattggggaagaaggccagggagctgaaaaaggcggctgaagctcttcaccaagaagaaagaagtgggaacaagggccggaaatggcgaaaaaacgtgaaggctgtagagaaggagttactacttctggaagatgacatgaaggctctagaagagatgtatcctcaaggagaacagaggctacttgggcattcacagtccttgggtacattggaaaacttatatttggtgttgttgggttaattgtttcaatagcttgggttgcacatatcgtcatatacttgttgattgatcctcctctatcttctttcctgaatgaagtcttcataaagttggatggtgtttggggtctccttgggactgctgctttcgcattcttctgcttctatctccttattgcagtgattgctggggagatgatgcttggtttgaaacttgttttcatcacaattcacccaatgaaatggggaggcactttaatgaactcctttttgtttaatgttgggctcatactactttgctccatcagtgtgattcagttctgtgccacggcttttgcctattatgcacaagcaactgctgctcaagagatctttggccacacattgcaatcccttcgtggaattaagtatctttacaagtacaatgttttccagtatggctttgttgctcttgccatcctcacactcttctactatgctatatttgggtggagaaaaaagaagccaacagggaggttccagctctcaaaatgattcatcacatttcccccctgagtgatagttcagttagcgtcgtacggatgtatatgaacgaaaccaaatcttttcaaagagctgaggagctgcaaatggtgtatattatcaactacgtgacctcaaagccgagaatgttggttaccacggacatggatgttagaagtagaacccagttaactttgcagcgtttggtgtgtttgggggcgctttgccgcccccagttcgatattcatttcttggttgtgtctggagttagtcagttcattgcttttgtatgtattatatactgtgattacaacacaaggttctaggttgtattaatgatatgtcctgatcattcctgtgcccgttccactgtctt

SEQ ID NO: 79612 - DNA, 2881 bp, Zea Mays
cccaactccgtccgctccaacagcggcgaacccaacgcaccccaccgcacactcacaggcgccagcctagcccacgctgttgttctcctctctcagtcgcctcgccccaccgtgtctccctcccctcggtgtcgtcaatcaccgcacccgctgctgctagcccgcaactccctcgcttcctgcacccacatccccgcggcgctacctgcctacccagatcccgctcgccggtggtgccctcctcagtcctcactctcccgccgctggcgccgccggagcgagggggactgcccataccctactaggacgagcagtaggaggcggaggggcgagatccggcggaggccgccccgatgggggacttcaatgtggcactggtgatcgtggcggcggtggtcagcgtgctggtgctgctcgtcagcgtctaccttctcgtcaactaccagcaccccgacgacgtcaaccaggcctacttccccaagctcgtcgtcgtgctcggcctcaccgtcgccgtcctctccatcctcatgctccccgccgacgtcgccaaccgccaggcatgccgcaaggccgtctacaacggcgcctgcagcctcacgctccccatgaggacgctctggctcgtcgtttacatcgttgacgccgtcctcgtcttcctcgtcatccccttcgcaatgttctactacgagggcgaccaggacaagtccgtcgggaagaggctcaggaccgcgctcatctgggtcgtcgcgtccgcggtagtgtgcggcctcgtcctcggcatcctatacggattggagtgacatcctgaaagctactggagtaccatttctagtgtagttcaattaaaaaaaagtggtgtcctttgcccgaaccttgtggtggattccagcgtttccctgcattggtgttcggattgaagcgacatctttgagctccgaacctttttttccctatcctaattcaatcttttatcgctacaagcctacaactgcccaaacccagaattcagttaccttgttctcttcccgtgtttcatgaacttggtttatatttctttctactgtgtatatgtgtttctttccctcaggggattttatttagtttacggaacaagattagcttgtctccttgttttacagttatatgaccgtcagacaaaactgtacaacttttttggtagttgcaatgcgcaggatggtatgccttgatggaaaccttatttttaccttatatacagatcctattgcacaaatttctgataattaacaacatgcgatgattatggatacacatttatgtcatcaaatgataaacagatatcatcaagttcctaactttcagcaatgtcaaaccttttcagttttgtgatggtgtgtgtttacctaagtaggctgatcccatctccattttgtcgcttcaggacttgttggtaaagtggacttcactgtcaggcacctatcttcctcggtccagacatttccaaactcattttctggattctcaagtggccagccgtgcattagtccattgactcgtcagtgtgcggcttctactgcaccggctaactcgcaaacaacttggacaatgcgtgctaccttccctgaatatgtggttgctcttactacaattgttggatctgtgcttttcacgatatttggtggtgtcggaattgcctgccttccattgggacttatattctcatttgttcggcgtccaaaagctgtaattacacgctcacaatatataaaggaagcaactgaattggggaagaaggccagggagctgaaaaaggcggctgaagctcttcaccaagaagaaagaagtgggaacaagggccggaaatggcgaaaaaacgtgaaggctgtagagaaggagttactacttctggaagatgacatgaaggctctagaagagatgtatcctcaaggagaacaggcagaggctacttgggcattcacagtccttgggtacattggaaaacttatatttggtgttgttgggttaattgtttcaatagcttgggttgcacatatcgtcatatacttgttgattgatcctcctctatcttctttcctgaatgaagtcttcataaagttggatggtgtttggggtctccttgggactgctgctttcgcattcttctgcttctatctccttattgcagtgattgctggggagatgatgcttggtttgaaacttgttttcatcacaattcacccaatgaaatggggaggcactttaatgaactcctttttgtttaatgttgggctcatactactttgctccatcagtgtgattcagttctgtgccacggcttttgcctattatgcacaagcaactgctgctcaagagatctttggccacacattgcaatcccttcgtggaattaagtatctttacaagtacaatgttttccagtatggctttgttgctcttgccatcctcacactcttctactatgctatatttgggtggagaaaaaagaagccaacagggaggttccagctctcaaaatgattcatcacatttcccccctgagtgatagttcagttagcgtcgtacggatgtatatgaacgaaaccaaatcttttcaaagagctgaggagctgcaaatggtgtatattatcaactacgtgacctcaaagccgagaatgttggttaccacggacatggatgttagaagtagaacccagttaactttgcagcgtttggtgtgtttgggggcgctttgccgcccccagttcgatattcatttcttggttgtgtctggagttagtcagttcattgcttttgtatgtattatatactgtgattacaacacaaggttctaggttgtattaatgatatgtcctgatcattcctgtgcccgttccactgtctt

SEQ ID NO: 79613 - DNA, 2233 bp, Zea Mays
cccaactccgtccgctccaacagcggcgaacccaacgcaccccaccgcacactcacaggcgccagcctagcccacgctgttgttctcctctctcagtcgcctcgccccaccgtgtctccctcccctcggtgtcgtcaatcaccgcacccgctgctgctagcccgcaactccctcgcttcctgcacccacatccccgcggcgctacctgcctacccagatcccgctcgccggtggtgccctcctcagtcctcactctcccgccgctggcgccgccggagcgagggggactgcccataccctactaggacgagcagtaggaggcggaggggcgagatccggcggaggccgccccgatgggggacttcaatgtggcactggtgatcgtggcggcggtggtcagcgtgctggtgctgctcgtcagcgtctaccttctcgtcaactaccagcaccccgacgacgtcaaccaggcctacttccccaagctcgtcgtcgtgctcggcctcaccgtcgccgtcctctccatcctcatgctccccgccgacgtcgccaaccgccaggcatgccgcaaggccgtctacaacggcgcctgcagcctcacgctccccatgaggacgctctggctcgtcgtttacatcgttgacgccgtcctcgtcttcctcgtcatccccttcgcaatgttctactacgagggcgaccaggacaagtccgtcgggaagaggctcaggaccgcgctcatctgggtcgtcgcgtccgcggtagtgtgcggcctcgtcctcggcatcctatacggacttgttggtaaagtggacttcactgtcaggcacctatcttcctcggtccagacatttccaaactcattttctggattctcaagtggccagccgtgcattagtccattgactcgtcagtgtgcggcttctactgcaccggctaactcgcaaacaacttggacaatgcgtgctaccttccctgaatatgtggttgctcttactacaattgttggatctgtgcttttcacgatatttggtggtgtcggaattgcctgccttccattgggacttatattctcatttgttcggcgtccaaaagctgtaattacacgctcacaatatataaaggaagcaactgaattggggaagaaggccagggagctgaaaaaggcggctgaagctcttcaccaagaagaaagaagtgggaacaagggccggaaatggcgaaaaaacgtgaaggctgtagagaaggagttactacttctggaagatgacatgaaggctctagaagagatgtatcctcaaggagaacaggcagaggctacttgggcattcacagtccttgggtacattggaaaacttatatttggtgttgttggcttgggttgcacatatcgtcatatacttgttgattgatcctcctctatcttctttcctgaatgaagtcttcataaagttggatggtgtttggggtctccttgggactgctgctttcgcattcttctgcttctatctccttattgcagtgattgctggggagatgatgcttggtttgaaacttgttttcatcacaattcacccaatgaaatggggaggcactttaatgaactcctttttgtttaatgttgggctcatactactttgctccatcagtgtgattcagttctgtgccacggcttttgcctattatgcacaagcaactgctgctcaagagatctttggccacacattgcaatcccttcgtggaattaagtatctttacaagtacaatgttttccagtatggctttgttgctcttgccatcctcacactcttctactatgctatatttgggtggagaaaaaagaagccaacagggaggttccagctctcaaaatgattcatcacatttcccccctgagtgatagttcagttagcgtcgtacggatgtatatgaacgaaaccaaatcttttcaaagagctgaggagctgcaaatggtgtatattatcaactacgtgacctcaaagccgagaatgttggttaccacggacatggatgttagaagtagaacccagttaactttgcagcgtttggtgtgtttgggggcgctttgccgcccccagttcgatattcatttcttggttgtgtctggagttagtcagttcattgcttttgtatgtattatatactgtgattacaacacaaggttctaggttgtattaatgatatgtcctgatcattcctgtgcccgttccactgtctt

SEQ ID NO: 79614 - DNA, 2199 bp, Zea Mays
caacgcaccccaccgcacactcacaggcgccagcctagcccacgctgttgttctcctctctcagtcgcctcgccccaccgtgtctccctcccctcggtgtcgtcaatcaccgcacccgctgctgctagcccgcaactccctcgcttcctgcacccacatccccgcggcgctacctgcctacccagatcccgctcgccggtggtgccctcctcagtcctcactctcccgccgctggcgccgccggagcgagggggactgcccataccctactaggacgagcagtaggaggcggaggggcgagatccggcggaggccgccccgatgggggacttcaatgtggcactggtgatcgtggcggcggtggtcagcgtgctggtgctgctcgtcagcgtctaccttctcgtcaactaccagcaccccgacgacgtcaaccaggcctacttccccaagctcgtcgtcgtgctcggcctcaccgtcgccgtcctctccatcctcatgctccccgccgacgtcgccaaccgccaggcatgccgcaaggccgtctacaacggcgcctgcagcctcacgctccccatgaggacgctctggctcgtcgtttacatcgttgacgccgtcctcgtcttcctcgtcatccccttcgcaatgttctactacgagggcgaccaggacaagtccgtcgggaagaggctcaggaccgcgctcatctgggtcgtcgcgtccgcggtagtgtgcggcctcgtcctcggcatcctatacggacttgttggtaaagtggacttcactgtcaggcacctatcttcctcggtccagacatttccaaactcattttctggattctcaagtggccagccgtgcattagtccattgactcgtcagtgtgcggcttctactgcaccggctaactcgcaaacaacttggacaatgcgtgctaccttccctgaatatgtggttgctcttactacaattgttggatctgtgcttttcacgatatttggtggtgtcggaattgcctgccttccattgggacttatattctcatttgttcggcgtccaaaagctgtaattacacgctcacaatatataaaggaagcaactgaattggggaagaaggccagggagctgaaaaaggcggctgaagctcttcaccaagaagaaagaagtgggaacaagggccggaaatggcgaaaaaacgtgaaggctgtagagaaggagttactacttctggaagatgacatgaaggctctagaagagatgcagaggctacttgggcattcacagtccttgggtacattggaaaacttatatttggtgttgttgggttaattgtttcaatagcttgggttgcacatatcgtcatatacttgttgattgatcctcctctatcttctttcctgaatgaagtcttcataaagttggatggtgtttggggtctccttgggactgctgctttcgcattcttctgcttctatctccttattgcagtgattgctggggagatgatgcttggtttgaaacttgttttcatcacaattcacccaatgaaatggggaggcactttaatgaactcctttttgtttaatgttgggctcatactactttgctccatcagtgtgattcagttctgtgccacggcttttgcctattatgcacaagcaactgctgctcaagagatctttggccacacattgcaatcccttcgtggaattaagtatctttacaagtacaatgttttccagtatggctttgttgctcttgccatcctcacactcttctactatgctatatttgggtggagaaaaaagaagccaacagggaggttccagctctcaaaatgattcatcacatttcccccctgagtgatagttcagttagcgtcgtacggatgtatatgaacgaaaccaaatcttttcaaagagctgaggagctgcaaatggtgtatattatcaactacgtgacctcaaagccgagaatgttggttaccacggacatggatgttagaagtagaacccagttaactttgcagcgtttggtgtgtttgggggcgctttgccgcccccagttcgatattcatttcttggttgtgtctggagttagtcagttcattgcttttgtatgtattatatactgtgattacaacacaaggttctaggttgtattaatgatatgtcctgatcattcctgtgcccgttccactgtctt

SEQ ID NO: 79615 - DNA, 2177 bp, Zea Mays
ccccaccgcacactcacaggcgccagcctagcccacgctgttgttctcctctctcagtcgcctcgccccaccgtgtctccctcccctcggtgtcgtcaatcaccgcacccgctgctgctagcccgcaactccctcgcttcctgcacccacatccccgcggcgctacctgcctacccagatcccgctcgccggtggtgccctcctcagtcctcactctcccgccgctggcgccgccggagcgagggggactgcccataccctactaggacgagcagtaggaggcggaggggcgagatccggcggaggccgccccgatgggggacttcaatgtggcactggtgatcgtggcggcggtggtcagcgtgctggtgctgctcgtcagcgtctaccttctcgtcaactaccagcaccccgacgacgtcaaccaggcctacttccccaagctcgtcgtcgtgctcggcctcaccgtcgccgtcctctccatcctcatgctccccgccgacgtcgccaaccgccaggcatgccgcaaggccgtctacaacggcgcctgcagcctcacgctccccatgaggacgctctggctcgtcgtttacatcgttgacgccgtcctcgtcttcctcgtcatccccttcgcaatgttctactacgagggcgaccaggacaagtccgtcgggaagaggctcaggaccgcgctcatctgggtcgtcgcgtccgcggacttgttggtaaagtggacttcactgtcaggcacctatcttcctcggtccagacatttccaaactcattttctggattctcaagtggccagccgtgcattagtccattgactcgtcagtgtgcggcttctactgcaccggctaactcgcaaacaacttggacaatgcgtgctaccttccctgaatatgtggttgctcttactacaattgttggatctgtgcttttcacgatatttggtggtgtcggaattgcctgccttccattgggacttatattctcatttgttcggcgtccaaaagctgtaattacacgctcacaatatataaaggaagcaactgaattggggaagaaggccagggagctgaaaaaggcggctgaagctcttcaccaagaagaaagaagtgggaacaagggccggaaatggcgaaaaaacgtgaaggctgtagagaaggagttactacttctggaagatgacatgaaggctctagaagagatgtatcctcaaggagaacaggcagaggctacttgggcattcacagtccttgggtacattggaaaacttatatttggtgttgttgggttaattgtttcaatagcttgggttgcacatatcgtcatatacttgttgattgatcctcctctatcttctttcctgaatgaagtcttcataaagttggatggtgtttggggtctccttgggactgctgctttcgcattcttctgcttctatctccttattgcagtgattgctggggagatgatgcttggtttgaaacttgttttcatcacaattcacccaatgaaatggggaggcactttaatgaactcctttttgtttaatgttgggctcatactactttgctccatcagtgtgattcagttctgtgccacggcttttgcctattatgcacaagcaactgctgctcaagagatctttggccacacattgcaatcccttcgtggaattaagtatctttacaagtacaatgttttccagtatggctttgttgctcttgccatcctcacactcttctactatgctatatttgggtggagaaaaaagaagccaacagggaggttccagctctcaaaatgattcatcacatttcccccctgagtgatagttcagttagcgtcgtacggatgtatatgaacgaaaccaaatcttttcaaagagctgaggagctgcaaatggtgtatattatcaactacgtgacctcaaagccgagaatgttggttaccacggacatggatgttagaagtagaacccagttaactttgcagcgtttggtgtgtttgggggcgctttgccgcccccagttcgatattcatttcttggttgtgtctggagttagtcagttcattgcttttgtatgtattatatactgtgattacaacacaaggttctaggttgtattaatgatatgtcctgatcattcctgtgcccgttccactgtctt

SEQ ID NO: 79616 - DNA, 2149 bp, Zea Mays
cacactcacaggcgccagcctagcccacgctgttgttctcctctctcagtcgcctcgccccaccgtgtctccctcccctcggtgtcgtcaatcaccgcacccgctgctgctagcccgcaactccctcgcttcctgcacccacatccccgcggcgctacctgcctacccagatcccgctcgccggtggtgccctcctcagtcctcactctcccgccgctggcgccgccggagcgagggggactgcccataccctactaggacgagcagtaggaggcggaggggcgagatccggcggaggccgccccgatgggggacttcaatgtggcactggtgatcgtggcggcggtggtcagcgtgctggtgctgctcgtcagcgtctaccttctcgtcaactaccagcaccccgacgacgtcaaccaggcctacttccccaagctcgtcgtcgtgctcggcctcaccgtcgccgtcctctccatcctcatgctccccgccgacgtcgccaaccgccaggcatgccgcaaggccgtctacaacggcgcctgcagcctcacgctccccatgaggacgctctggctcgtcgtttacatcgttgacgccgtcctcgtcttcctcgtcatccccttcgcaatgttctactacgagggcgaccaggacaagtccgtcgggaagaggctcaggaccgcgctcatctgggtcgtcgcgtccgcggtagtgtgcggcctcgtcctcggcatcctatacggacttgttggtaaagtggacttcactgtcaggcacctatcttcctcggtccagacatttccaaactcattttctggattctcaagtggccagccgtgcattagtccattgactcgtcagtgtgcggcttctactgcaccggctaactcgcaaacaacttggacaatgcgtgctaccttccctgaatatgtggttgctcttactacaattgttggatctgtgcttttcacgatatttggtggtgtcggaattgcctgccttccattgggacttatattctcatttgttcggcgtccaaaagctgtaattacacgctcacaatatataaaggaagcaactgaattggggaagaaggccagggagctgaaaaaggcggctgaagctcttcaccaagaagaaagaagtgggaacaagggccggaaatggcgaaaaaacgtgaaggctgtagagaaggagttactacttctggaagatgacatgaaggctctagaagagatgtatcctcaaggagaacaggcagaggctacttgggcattcacagtccttgggtacattggaaaacttatatttggtgttgttgggttaattgtttcaatagcttgggttgcacatatcgtcatatacttgttgattgatcctcctctatcttctttcctgaatgaagtcttcataaagttggatggtgtttgggtgattgctggggagatgatgcttggtttgaaacttgttttcatcacaattcacccaatgaaatggggaggcactttaatgaactcctttttgtttaatgttgggctcatactactttgctccatcagtgtgattcagttctgtgccacggcttttgcctattatgcacaagcaactgctgctcaagagatctttggccacacattgcaatcccttcgtggaattaagtatctttacaagtacaatgttttccagtatggctttgttgctcttgccatcctcacactcttctactatgctatatttgggtggagaaaaaagaagccaacagggaggttccagctctcaaaatgattcatcacatttcccccctgagtgatagttcagttagcgtcgtacggatgtatatgaacgaaaccaaatcttttcaaagagctgaggagctgcaaatggtgtatattatcaactacgtgacctcaaagccgagaatgttggttaccacggacatggatgttagaagtagaacccagttaactttgcagcgtttggtgtgtttgggggcgctttgccgcccccagttcgatattcatttcttggttgtgtctggagttagtcagttcattgcttttgtatgtattatatactgtgattacaacacaaggttctaggttgtattaatgatatgtcctgatcattcctgtgcccgttccactgtctt

SEQ ID NO: 79617 - DNA, 2195 bp, Zea Mays
cgctgttgttctcctctctcagtcgcctcgccccaccgtgtctccctcccctcggtgtcgtcaatcaccgcacccgctgctgctagcccgcaactccctcgcttcctgcacccacatccccgcggcgctacctgcctacccagatcccgctcgccggtggtgccctcctcagtcctcactctcccgccgctggcgccgccggagcgagggggactgcccataccctactaggacgagcagtaggaggcggaggggcgagatccggcggaggccgccccgatgggggacttcaatgtggcactggtgatcgtggcggcggtggtcagcgtgctggtgctgctcgtcagcgtctaccttctcgtcaactaccagcaccccgacgacgtcaaccaggcctacttccccaagctcgtcgtcgtgctcggcctcaccgtcgccgtcctctccatcctcatgctccccgccgacgtcgccaaccgccaggcatgccgcaaggccgtctacaacggcgcctgcagcctcacgctccccatgaggacgctctggctcgtcgtttacatcgttgacgccgtcctcgtcttcctcgtcatccccttcgcaatgttctactacgagggcgaccaggacaagtccgtcgggaagaggctcaggaccgcgctcatctgggtcgtcgcgtccgcggtagtgtgcggcctcgtcctcggcatcctatacggacttgttggtaaagtggacttcactgtcaggcacctatcttcctcggtccagacatttccaaactcattttctggattctcaagtggccagccgtgcattagtccattgactcgtcagtgtgcggcttctactgcaccggctaactcgcaaacaacttggacaatgcgtgctaccttccctgaatatgtggttgctcttactacaattgttggatctgtgcttttcacgatatttggtggtgtcggaattgcctgccttccattgggacttatattctcatttgttcggcgtccaaaagctgtaattacacgctcacaatatataaaggttaaaatctgccctgcaggaagcaactgaattggggaagaaggccagggagctgaaaaaggcggctgaagctcttcaccaagaagaaagaagtgggaacaagggccggaaatggcgaaaaaacgtgaaggctgtagagaaggagttactacttctggaagatgacatgaaggctctagaagagatgtatcctcaaggagaacaggcagaggctacttgggcattcacagtccttgggtacattggaaaacttatatttggtgttgttgggttaattgtttcaatagcttgggttgcacatatcgtcatatacttgttgattgatcctcctctatcttctttcctgaatgaagtcttcataaagttggatggtgtttggggtctccttgggactgctgctttcgcattcttctgcttctatctccttattgcagtgattgctggggagatgatgcttggtttgaaacttgttttcatcacaattcacccaatgaaatggggaggcactttaatgaactcctttttgtttaatgttgggctcatactactttgctccatcagtgtgattcagttctgtgccacggcttttgcctattatgcacaagcaactgctgctcaagagatctttggccacacattgcaatcccttcgtggaattaagtatctttacaagtacaatgttttccagtatggctttgttgctcttgccatcctcacactcttctactatgctatatttgggtggagaaaaaagaagccaacagggaggttccagctctcaaaatgattcatcacatttcccccctgagtgatagttcagttagcgtcgtacggatgtatatgaacgaaaccaaatcttttcaaagagctgaggagctgcaaatggtgtatattatcaactacgtgacctcaaagccgagaatgttggttaccacggacatggatgttagaagtagaacccagttaactttgcagcgtttggtgtgtttgggggcgctttgccgcccccagttcgatattcatttcttggttgtgtctggagttagtcagttcattgcttttgtatgtattatatactgtgattacaacacaaggttctaggttgtattaatgatatgtcctgatcattcctgtgcccgttccactgtctt

SEQ ID NO: 79618 - DNA, 2045 bp, Zea Mays
agagcagtgagtgggagaggaagagagccagccacagaatagtgagtgagagagatagagtgctcattcatggtgcggcaagaggatcagtagcattaggaactaggaacaccacacgttgcattgcattgcattgcattgcattgcattgttaacttgtggtgctgggttccgccgctcgccgctgcctggcttccactgccgtcgccgccgcgcgggctctgctgcagaggatgagcaccgcgcagcgattcgacatcctcccctacggcttctccaagcgggcgagcaaccgcggcgatggctccggcgccgcgccgcgcgtcgcggcgcccgacgccaggagcggtggcggcggcggcacctgctccttccgcgcccacccggcgccgccagtcacgcaggccgtttcctggggcgccaagccggagcccggcggcaatggcgctgcgtgggagaggagcagggccgttaagcgggcccatgaggaagacgcaggcgaggagtacggcggccccgtcgttcgcgccaagcggacgaggatgggcggggacggggataaggtatggttccatcgatccattgcagggacagtgcaagcggccgggtccggcgacggacacgaagccgaggaagagaaggccttcctggtgccgagcgccgcggcgttcccccacggcatgtccgccgccgccgcgggcccgtcgctggccgtggccaagaaagaggagttcagcaagtcgccgtccaactcgccggcctcgtcgggcggcacggacggcggctcgtcggctgtcccgtggccggagcagctccacgcgcagaacggcgccgcggcgcgggtggaggccatggagctcgtcgtcgcgctcaccgcctgcgccgactccgtcgccgcctgcaaccacgacgccgccaactactacctggcgcggctgggcgagatggcctcccccgcggggcccacgccgatgcaccgcgtggccgcctacttcgcggaggcgctcacgctgcgcgtggtgcgcatgtggccccaggtgttcgacgttagcccgccgcgcgagctcaccgacggcgccgtcgccgccgacgacgacgcgacggcgctgcgggtgctcaacgccgtcaccccgatcccgcgcttcctgcacttcaccctcaacgagcgggtgctccgcgcgttcgacggccacgaccgcgtccacgtcattgacttcgacatcaagcaggggctgcagtggccgggcctcctccagagcctcgccacgcgcgtggctcccccggcgcacgtgcggatcaccggcgtcggcgagtcaagacaggagctgcaggagaccggcgcgcggctggggcgcgtggccgccgcgctcgggctcgcgttcgagttccacgccgtggtggaccgcctcgaggacgtccgcctgtggatgctccacgtgaagcgcggcgagtgcgtcgccgtgaactgcgtcctcgcggcgcaccgcctgctccgcgacgagaccggcgccgcggtggccgacttcctcgggctcacgcgcagcacgggcgccgccatcctcctcctgggcgagcacgaggacgccctcaactccgggcggtgggaggcgcggttcgcgcgcgcgctgcggtactacgccgcggcgttcgacgccgtggaggcggctgggctggcggacgccagccccgcgagggccaaggcggaggagatgttcgcgcgggagatccgcaacgcggtggcgttcgaggccgcggaccgcttcgagcggcacgagaccttcaccgggtggcggcagcgcatgcaggaaggcgggttccagaacgccggcatcggcgaccgggaggcgttgcaggggcgcatgatcgcgaggatgttcgcgccgggcaactacagcgtgcaggtgcagggcgacggcgaggggctcacgctccggtggatggaccaggccatgtacaccgtgtccgcgtggacgccggtcagcgacgggggcagcacggtgtctgcgtctgtctccaccacagcatcccattctcagcatagctga

SEQ ID NO: 79619 - DNA, 1365 bp, Zea Mays
aggaagcccacttgcagtgcgggcgcggatgtgcatttcccttttcaacccacttgcagtgtcgactgggctaccgcggtattaccgccgccgccgccgccgccctacgccggttaccgaggtcttcgtcagccccttcgccggcggcgagcaccctttaggtattcctttcccggctcccgctgcgcgaaaccggccacccaaatttgtccttcactgggtgtctgggtccgatcctggcctggctgaaggggcttccagcaacacacacgtgggcgaggttggtgatagaggcaggtaggagcggctccgatgcggaccgcctaagatgagcccattacgttctcgcgtcggcttacactggctcccacgccgtgggtggatgtttcgccaggccaagacgagcatccatgcttgtcgcgactggtgctgatgcctggttgcaggcctttggcggaccgacgttgcttcctcgggtcaaggttttggcctctcacgaagaggatgccaggaaagagaatgacatggtggaggagattctaatccccaagcaaacaattggtggcaattggtttgttccgtttcgtgctccatgagacatgcagctcaccttcgtcgtcgctccctccgtcaaagctttgctccactacctatggcaaagagttggataaagtgactggtcaaaagagacgtggtgttattaactatgacacaagtttgtgcttggtctacccatatatttcaactctgaagtgtctacttattcatctaaacaaggcgtcacatatttacagcccacagatggaagggttctcaaattagcgctgctacctcaggtatggcagaattatcaaaacaggcacttggctctacggaggattgtctgctcgagtctctgatgggttgcttggcatctccctcttctcttggagctggcgggagggggccccacatacagggaacttgagctacctgcctgttgattgatatcttacttccacagaaagtttgagaaagagaggaagtcgatttgcgttttgcatggaatcattctttaccgggggaaccatttcacatttggtatgtgcctgtttggtggaatgcgttagcatgtatctaaacttgtgcgatgggatttaaacctatcaataagctactttatccattgtacctagaagtatctttgtaccttacatctaaaagtttagcatcttagattcaaatgcatcactaaacttaggccctgtttgatttagtttttttctgaggaacttttctgagaatttgggtaggaagaatctgagtatcgtgtaaattacatgtagaggaagataaaagaatccatagggtttagtacgtagaaaa

SEQ ID NO: 79620 - DNA, 863 bp, Zea Mays
aggaagcccacttgcagtgcgggcgcggatgtgcatttcccttttcaacccacttgcagtgtcgactgggctaccgcggtattaccgccgccgccgccgccgccctacgccggttaccgaggtcttcgtcagccccttcgccggcggcgagcaccctttagcaaacaattggtggcaattggtttgttccgtttcgtgctccatgagacatgcagctcaccttcgtcgtcgctccctccgtcaaagctttgctccactacctatggcaaagagttggataaagtgactggtcaaaagagatggaagggttctcaaattagcgctgctacctcaggtatggcagaattatcaaaacaggcacttggctctacggaggattgtctgctcgagtctctgatgggttgcttggcatctccctcttctcttggagctggcgggagggggccccacatacagggaacttgagctacctgcctgttgattgatatcttacttccacagaaagtttgagaaagagaggaagtcgatttgcgttttgcatggaatcattctttaccgggggaaccatttcacatttggtatgtgcctgtttggtggaatgcgttagcatgtatctaaacttgtgcgatgggatttaaacctatcaataagctactttatccattgtacctagaagtatctttgtaccttacatctaaaagtttagcatcttagattcaaatgcatcactaaacttaggccctgtttgatttagtttttttctgaggaacttttctgagaatttgggtaggaagaatctgagtatcgtgtaaattacatgtagaggaagataaaagaatccatagggtttagtacgtagaaaa

SEQ ID NO: 79621 - DNA, 1021 bp, Zea Mays
aggaagcccacttgcagtgcgggcgcggatgtgcatttcccttttcaacccacttgcagtgtcgactgggctaccgcggtattaccgccgccgccgccgccgccctacgccggttaccgaggtcttcgtcagccccttcgccggcggcgagcaccctttaggtaggagcggctccgatgcggaccgcctaagatgagcccattacgttctcgcgtcggcttacactggctcccacgccgtgggtggatgtttcgccaggccaagacgagcatccatgcttgtcgcgactggtgctgatgcctggttgcaggcctttggcggaccgacgttgcttcctcgggtcaaggttttggcctctcacgaagaggatgccaggaaagagaatgacatggtggaggagattctaatccccaagcaaacaattggtggcaattggtttgttccgtttcgtgctccatgagacatgcagctcaccttcgtcgtcgctccctccgtcaaagctttgctccactacctatggcaaagagttggataaagtgactggtcaaaagagatggaagggttctcaaattagcgctgctacctcagctggcgggagggggccccacatacagggaacttgagctacctgcctgttgattgatatcttacttccacagaaagtttgagaaagagaggaagtcgatttgcgttttgcatggaatcattctttaccgggggaaccatttcacatttggtatgtgcctgtttggtggaatgcgttagcatgtatctaaacttgtgcgatgggatttaaacctatcaataagctactttatccattgtacctagaagtatctttgtaccttacatctaaaagtttagcatcttagattcaaatgcatcactaaacttaggccctgtttgatttagtttttttctgaggaacttttctgagaatttgggtaggaagaatctgagtatcgtgtaaattacatgtagaggaagataaaagaatccatagggtttagtacgtagaaaa

SEQ ID NO: 79622 - DNA, 1200 bp, Zea Mays
aggaagcccacttgcagtgcgggcgcggatgtgcatttcccttttcaacccacttgcagtgtcgactgggctaccgcggtattaccgccgccgccgccgccgccctacgccggttaccgaggtcttcgtcagccccttcgccggcggcgagcaccctttaggttggtgatagaggcaggtaggagcggctccgatgcggaccgcctaagatgagcccattacgttctcgcgtcggcttacactggctcccacgccgtgggtggatgtttcgccaggccaagacgagcatccatgcttgtcgcgactggtgctgatgcctggttgcaggcctttggcggaccgacgttgcttcctcgggtcaaggttttggcctctcacgaagaggatgccaggaaagagaatgacatggtggaggagattctaatccccaaggtaagacgtttgacatggtggaggagattctaatccccaaggcaagacgttcgccgggttttgcagcaaacaattggtggcaattggtttgttccgtttcgtgctccatgagacatgcagctcaccttcgtcgtcgctccctccgtcaaagctttgctccactacctatggcaaagagttggataaagtgactggtcaaaagagatggaagggttctcaaattagcgctgctacctcaggtatggcagaattatcaaaacaggcacttggctctacggaggattgtctgctcgagtctctgatgggttgcttggcatctccctcttctcttggagctggcgggagggggccccacatacagggaacttgagctacctgcctgttgattgatatcttacttccacagaaagtttgagaaagagaggaagtcgatttgcgttttgcatggaatcattctttaccgggggaaccatttcacatttggtatgtgcctgtttggtggaatgcgttagcatgtatctaaacttgtgcgatgggatttaaacctatcaataagctactttatccattgtacctagaagtatctttgtaccttacatctaaaagtttagcatcttagattcaaatgcatcactaaacttaggccctgtttgatttagtttttttctgaggaacttttctgagaatttgggtaggaagaatctgagtatcgtgtaaattacatgtagaggaagataaaagaatccatagggtttagtacgtagaaaa

SEQ ID NO: 79623 - DNA, 1157 bp, Zea Mays
aggaagcccacttgcagtgcgggcgcggatgtgcatttcccttttcaacccacttgcagtgtcgactgggctaccgcggtattaccgccgccgccgccgccgccctacgccggttaccgaggtcttcgtcagccccttcgccggcggcgagcaccctttaggtattcctttcccggctcccgctgcgcgaaaccggccacccaaatttgtccttcactgggtgtctgggtccgatcctggcctggctgaaggggcttccagcaacacacacgtgggcgaggttggtgatagaggcaggtaggagcggctccgatgcggaccgcctaagatgagcccattacgttctcgcgtcggcttacactggctcccacgccgtgggtggatgtttcgccaggccaagacgagcatccatgcttgtcgcgactggtgctgatgcctggttgcaggcctttggcggaccgacgttgcttcctcgggtcaaggttttggcctctcacgaagaggatgccaggaaagagaatgacatggtggaggagattctaatccccaagcaaacaattggtggcaattggtttgttccgtttcgtgctccatgagacatgcagctcaccttcgtcgtcgctccctccgtcaaagctttgctccactacctatggcaaagagttggataaagtgactggtcaaaagagatggaagggttctcaaattagcgctgctacctcagctggcgggagggggccccacatacagggaacttgagctacctgcctgttgattgatatcttacttccacagaaagtttgagaaagagaggaagtcgatttgcgttttgcatggaatcattctttaccgggggaaccatttcacatttggtatgtgcctgtttggtggaatgcgttagcatgtatctaaacttgtgcgatgggatttaaacctatcaataagctactttatccattgtacctagaagtatctttgtaccttacatctaaaagtttagcatcttagattcaaatgcatcactaaacttaggccctgtttgatttagtttttttctgaggaacttttctgagaatttgggtaggaagaatctgagtatcgtgtaaattacatgtagaggaagataaaagaatccatagggtttagtacgtagaaaa

SEQ ID NO: 79624 - DNA, 1246 bp, Zea Mays
aggaagcccacttgcagtgcgggcgcggatgtgcatttcccttttcaacccacttgcagtgtcgactgggctaccgcggtattaccgccgccgccgccgccgccctacgccggttaccgaggtcttcgtcagccccttcgccggcggcgagcaccctttaggttggtgatagaggcaggtaggagcggctccgatgcggaccgcctaagatgagcccattacgttctcgcgtcggcttacactggctcccacgccgtgggtggatgtttcgccaggccaagacgagcatccatgcttgtcgcgactggtgctgatgcctggttgcaggcctttggcggaccgacgttgcttcctcgggtcaaggttttggcctctcacgaagaggatgccaggaaagagaatgacatggtggaggagattctaatccccaagcaaacaattggtggcaattggtttgttccgtttcgtgctccatgagacatgcagctcaccttcgtcgtcgctccctccgtcaaagctttgctccactacctatggcaaagagttggataaagtgactggtcaaaagagacgtggtgttattaactatgacacaagtttgtgcttggtctacccatatatttcaactctgaagtgtctacttattcatctaaacaaggcgtcacatatttacagcccacagatggaagggttctcaaattagcgctgctacctcaggtatggcagaattatcaaaacaggcacttggctctacggaggattgtctgctcgagtctctgatgggttgcttggcatctccctcttctcttggagctggcgggagggggccccacatacagggaacttgagctacctgcctgttgattgatatcttacttccacagaaagtttgagaaagagaggaagtcgatttgcgttttgcatggaatcattctttaccgggggaaccatttcacatttggtatgtgcctgtttggtggaatgcgttagcatgtatctaaacttgtgcgatgggatttaaacctatcaataagctactttatccattgtacctagaagtatctttgtaccttacatctaaaagtttagcatcttagattcaaatgcatcactaaacttaggccctgtttgatttagtttttttctgaggaacttttctgagaatttgggtaggaagaatctgagtatcgtgtaaattacatgtagaggaagataaaagaatccatagggtttagtacgtagaaaa

SEQ ID NO: 79625 - DNA, 1123 bp, Zea Mays
aggaagcccacttgcagtgcgggcgcggatgtgcatttcccttttcaacccacttgcagtgtcgactgggctaccgcggtattaccgccgccgccgccgccgccctacgccggttaccgaggtcttcgtcagccccttcgccggcggcgagcaccctttagaggcaggtaggagcggctccgatgcggaccgcctaagatgagcccattacgttctcgcgtcggcttacactggctcccacgccgtgggtggatgtttcgccaggccaagacgagcatccatgcttgtcgcgactggtgctgatgcctggttgcaggcctttggcggaccgacgttgcttcctcgggtcaaggttttggcctctcacgaagaggatgccaggaaagagaatgacatggtggaggagattctaatccccaagcaaacaattggtggcaattggtttgttccgtttcgtgctccatgagacatgcagctcaccttcgtcgtcgctccctccgtcaaagctttgctccactacctatggcaaagagttggataaagtgactggtcaaaagagatggaagggttctcaaattagcgctgctacctcaggtatggcagaattatcaaaacaggcacttggctctacggaggattgtctgctcgagtctctgatgggttgcttggcatctccctcttctcttggagctggcgggagggggccccacatacagggaacttgagctacctgcctgttgattgatatcttacttccacagaaagtttgagaaagagaggaagtcgatttgcgttttgcatggaatcattctttaccgggggaaccatttcacatttggtatgtgcctgtttggtggaatgcgttagcatgtatctaaacttgtgcgatgggatttaaacctatcaataagctactttatccattgtacctagaagtatctttgtaccttacatctaaaagtttagcatcttagattcaaatgcatcactaaacttaggccctgtttgatttagtttttttctgaggaacttttctgagaatttgggtaggaagaatctgagtatcgtgtaaattacatgtagaggaagataaaagaatccatagggtttagtacgtagaaaa

SEQ ID NO: 79626 - DNA, 1038 bp, Zea Mays
aggaagcccacttgcagtgcgggcgcggatgtgcatttcccttttcaacccacttgcagtgtcgactgggctaccgcggtattaccgccgccgccgccgccgccctacgccggttaccgaggtcttcgtcagccccttcgccggcggcgagcaccctttaggttggtgatagaggcaggtaggagcggctccgatgcggaccgcctaagatgagcccattacgttctcgcgtcggcttacactggctcccacgccgtgggtggatgtttcgccaggccaagacgagcatccatgcttgtcgcgactggtgctgatgcctggttgcaggcctttggcggaccgacgttgcttcctcgggtcaaggttttggcctctcacgaagaggatgccaggaaagagaatgacatggtggaggagattctaatccccaagcaaacaattggtggcaattggtttgttccgtttcgtgctccatgagacatgcagctcaccttcgtcgtcgctccctccgtcaaagctttgctccactacctatggcaaagagttggataaagtgactggtcaaaagagatggaagggttctcaaattagcgctgctacctcagctggcgggagggggccccacatacagggaacttgagctacctgcctgttgattgatatcttacttccacagaaagtttgagaaagagaggaagtcgatttgcgttttgcatggaatcattctttaccgggggaaccatttcacatttggtatgtgcctgtttggtggaatgcgttagcatgtatctaaacttgtgcgatgggatttaaacctatcaataagctactttatccattgtacctagaagtatctttgtaccttacatctaaaagtttagcatcttagattcaaatgcatcactaaacttaggccctgtttgatttagtttttttctgaggaacttttctgagaatttgggtaggaagaatctgagtatcgtgtaaattacatgtagaggaagataaaagaatccatagggtttagtacgtagaaaa

SEQ ID NO: 79627 - DNA, 975 bp, Zea Mays
aggaagcccacttgcagtgcgggcgcggatgtgcatttcccttttcaacccacttgcagtgtcgactgggctaccgcggtattaccgccgccgccgccgccgccctacgccggttaccgaggtcttcgtcagccccttcgccggcggcgagcaccctttagcaaacaattggtggcaattggtttgttccgtttcgtgctccatgagacatgcagctcaccttcgtcgtcgctccctccgtcaaagctttgctccactacctatggcaaagagttggataaagtgactggtcaaaagagacgtggtgttattaactatgacacaagtttgtgcttggtctacccatatatttcaactctgaagtgtctacttattcatctaaacaaggcgtcacatatttacagcccacagatggaagggttctcaaattagcgctgctacctcaggtatggcagaattatcaaaacaggcacttggctctacggaggattgtctgctcgagtctctgatgggttgcttggcatctccctcttctcttggagctggcgggagggggccccacatacagggaacttgagctacctgcctgttgattgatatcttacttccacagaaagtttgagaaagagaggaagtcgatttgcgttttgcatggaatcattctttaccgggggaaccatttcacatttggtatgtgcctgtttggtggaatgcgttagcatgtatctaaacttgtgcgatgggatttaaacctatcaataagctactttatccattgtacctagaagtatctttgtaccttacatctaaaagtttagcatcttagattcaaatgcatcactaaacttaggccctgtttgatttagtttttttctgaggaacttttctgagaatttgggtaggaagaatctgagtatcgtgtaaattacatgtagaggaagataaaagaatccatagggtttagtacgtagaaaa

SEQ ID NO: 79628 - DNA, 1431 bp, Zea Mays
aggaagcccacttgcagtgcgggcgcggatgtgcatttcccttttcaacccacttgcagtgtcgactgggctaccgcggtattaccgccgccgccgccgccgccctacgccggttaccgaggtcttcgtcagccccttcgccggcggcgagcaccctttaggtattcctttcccggctcccgctgcgcgaaaccggccacccaaatttgtccttcactgggtgtctgggtccgatcctggcctggctgaaggggcttccagcaacacacacgtgggcgaggttggtgatagaggcaggtaggagcggctccgatgcggaccgcctaagatgagcccattacgttctcgcgtcggcttacactggctcccacgccgtgggtggatgtttcgccaggccaagacgagcatccatgcttgtcgcgactggtgctgatgcctggttgcaggcctttggcggaccgacgttgcttcctcgggtcaaggttttggcctctcacgaagaggatgccaggaaagagaatgacatggtggaggagattctaatccccaaggtaagacgtttgacatggtggaggagattctaatccccaaggcaagacgttcgccgggttttgcagcaaacaattggtggcaattggtttgttccgtttcgtgctccatgagacatgcagctcaccttcgtcgtcgctccctccgtcaaagctttgctccactacctatggcaaagagttggataaagtgactggtcaaaagagacgtggtgttattaactatgacacaagtttgtgcttggtctacccatatatttcaactctgaagtgtctacttattcatctaaacaaggcgtcacatatttacagcccacagatggaagggttctcaaattagcgctgctacctcaggtatggcagaattatcaaaacaggcacttggctctacggaggattgtctgctcgagtctctgatgggttgcttggcatctccctcttctcttggagctggcgggagggggccccacatacagggaacttgagctacctgcctgttgattgatatcttacttccacagaaagtttgagaaagagaggaagtcgatttgcgttttgcatggaatcattctttaccgggggaaccatttcacatttggtatgtgcctgtttggtggaatgcgttagcatgtatctaaacttgtgcgatgggatttaaacctatcaataagctactttatccattgtacctagaagtatctttgtaccttacatctaaaagtttagcatcttagattcaaatgcatcactaaacttaggccctgtttgatttagtttttttctgaggaacttttctgagaatttgggtaggaagaatctgagtatcgtgtaaattacatgtagaggaagataaaagaatccatagggtttagtacgtagaaaa

SEQ ID NO: 79629 - DNA, 2538 bp, Zea Mays
aggaagcccacttgcagtgcgggcgcggatgtgcatttcccttttcaacccacttgcagtgtcgactgggctaccgcggtattaccgccgccgccgccgccgccctacgccggttaccgaggtcttcgtcagccccttcgccggcggcgagcaccctttaggcaggtaggagcggctccgatgcggaccgcctaagatgagcccattacgttctcgcgtcggcttacactggctcccacgccgtgggtggatgtttcgccaggccaagacgagcatccatgcttgtcgcgactggtgctgatgcctggttgcaggcctttggcggaccgacgttgcttcctcgggtcaaggttttggcctctcacgaagaggatgccaggaaagagaatgacatggtggaggagattctaatccccaaggtaagacgtttgacatggtggaggagattctaatccccaaggcaagacgttcgccgggttttgcagcaaacaattggtggcaattggtttgttccgtttcgtgctccatgagacatgcagctcaccttcgtcgtcgctccctccgtcaaagctttgctccactacctatggcaaagagttggataaagtgactggtcaaaagagatggaagggttctcaaattagcgctgctacctcaggtatggcagaattatcaaaacaggcacttggctctacggaggattgtctgctcgagtctctgatgggttgcttggcatctccctcttctcttggagctggcgggagggggccccacatacagggaacttgagctacctgcctgttgattgatatcttacttccacagaaagtttgagaaagagaggaagtcgatttgcgttttgcatggaatcattctttaccgggggaaccatttcacatttggtatgtgcctgtttggtggaatgcgttagcatgtatctaaacttgtgcgatgggatttaaacctatcaataagctactttatccattgtacctagaagtatctttgtaccttacatctaaaagtttagcatcttagattcaaatgcatcactaaacttaggccctgtttgatttagtttttttctgaggaacttttctgagaatttgggtaggaagaatctgagtatcgtgtaaattacatgtagaggaagataaaagaatccatagggtttagtacgtagaaaatgacagtttcctactattgcaatgactttgttgattctatattcacgttgattttggacagtttaaactaaaacgattctcatagaagcgagataaaaagttaggtgtttagcgatctgcagtagtttttggtggccagaaactgaacaaaaatgaaataaacatggccttatctagtgaagccgatcattcatgccaccctaccaaagaaaaaataaagatcatgacgctaatctataggtccaataacttcttgatacttagaattagctgatctttaaccttattgcttaacatttaaaaatcaagaattggttttttttatcaataggggcataaaaaccatagaagcctaatcaatctacatcattatgatctaactcaatttatctctataaaaagtccctactcggtgcaaacttcttcggtgtcgatattcagagtatgagctatttggatcaggcagcgatccttttcctttctttctccaacacgtaggtatttagagtaaccttccagcaccaagttctgaacacgtttctgttctcacccttttagcacaggcagtgttctagcaagacaacatttgtgcacaagagaaagtacgcatcaaccccgcatgttggtcgggcagcaagggcattatccagaaacagacatgtgagatcgtgtgttttcatcagacaaagcagtgaaaaacgatactggtatacaggcaagcgtgtgcaagtccttacagcatggtaggcatacggcggtttccaaaagaaagcagtgaaaacttctggcgcatgctgggtcacagctgatgttctacttcaaaattgtgggcttgaaatcaagagacgcactgtgttgttgcaatcagaattgtgggcttcttggggcacattttgctcttgatttcattagtacggtggtgaatggagggcacattatgattttttagatcagaattgtggttccttgggctgccttaatgtgttgatttcttttctttatacgatgatagacatagagttgtctaattgtaggtacaaggtgctaaagccatcatgtttaccagtttgctacacgttctctcaatttggtagtaattgtcagtttggaacatgtaatctgagtgttagtcagtttgctacatgtagctgaatttgtgtcaatctgagtttggaccatgttatcaacttgtgtcaatctgccacctgtaagtggcgctgctatctgtttctgaattatttaattttgttcatgcatgtggcattggtatctgtttctgaattatttcgatttggttcatttaagtggaccatgtaatcttgcctctattcttttgaatccagtaataatt

SEQ ID NO: 79630 - DNA, 2037 bp, Zea Mays
aggaagcccacttgcagtgcgggcgcggatgtgcatttcccttttcaacccacttgcagtgtcgactgggctaccgcggtattaccgccgccgccgccgccgccctacgccggttaccgaggtcttcgtcagccccttcgccggcggcgagcaccctttaggtaggagcggctccgatgcggaccgcctaagatgagcccattacgttctcgcgtcggcttacactggctcccacgccgtgggtggatgtttcgccaggccaagacgagcatccatgcttgtcgcgactggtgctgatgcctggttgcaggcctttggcggaccgacgttgcttcctcgggtcaaggttttggcctctcacgaagaggatgccaggaaagagaatgacatggtggaggagattctaatccccaaggtaagacgtttgacatggtggaggagattctaatccccaaggcaagacgttcgccgggttttgcaggtgctcgtcggtcggagttaatttattttcgtgtatacacccgacgttggttaatttaatatccagtctacgcaagttggcaggaggacatgagaaaaatgtgctagaaattgtgttccgtggatttcagtgtgctgattctatttagtttttgccaatggatttcataccccatgtcctaattgtgtgccacttcttttgcttatggaatttccacggccaaattgcttctagcaaacaattggtggcaattggtttgttccgtttcgtgctccatgagacatgcagctcaccttcgtcgtcgctccctccgtcaaagctttgctccactacctatggcaaagagttggataaagtgactggtcaaaagagacgtggtgttattaactatgacacaagtttgtgcttggtctacccatatatttcaactctgaagtgtctacttattcatctaaacaaggcgtcacatatttacagcccacagatggaagggttctcaaattagcgctgctacctcaggtatggcagaattatcaaaacaggcacttggctctacggaggattgtctgctcgagtctctgatgggttgcttggcatctccctcttctcttggagctggcgggagggggccccacatacagggaacttgagctacctgcctgttgattgatatcttacttccacagaaagtttgagaaagagaggaagtcgatttgcgttttgcatggaatcattctttaccgggggaaccatttcacatttgcacaggcagtgttctagcaagacaacatttgtgcacaagagaaagtacgcatcaaccccgcatgttggtcgggcagcaagggcattatccagaaacagacatgtgagatcgtgtgttttcatcagacaaagcagtgaaaaacgatactggtatacaggcaagcgtgtgcaagtccttacagcatggtaggcatacggcggtttccaaaagaaagcagtgaaaacttctggcgcatgctgggtcacagctgatgttctacttcaaaattgtgggcttgaaatcaagagacgcactgtgttgttgcaatcagaattgtgggcttcttggggcacattttgctcttgatttcattagtacggtggtgaatggagggcacattatgattttttagatcagaattgtggttccttgggctgccttaatgtgttgatttcttttctttatacgatgatagacatagagttgtctaattgtaggtacaaggtgctaaagccatcatgtttaccagtttgctacacgttctctcaatttggtagtaattgtcagtttggaacatgtaatctgagtgttagtcagtttgctacatgtagctgaatttgtgtcaatctgagtttggaccatgttatcaacttgtgtcaatctgccacctgtaagtggcgctgctatctgtttctgaattatttaattttgttcatgcatgtggcattggtatctgtttctgaattatttcgatttggttcatttaagtggaccatgtaatcttgcctctattcttttgaatccagtaataatt

SEQ ID NO: 79631 - DNA, 1087 bp, Zea Mays
aggaagcccacttgcagtgcgggcgcggatgtgcatttcccttttcaacccacttgcagtgtcgactgggctaccgcggtattaccgccgccgccgccgccgccctacgccggttaccgaggtcttcgtcagccccttcgccggcggcgagcaccctttagcaaacaattggtggcaattggtttgttccgtttcgtgctccatgagacatgcagctcaccttcgtcgtcgctccctccgtcaaagctttgctccactacctatggcaaagagttggataaagtgactggtcaaaagagatggaagggttctcaaattagcgctgctacctcaggtatggcagaattatcaaaacaggcacttggctctacggaggattgtctgctcgagtctctgatgggttgcttggcatctccctcttctcttggagctggcgggagggggccccacatacagggaacttgagctacctgcctgttgattgatatcttacttccacagaaagtttgagaaagagaggaagtcgatttgcgttttgcatggaatcattctttaccgggggaaccatttcacatttgcacaggcagtgttctagcaagacaacatttgtgcacaagagaaagtacgcatcaaccccgcatgttggtcgggcagcaagggcattatccagaaacagacatgtgagatcgtgtgttttcatcagacaaagcagtgaaaaacgatactggtatacaggcaagcgtgtgcaagtccttacagcatggtaggcatacggcggtttccaaaagaaagcagtgaaaacttctggcgcatgctgggtcacagctgatgttctacttcaaaattgtgggcttgaaatcaactggcgcatgctgggtcacagcacacagagtatcggcgtgtggcctctgaacatggacggggccggtttgctgtcgaggaagccaagcgaatgaagccgggcgcgatgcatgggcatggcatggactgatggaccctcctttttcttctttctccgtggtggcgactggcggttgccgtcgcgggcgggcggacggggaccgcgaccacgcaaccgacaggaaag

SEQ ID NO: 79632 - DNA, 1358 bp, Zea Mays
aggaagcccacttgcagtgcgggcgcggatgtgcatttcccttttcaacccacttgcagtgtcgactgggctaccgcggtattaccgccgccgccgccgccgccctacgccggttaccgaggtcttcgtcagccccttcgccggcggcgagcaccctttaggttggtgatagaggcaggtaggagcggctccgatgcggaccgcctaagatgagcccattacgttctcgcgtcggcttacactggctcccacgccgtgggtggatgtttcgccaggccaagacgagcatccatgcttgtcgcgactggtgctgatgcctggttgcaggcctttggcggaccgacgttgcttcctcgggtcaaggttttggcctctcacgaagaggatgccaggaaagagaatgacatggtggaggagattctaatccccaagcaaacaattggtggcaattggtttgttccgtttcgtgctccatgagacatgcagctcaccttcgtcgtcgctccctccgtcaaagctttgctccactacctatggcaaagagttggataaagtgactggtcaaaagagatggaagggttctcaaattagcgctgctacctcaggtatggcagaattatcaaaacaggcacttggctctacggaggattgtctgctcgagtctctgatgggttgcttggcatctccctcttctcttggagctggcgggagggggccccacatacagggaacttgagctacctgcctgttgattgatatcttacttccacagaaagtttgagaaagagaggaagtcgatttgcgttttgcatggaatcattctttaccgggggaaccatttcacatttgcacaggcagtgttctagcaagacaacatttgtgcacaagagaaagtacgcatcaaccccgcatgttggtcgggcagcaagggcattatccagaaacagacatgtgagatcgtgtgttttcatcagacaaagcagtgaaaaacgatactggtatacaggcaagcgtgtgcaagtccttacagcatggtaggcatacggcggtttccaaaagaaagcagtgaaaacttctggcgcatgctgggtcacagctgatgttctacttcaaaattgtgggcttgaaatcaactggcgcatgctgggtcacagcacacagagtatcggcgtgtggcctctgaacatggacggggccggtttgctgtcgaggaagccaagcgaatgaagccgggcgcgatgcatgggcatggcatggactgatggaccctcctttttcttctttctccgtggtggcgactggcggttgccgtcgcgggcgggcggacggggaccgcgaccacgcaaccgacaggaaag

SEQ ID NO: 79633 - DNA, 1250 bp, Zea Mays
aaattcccgagagaaatgtgcttgcagttttttaccgtgctcccttcttccattccatgcttcctttttcttgcatgaatggtacccgactcggatggctcaatgagttgaaataatatgacgttgtagtatactggatataggttatagagtgattatgggtcagccatgaatttttagaccaacaatttgcatttaagctgattatttggtgcataaagatatgtttataggataagtcagaaggaacaatttttggaatgctatatttacacaggttggtgatagaggcaggtaggagcggctccgatgcggaccgcctaagatgagcccattacgttctcgcgtcggcttacactggctcccacgccgtgggtggatgtttcgccaggccaagacgagcatccatgcttgtcgcgactggtgctgatgcctggttgcaggcctttggcggaccgacgttgcttcctcgggtcaaggttttggcctctcacgaagaggatgccaggaaagagaatgacatggtggaggagattctaatccccaagcaaacaattggtggcaattggtttgttccgtttcgtgctccatgagacatgcagctcaccttcgtcgtcgctccctccgtcaaagctttgctccactacctatggcaaagagttggataaagtgactggtcaaaagagatggaagggttctcaaattagcgctgctacctcaggtatggcagaattatcaaaacaggcacttggctctacggaggattgtctgctcgagtctctgatgggttgcttggcatctccctcttctcttggagctggcgggagggggccccacatacagggaacttgagctacctgcctgttgattgatatcttacttccacagaaagtttgagaaagagaggaagtcgatttgcgttttgcatggaatcattctttaccgggggaaccatttcacatttggtatgtgcctgtttggtggaatgcgttagcatgtatctaaacttgtgcgatgggatttaaacctatcaataagctactttatccattgtacctagaagtatctttgtaccttacatctaaaagtttagcatcttagattcaaatgcatcactaaacttaggccctgtttgatttagtttttttctgaggaacttttctgagaatttgggtaggaagaatctgagtatcgtgtaaattacatgtagaggaagataaaagaatccatagggtttagtacgtagaaaa

SEQ ID NO: 79634 - DNA, 1503 bp, Zea Mays
cgccgagcaccctctgccccggctcctccttcctggccgcgcgtcttgtgcctgctcgtgcccagcctgtgcttcctctctaccgccgctcgcaaggctccctccctcaccttgccggtcgtgagtccctggtgccgtgcgcgcgcgtccctgggcccagtttggtgctcaccccgccatggagctagtgctgaccgcgccctctccagccatggcgcgctcgaccggagctctgctcccccagctcctctgcgcgcgccgtcttccagccgccctcgccccacctctctcctctgccgtcgtctagctcggatccgcccccagccgcgaatacccatggcgcccaagcccagcttctttctccctcagctcccatggtgctctctctctcctgctcgctctctggtgtcgcgcgtcttctctgctcgtcggtgctcgccacgggagacggcgctcggtcgcccaaccttcctgctcctccctgctatcgtgtccctcagcgccggtcgcttcttcttgctattccatgccgcggcaatcgccctgctgctccagtgcgcccagccgagcgattctctgctctgtgcgcgcggtatttctccagcatgccgcgcccagtccctgctccttgtttttctcagagatgtggagtctcatcgtcgcgcggatctctctccttcctaccctgctcggattgtgccgcgcttgctgtcgcgttcggcctgcttcggatccgaagttggtcgcctcggtgtgaaatcgccgtcgcgtccagggttttgacatgtctccttgctcgccgtcgaacttgagttccctgctcagcctttagcgctggcgcgtcgcagtgatgttaccgtctcgccgtgattcccggatggtccgtgtttccgcatgttcaaatcgtcaaccccgtgtaccacctgctcgctaaataggaaaccaacagtcttctccctgctcctctgcacgcagccgcgttcctctaccggtcatcagttgtcgctgaaccactgtcagagtaattttcagcttccttcgcgcggctctctggagataagctcttcatcgactgtcgctcccaatcttcagttcgccgactgactgtcgtgttccttattttccctcgtcggtcgacctcgtcgcgacttagttcgttcatcatgatggtcgctatcctataatgtacctattagctcgaatcctgcccagctcgtcgttgcgtcgtttgccgtcaagtcgtcaaacacgtcatcctctgctcaaaccccacctcaccagctcgctcccgacttcagctgaaagtcatcgtcgttccgcgcgtcagcaagaaatcccaagaatcgggtgaagacgaagctagcagcgcgatattccccaagcgctcgacaaattgcctggatcagaaaatcgctaccgatctcgcggattcgtgtcagctgtggaaatggtaagctgataaattatccagaatagttcgatcaatgaataaattaatgtgct

SEQ ID NO: 79635 - DNA, 7453 bp, Zea Mays
gcatatccttgagagtcttttctttagtcgggtaagtcttgctgagtaattccatactcagggttttattccctgttgtttttcaggttttaactttgtgctgttgttgatggtgttaagtgccggtgggctcgaccttcttataagtctaagtaactcttctatacttcttattgaggatggtcacttgagctagcatatatttcaaacttatacttttgtaatcactccgataaaataatataaaacttttgtaacctgtaaaatttggtaacaagatttccgctgcaaaaatgttggtgtgtgtgatttgtgttacttaatcttgcggtcctggttgtaagtggtttatccgatgtccttgggcaatcggacggatcctattaagttatctggtgcacatgcatagccgtctgaggtctttgagacaaggacaggtgcatgtgggcccaataacttgggaggttctgccacagctggtatcggagcaggattaagtatatacagtcacatacgtattttcaaaacaaaagttttggttttagaaaacctattttcaattaaacacattgtttggctttgaaaaacaattttgaaaaaaaaactataatgctagcgacatcctttgttaagccctaaactaaggactatcaggtggctttgttgaaaaccactaacccataaccgggggtattgcatacatgtgtattattatttttaaggccattcagttctgaatggatcgacgctcaggtaaggtgagatgtgagagcatgaccgaagaatcgtcggtctagggaagagtgtaaaagcgcttgattatatacatgttctatatatgtatatatgaaagctgcgatgtggagtatttacttttccgggaattcagtaccccatggatgtgtatgggtatacagacatgggaatactgagaaatgtattgtacatgtaacgacgcacctacgcttaggtaagaaggtgagttaccataatgagttgccctatggttaaagtgtggcaacggcgcctatgcgtagctcggcgcttaatgatgagctggcctccatatagcaatatatggagtataaactgtgataaactgtcatgtgtgaattgcatcattgggaaattgggctgtgatggattttctgcaggtacactaacctcgaaaacgtatgtgtagccgacgactagcaaaataccgtgagagtcgtaagtatgccaccgagatagaatgctattgccatattaaattggcaaaaaaattgtgaggacgtataggacgagcatgcatcctgaatgttgcatcatgtttgtcacctatacacccaaaatgcttctctcatccttattccagtaaccattgattgtaaataatgtggcgtaatgctgtattatggactcaaaaaaagtaagatgtcctccattctttaggtaacctgttaaggtcgtatatggtgtttgctcttgtacttgatgtgccgatagaaagttagagacttgtttgcctaaacccaaaactaggccatgttcttatttagtgaaccataacccaaaattgattttttcgtcatcactccatgacccaactcatgcaaataaatgcttagataacttcgtttggacataaagtgtacccagacttaaaacaagaatctcgagtcatatctccttccaaaaccattcccttgttcggttggtgcaagttgttatctctattctattttgtctctcctggagaattgcattgttgattttatcaacccaacctaggaaagacatgtccgattattttcttgagtttgatgcctttggtttcctcatatctatcgaaggcataccaacttcatctcgtgattgttttccctccgtgtctaatcagatactaatccttggccttgtaatctctgcgatgggcatagaaatatgcttggggctgaattaacagtctcccatcgtactcctttcatcaagtttacgttatggccatgttttgttcatttcatcaggccataatctatttggctctctacttgtaaccattttgacaggtagagtctcttgtatattgtcacccttgctcaatccagttgtgtgatacgagatttcttattggttacgtctggtaatggtgttatgactaaagccgatgatgccacgacgaaaccgagggcctcctgtgaatgtacacacatggttgcgctacttggcacgcgctggtatcacagttagtagtcataatccattatgagactatatcaatgtgttatcttagcacaatctgtttttgctacgtgagattcatttttggtgccagttcggtgatggtgtcatgattaaggacttatggtgccgcagcgaaactgagagcccttatgaatgtacacgcaaggttatgctgcttggtgcatgctggtatcgatgtctctagtcatgatccgttatggaactacactgatgtgtgatcttccgtaaacatttcccttgaaataatttctatgttgtttgtcaattgaccaagcaacatctatcatctccgttggatcaaaagggcataccactttcatatgtggtctcttttcttttgatcttggtggtgactactcatacaagttccttttacgtcctttgtgtaaaggtgcagccttggagctctttagtgttggaaaacagctgattagctctcaaaatggagattagtttttccctactgctgagatgcaggagtttgttcattcgctcttttatttaatccatgtattcccaaacctagtccattcatctcgcacgaagaaacgggtgaacaacctgaccaaatggacttctattcaaatacatgatctcttgttaaccagagtgaactctcgaccattggactgccggtggtactgagaggacttgctcgatgtcaaaagtagttcaacaagttggctttactaacttgtaactgcccaatgaacaaaggttgagttcagagatcgttttatcgagttgtctaaactcacttttgtacaacccctctaaaggaagttcttacaaagatcaagttaaaaccgactgataatcacctaatcatcgctctagtcgtgccttgatctccccacgtgtgcttttccaacatgtgtgatcgagtcgagccatgaatagtgctgaataaaatggactgattgcgaagtcaacatcaacggatcttttcgttgatattttccgagtctatcatttttcgtggacttggattctctagctagccacgggtcaactgtgatgttatttgacattcacacccgtctcgtgtgctatgaacttactgtaaccacttgttggtaaacctctttctgtgtgttttacccaagatggtgcatctgattctgtttgggtaaagtcgcatatctaccgctcgctcaacagactcaattagtacagtgtcatcagaaaccgcaaactgcacacatgggaccttatgtgttcctctggcagacagtgtctctattggtggatatctctaaattagcttaaggcgatacatgttatgtccactagagaaacaacattctgagacactcgtcttcgcttgagactgccttatgattaccgctgatataaacatgagttacatacttctctactcttagaagtctttcgtttcgaatctcgggatgagattcttttaaggggggagggctgtaacacccctggtgtttatattctgctcgacaacgagtatggaattaagcacgtaatcagtggataaaacggatgttaaattttaaacatcttcgtttatcgcgatttcaatatcgcatttgttccatctgtcgcgagtgcgagtcgtttttattttcatctgtccgggctcttcctaaattttcgtgctgttcggaacatatttgttctaaaaattggtgcgtccgatgattttttaaaaaattcatcgctcgcgtgagtacgacttcggaagcccaaaccacttggacgattttatcccgagccaattaaatagaactcgtcgactaagattctcggtacgaataattatgtccccactcgtcaatcgataaaaatcgcgtccgagaatgtataattgagatctgattatcacacaaattgcccgtaactatggaattagattctctatttcgtaactaggaaaagtgaaatgcgtggtcgaaatgtgttttgggacctcttatttaatctttttgaactttaatcctaagaaacgagatatttttggttttttttaaaaaaatcttcttttccttatccttgcgccacttccttcagtctaggatttttcctgccttcgttctcatccgcgcgggtgggaagggaacaacatttgccgtcgttctgggagaaaatcccaccgcccctctctctgatccttatctctctgcgcacgcaggctacttatccccaatcatcttctccttccctgcagcggcgtggtcctctgctcctccccagcgtccctcgccgagcaccctctgccccggctcctccttcctggccgcgcgtcctgtgcctgctcgtgcccagcctatgcttcctctctaccgccgctcgcaaggctccctccctcagcttgccggtcgtgagtccctggtgccgtgcgcgcgcgtccctgggcccagtttggtgctcaccccgccatggagctcgcgctgaccgcgccctctccagccatggcgcgctcgaccggagctctgctcccctagctcctctgcgcgcgccgtcttccagccgccctcgccccacctctctcctctgccgtcgtctagctcggacccgcccccagccgcgaacacccatggcgcccaagcccagcttctttctccctcagctcccatggtgctctctgtctcctgctcgctctctggtgctgcgtgtcttctctgctcgtcggtgctcgccgcgggagacggcgctcggtcgcccaaccttcctgctcctccctgctgtcgtgtccctcggcgccggtcgcttcttcttgctattccatgccgcggcaatcgccctgctgctccagtgcgcccagccaagcgattctctgctctgcgcgcggtatttctccagcatgccgcgcccagtccctgctccttgtttttctctgcgacatggagtctcctcgccgcgcggatcctctccttcctaccctgctcggattgtgccacgcttgctgtcgcgttcggcctgcttcggatccgaagttggtcgcctcggtgtgaaatcgccatcgcgtccggggttttgacatgtctccttgctcgccgtcgaacttgagttccctgctcagcctttagcgctggcgcgtcgccgtgatgttaccgtctcaccgtgattccctgatggtccgtgtttccgcatgttcaaatcgtcaatcccgtgtaccacctgctcgctaaataggaaaccaacagtcttctccctgctcctctgcacgtagccgcgttcctctaccggccatcagttgccgctgaaccactgtcggattaattttcagcttccttcgcgcggctctctggagataagctcttcatcggctgtcgctcccaatcttcagttcgccgactgactgtcgtgttccttattttccctcgtcggtcgacctcgtcgcgacttagttcgttcatcatgctggtcgctatcccataatgtacctattagctcgaatccagtccagctcgtcgtcgcgtcgtttgccgtcgagtcgtcaaacacgtcatcctctgctcaaaccccacctcaccagctcgctcccgacttcagctgaaagtcatcatcgttccgcgcgtcagcgagaaatcccaagaatcgggtgaagacgaagctagcagcgcgatattccccaagcgctcgacaaattgcctggatcggaaaatcgctatcgatctcgcggattcgtgtcagctgtggaaatggtaagctgataaattattcagaatagttcgatcaatgaataaattaatgtgctagtgtgatgcttattaaggtgctcgataaattgcgtaagtcacgaaactctcgtcgacttggcagttcttgcgattatcgagccaggttcagttatagcgagttatttcgctattccggtcaattagctgaattaatataccgagtagaatattagtaggcatgtgtgataaagaaatgtttgattaattgtggacatgtaaaatatgtgaggagtaaaataaaattaaaatagttctttgtgaacgatgtagtgtcatttataaaatgagggataagtttagaatttaattaattaattgataagttgtgattaggctaattgtatttcatgtgtatagtttgtggttggtgatgtttgcgttagattcgagaagcgtaattattgcgcttaattgtagataattagtgtctccgtatgaaattgttcaacgtctcaccgctaggtgtttaattcgctatcacgagcactatctaggtttgcgatatttatgtttatatgcattcatgtgcataatgtatctcattcaggtacgtgaattaaccacgcgatgcggagaaccagaactgagtcgaccacaagatggtgctgatgaacggaactggagatggacagacgaagcaagtatctggacaaaggatggtcgtcaagtgatcgtcgtctaacaaacactaacgaagtgtttattccaggcaagccccggtgcatgcaaccccttccttgtgtttttaaataatttctgcacactttaagtctagtgaaatttgcattaggtttataggagttgcttggaaccctttgatgcattgccttccttgatatccatacctttatagatacttctggtgaagtatcaaaatatgatttacaaaaatgcttagctctgcttagatcttgtgggtagaagttgtctttcgcaataaggcctagcttaggggttatcctgaggaaagatggcttctacatgcaagaatattttcattgggagcgtggtggaatcttactgcaaagttccctataatgctcttttcgtcctaaggaaaacaaacaatcctaaggatcaaagtacttaaatcgggacttgggctaggaacaggtgatgttctacccaggttgattaagattggatgcgtatgtaggcttgatgatcgaggaccctttaactggtcacatgcctcgtcatgggtaagctttgcctcgggcagactaaggccagaataagataacacggaatgggcgtggagcggtggcgagagtagcgtgtaccctccgtggcaagaggctggacggtggtgtatctgtgctctcggttggcgtgaacctgatctggtcttaagaaccccggtggcgggttgacatatgcaagggttaagtgctacatatgtcgtgtgatcggagatcctcagctaagtataatcgattcggatcgccgtacattcgcggttatgaagacttggtcactgccctacaacctaagtc

SEQ ID NO: 79636 - DNA, 2992 bp, Zea Mays
cgcagcgaccggtgacgagcggtcaaaggcgggccgccccaccggctgcggccggtcaccctcgcctcgggcgccgcgaagctatttagcgcggtggccggagcgccggcaacggctgccacaccaacacacacagactgacaggcgcaagaagaggagaggagaagaacagaggggagtggaaataatctagcagcggaaggggaagcagcacgaagggaagcggcagcggaagcggggttctggctaaagtacgttaaggtcttttttatcagcaattccagtaatgtgccttgcctcttttacgtgactatacaagacaatgaatggaactcatccctgggcctccatgtccggaggtccatgttctaaccttggatatgccagggacatgaatgccaagtactagcatgaatggtgattcattgatgcgtgttcctgcgtcaccaatatcgttttcatccaataacatctctggctcttcagtcattgacggttgcatcatgcagcaaagtccaccccaagagcaggtgcagaaacagaggtcttcaagtgtaacatcacaacctgtgattgatgctggtggtgcattgcatgctcagaagaaatcaaggattgatgtttgtcagggtggtatcacggaacaacagctgattcagcaactgctccatggtcagaattctcttcattaccaggggcaacagaatccacagcttcaagctttaatgcagcatcataaactggcacaacttcagcaacggcagcagcagcatccattttctcagatgcaacaaccccaagttggtattcctcggcagcctcaacttaggccaccactggcacagactggaatgcagttaggtggtcctgttaggtctcctatcgagagtgggatttgttctcgcaggatactgcagtatttatatcacaagcgtcatcgcccagagaataaccctataacatactggaggaagcttgttgaagagtacttcgcacctcgagcaagagaaagatggtgtgtctcttcttatgaaaacagagggaattcttcagctgctgctccacagaaagctttggatacgtggcgatgtggcatttgcaatacacatggtgggaaaggatatgaagttacctatgaagtacttcctaggctctgccaaattagatttgaccatggtgttattgatgaatacttatactttgactcacccaacgaattccggttgcctaatggacaaatggtgctggagcatgcaaaagtagttcaaaaaagtgtttatgaacatctgcatgttatacacgagggacatctgagaataattttcacaccagaactgaagataatgtcttgggagttctgttcacgacgccatgaggagtacaccactcgcaagactatagcaccacaggttaataatcttctgcaagttgcccagaaattccaagctgttgtcagtgaaagtggatcagctgggatatcaaataatgatgcacaaaccatctgcaacatgtttgttaatgcatcacggcaactggcaaaaaatctagagcatcacaccttaaatgaacatgggctttctaaaagatatgtacgctgcctgcagatatcggaggtggtgaatcacatgaaggacttgatcgagttcagccacaagagcaagcttggtcctaaagagagcctgaacagttattctaaaaccacggcaaagtttgagaatatgcatgattcgagacaggccatggctgccgctaaccttgccaacaaccagagcaacaccaaattgatgggggtcaaacaagagacaagcacttctgcgaacaaccagactcctggtgccggagccattggcaacaacaatctaccgattgccgcacctctaaacacctaccagaacatgctcagaagctcaggtgccagtacgatttcgctgcagcaggaggcgtcgagtgtcttcaaaggtcctacagcaatgcacaacggcatgcagctggaagcggccaggtccttcctgggacctaaccaagttcaattccagcaccacccaccgtcgtcgtcgtttcagcagcagcagcaaaacagtttccatggctttggtgtcaacccgcagtaccagcagcatgtcctcaaccagcttctgcaggaagttaagaacagtaacaaccgctcgaaagcgcagcaaccgcctctggatgcaccaccgccgaatgcgagcggcgggggtctcgcgccaggagttgctacccccaacgtcattgctgctactggggagcaggggcagcatgtcaataacagtagctctaaccataacggcacggtaaagggtgctgctggtactggccctagcaatgtcatcaacaatagcacagccagcatggcttcggccagaaacagcagcttcaagtcggtgagcagcagtccagctgctgctggcaatgccgtgagctcgaaggtcgatgactccttccatcaactggaggacctcgacgacatgatcgctaacgaactggtggagagcgggctgttcggtgcaggacacgggtggtagtacgctactgtggtaaagccaagcaatgagatataagcctaagcctgattggtgctggcaagtgcttttgccgccgccacccttctctttctgtagagctttatgtattgacagttttccgatgatgatcatatcatacactggcgtcgctccagatgtgtgtgagttgagatagtgggttggattggatttggctgatagttagcgtgtgtatggcatgttgctgaatcaaatgatgtgatcatcgcaaggtcacaaacagcctctttgtcatgtacatcgttttccatcatgctatagtgggtgtcagttataatctcctgttatctggcaccgtctggtgttttgcacggtttctagcgattccactaggagattctggtttgcataatgcatcacacgacaacagatacacatagtcatggcaagagaagaaaaaaaaacaa

SEQ ID NO: 79637 - DNA, 2844 bp, Zea Mays
cccaccggctgcggccggtcaccctcgcctcgggcgccgcgaagctatttagcgcggtggccggagcgccggcaacggctgccacaccaacacacacagactgacaggcgcaagaagaggagaggagaagaacagaggggagtggaaataatctagcagcggaaggggaagcagcacgaagggaagcggcagcggaagcggggttctggctaaagtacgttaaggtcttttttatcagcaattccagtaatgtgccttgcctcttttacgtgactatacaagacaatgaatggaactcatccctgggcctccatgtccggaggtccatgttctaaccttggatatgccagggacatgaatggtaatgttccaataagcactacaaattcttctgggccaagcattggagttagctcattggtgactgacgccaactcgtcactttccggtggtgcccagttacagccaagtactagcatgaatggtgattcattgatgcgtgttcctgcgtcaccaatatcgttttcatccaataacatctctggctcttcagtcattgacggttgcatcatgcagcaaagtccaccccaagagcaggtgcagaaacagaggtcttcaagtgtaacatcacaacctgtgattgatgctggtggtgcattgcatgctcagaagaaatcaaggattgatgtttgtcagggtggtatcacggaacaacagctgattcagcaactgctccatggtcagaattctcttcattaccaggggcaacagaatccacagcttcaagctttaatgcagcatcataaactggcacaacttcagcaacggcagcagcagcatccattttctcagatgcaacaaccccaagttggtattcctcggcagcctcaacttaggccaccactggcacagactggaatgcagttaggtggtcctgttaggtctcctatcgagagtgggatttgttctcgcaggatactgcagtatttatatcacaagcgtcatcgcccagagaataaccctataacatactggaggaagcttgttgaagagtacttcgcacctcgagcaagagaaagatggtgtgtctcttcttatgaaaacagagggaattcttcagctgctgctccacagaaagctttggatacgtggcgatgtggcatttgcaatacacatggtgggaaaggatatgataatgtcttgggagttctgttcacgacgccatgaggagtacaccactcgcaagactatagcaccacaggttaataatcttctgcaagttgcccagaaattccaagctgttgtcagtgaaagtggatcagctgggatatcaaataatgatgcacaaaccatctgcaacatgtttgttaatgcatcacggcaactggcaaaaaatctagagcatcacaccttaaatgaacatgggctttctaaaagatatgtacgctgcctgcagatatcggaggtggtgaatcacatgaaggacttgatcgagttcagccacaagagcaagcttggtcctaaagagagcctgaacagttattctaaaaccacggcaaagtttgagaatatgcatgattcgagacaggccatggctgccgctaaccttgccaacaaccagagcaacaccaaattgatgggggtcaaacaagagacaagcacttctgcgaacaaccagactcctggtgccggagccattggcaacaacaatctaccgattgccgcacctctaaacacctaccagaacatgctcagaagctcaggtgccagtacgatttcgctgcagcaggaggcgtcgagtgtcttcaaaggtcctacagcaatgcacaacggcatgcagctggaagcggccaggtccttcctgggacctaaccaagttcaattccagcaccacccaccgtcgtcgtcgtttcagcagcagcagcaaaacagtttccatggctttggtgtcaacccgcagtaccagcagcatgtcctcaaccagcttctgcaggaagttaagaacagtaacaaccgctcgaaagcgcagcaaccgcctctggatgcaccaccgccgaatgcgagcggcgggggtctcgcgccaggagttgctacccccaacgtcattgctgctactggggagcaggggcagcatgtcaataacagtagctctaaccataacggcacggtaaagggtgctgctggtactggccctagcaatgtcatcaacaatagcacagccagcatggcttcggccagaaacagcagcttcaagtcggtgagcagcagtccagctgctgctggcaatgccgtgagctcgaaggtcgatgactccttccatcaactggaggacctcgacgacatgatcgctaacgaactggtggagagcgggctgttcggtgcaggacacgggtggtagtacgctactgtggtaaagccaagcaatgagatataagcctaagcctgattggtgctggcaagtgcttttgccgccgccacccttctctttctgtagagctttatgtattgacagttttccgatgatgatcatatcatacactggcgtcgctccagatgtgtgtgagttgagatagtgggttggattggatttggctgatagttagcgtgtgtatggcatgttgctgaatcaaatgatgtgatcatcgcaaggtcacaaacagcctctttgtcatgtacatcgttttccatcatgctatagtgggtgtcagttataatctcctgttatctggcaccgtctggtgttttgcacggtttctagcgattccactaggagattctggtttgcataatgcatcacacgacaacagatacacatagtcatggcaagagaagaaaaaaaaacaa

SEQ ID NO: 79638 - DNA, 2887 bp, Zea Mays
cgcgaagctatttagcgcggtggccggagcgccggcaacggctgccacaccaacacacacagactgacaggcgcaagaagaggagaggagaagaacagaggggagtggaaataatctagcagcggaaggggaagcagcacgaagggaagcggcagcggaagcggggttctggctaaagtacgttaaggtcttttttatcagcaattccagtaatgtgccttgcctcttttacgtgactatacaagacaatgaatggaactcatccctgggcctccatgtccggaggtccatgttctaaccttggatatgccagggacatgaatggtaatgttccaataagcactacaaattcttctgggccaagcattggagttagctcattggtgactgacgccaactcgtcactttccggtggtgcccagttacagccaagtactagcatgaatggtgattcattgatgcgtgttcctgcgtcaccaatatcgttttcatccaataacatctctggctcttcagtcattgacggttgcatcatgcagcaaagtccaccccaagagcaggtgcagaaacagaggtcttcaagtgtaacatcacaacctgtgattgatgctggtggtgcattgcatgctcagaagaaatcaaggattgatgtttgtcagggtggtatcacggaacaacagctgattcagcaactgctccatggtcagaattctcttcattaccaggggcaacagaatccacagcttcaagctttaatgcagcatcataaactggcacaacttcagcaacggcagcagcagcatccattttctcagatgcaacaaccccaagttggtattcctcggcagcctcaacttaggccaccactggcacagactggaatgcagttaggtggtcctgttaggtctcctatcgagagtgggatttgttctcgcaggatactgcagtatttatatcacaagcgtcatcgcccagagaataaccctataacatactggaggaagcttgttgaagagtacttcgcacctcgagcaagagaaagatggtgtgtctcttcttatgaaaacagagggaattcttcagctgctgctccacagaaagctttggatacgtggcgatgtggcatttgcaatacacatggtgggaaaggatatgtagttcaaaaaagtgtttatgaacatctgcatgttatacacgagggacatctgagaataattttcacaccagaactgaagataatgtcttgggagttctgttcacgacgccatgaggagtacaccactcgcaagactatagcaccacaggttaataatcttctgcaagttgcccagaaattccaagctgttgtcagtgaaagtggatcagctgggatatcaaataatgatgcacaaaccatctgcaacatgtttgttaatgcatcacggcaactggcaaaaaatctagagcatcacaccttaaatgaacatgggctttctaaaagatatgtacgctgcctgcagatatcggaggtggtgaatcacatgaaggacttgatcgagttcagccacaagagcaagcttggtcctaaagagagcctgaacagttattctaaaaccacggcaaagtttgagaatatgcatgattcgagacaggccatggctgccgctaaccttgccaacaaccagagcaacaccaaattgatgggggtcaaacaagagacaagcacttctgcgaacaaccagactcctggtgccggagccattggcaacaacaatctaccgattgccgcacctctaaacacctaccagaacatgctcagaagctcaggtgccagtacgatttcgctgcagcaggaggcgtcgagtgtcttcaaaggtcctacagcaatgcacaacggcatgcagctggaagcggccaggtccttcctgggacctaaccaagttcaattccagcaccacccaccgtcgtcgtcgtttcagcagcagcagcaaaacagtttccatggctttggtgtcaacccgcagtaccagcagcatgtcctcaaccagcttctgcaggaagttaagaacagtaacaaccgctcgaaagcgcagcaaccgcctctggatgcaccaccgccgaatgcgagcggcgggggtctcgcgccaggagttgctacccccaacgtcattgctgctactggggagcaggggcagcatgtcaataacagtagctctaaccataacggcacggtaaagggtgctgctggtactggccctagcaatgtcatcaacaatagcacagccagcatggcttcggccagaaacagcagcttcaagtcggtgagcagcagtccagctgctgctggcaatgccgtgagctcgaaggtcgatgactccttccatcaactggaggacctcgacgacatgatcgctaacgaactggtggagagcgggctgttcggtgcaggacacgggtggtagtacgctactgtggtaaagccaagcaatgagatataagcctaagcctgattggtgctggcaagtgcttttgccgccgccacccttctctttctgtagagctttatgtattgacagttttccgatgatgatcatatcatacactggcgtcgctccagatgtgtgtgagttgagatagtgggttggattggatttggctgatagttagcgtgtgtatggcatgttgctgaatcaaatgatgtgatcatcgcaaggtcacaaacagcctctttgtcatgtacatcgttttccatcatgctatagtgggtgtcagttataatctcctgttatctggcaccgtctggtgttttgcacggtttctagcgattccactaggagattctggtttgcataatgcatcacacgacaacagatacacatagtcatggcaagagaagaaaaaaaaacaa

SEQ ID NO: 79639 - DNA, 2806 bp, Zea Mays
cggagcgccggcaacggctgccacaccaacacacacagactgacaggcgcaagaagaggagaggagaagaacagaggggagtggaaataatctagcagcggaaggggaagcagcacgaagggaagcggcagcggaagcggggttctggctaaagtacgttaaggtcttttttatcagcaattccagtaatgtgccttgcctcttttacgtgactatacaagacaatgaatggaactcatccctgggcctccatgtccggaggtccatgttctaaccttggatatgccagggacatgaatgttacagccaagtactagcatgaatggtgattcattgatgcgtgttcctgcgtcaccaatatcgttttcatccaataacatctctggctcttcagtcattgacggttgcatcatgcagcaaagtccaccccaagagcaggtgcagaaacagaggtcttcaagtgtaacatcacaacctgtgattgatgctggtggtgcattgcatgctcagaagaaatcaaggattgatgtttgtcagggtggtatcacggaacaacagctgattcagcaactgctccatggtcagaattctcttcattaccaggggcaacagaatccacagcttcaagctttaatgcagcatcataaactggcacaacttcagcaacggcagcagcagcatccattttctcagatgcaacaaccccaagttggtattcctcggcagcctcaacttaggccaccactggcacagactggaatgcagttaggtggtcctgttaggtctcctatcgagagtgggatttgttctcgcaggatactgcagtatttatatcacaagcgtcatcgcccagagaataaccctataacatactggaggaagcttgttgaagagtacttcgcacctcgagcaagagaaagatggtgtgtctcttcttatgaaaacagagggaattcttcagctgctgctccacagaaagctttggatacgtggcgatgtggcatttgcaatacacatggtgggaaaggatatgaagttacctatgaagtacttcctaggctctgccaaattagatttgaccatggtgttattgatgaatacttatactttgactcacccaacgaattccggttgcctaatggacaaatggtgctggagcatgcaaaagtagttcaaaaaagtgtttatgaacatctgcatgttatacacgagggacatctgagaataattttcacaccagaactgaagataatgtcttgggagttctgttcacgacgccatgaggagtacaccactcgcaagactatagcaccacaggttaataatcttctgcaagttgcccagaaattccaagctgttgtcagtgaaagtggatcagctgggatatcaaataatgatgcacaaaccatctgcaacatatatcggaggtggtgaatcacatgaaggacttgatcgagttcagccacaagagcaagcttggtcctaaagagagcctgaacagttattctaaaaccacggcaaagtttgagaatatgcatgattcgagacaggccatggctgccgctaaccttgccaacaaccagagcaacaccaaattgatgggggtcaaacaagagacaagcacttctgcgaacaaccagactcctggtgccggagccattggcaacaacaatctaccgattgccgcacctctaaacacctaccagaacatgctcagaagctcaggtgccagtacgatttcgctgcagcaggaggcgtcgagtgtcttcaaaggtcctacagcaatgcacaacggcatgcagctggaagcggccaggtccttcctgggacctaaccaagttcaattccagcaccacccaccgtcgtcgtcgtttcagcagcagcagcaaaacagtttccatggctttggtgtcaacccgcagtaccagcagcatgtcctcaaccagcttctgcaggaagttaagaacagtaacaaccgctcgaaagcgcagcaaccgcctctggatgcaccaccgccgaatgcgagcggcgggggtctcgcgccaggagttgctacccccaacgtcattgctgctactggggagcaggggcagcatgtcaataacagtagctctaaccataacggcacggtaaagggtgctgctggtactggccctagcaatgtcatcaacaatagcacagccagcatggcttcggccagaaacagcagcttcaagtcggtgagcagcagtccagctgctgctggcaatgccgtgagctcgaaggtcgatgactccttccatcaactggaggacctcgacgacatgatcgctaacgaactggtggagagcgggctgttcggtgcaggacacgggtggtagtacgctactgtggtaaagccaagcaatgagatataagcctaagcctgattggtgctggcaagtgcttttgccgccgccacccttctctttctgtagagctttatgtattgacagttttccgatgatgatcatatcatacactggcgtcgctccagatgtgtgtgagttgagatagtgggttggattggatttggctgatagttagcgtgtgtatggcatgttgctgaatcaaatgatgtgatcatcgcaaggtcacaaacagcctctttgtcatgtacatcgttttccatcatgctatagtgggtgtcagttataatctcctgttatctggcaccgtctggtgttttgcacggtttctagcgattccactaggagattctggtttgcataatgcatcacacgacaacagatacacatagtcatggcaagagaagaaaaaaaaacaa

SEQ ID NO: 79640 - DNA, 2897 bp, Zea Mays
cggagcgccggcaacggctgccacaccaacacacacagactgacaggcgcaagaagaggagaggagaagaacagaggggagtggaaataatctagcagcggaaggggaagcagcacgaagggaagcggcagcggaagcggggttctggctaaagtacgttaaggtcttttttatcagcaattccagtaatgtgccttgcctcttttacgtgactatacaagacaatgaatggaactcatccctgggcctccatgtccggaggtccatgttctaaccttggatatgccagggacatgaatgttacagccaagtactagcatgaatggtgattcattgatgcgtgttcctgcgtcaccaatatcgttttcatccaataacatctctggctcttcagtcattgacggttgcatcatgcagcaaagtccaccccaagagcaggtgcagaaacagaggtcttcaagtgtaacatcacaacctgtgattgatgctggtggtgcattgcatgctcagaagaaatcaaggattgatgtttgtcagggtggtatcacggaacaacagctgattcagcaactgctccatggtcagaattctcttcattaccaggggcaacagaatccacagcttcaagctttaatgcagcatcataaactggcacaacttcagcaacggcagcagcagcatccattttctcagatgcaacaaccccaagttggtattcctcggcagcctcaacttaggccaccactggcacagactggaatgcagttaggtggtcctgttaggtctcctatcgagagtgggatttgttctcgcaggatactgcagtatttatatcacaagcgtcatcgcccagagaataaccctataacatactggaggaagcttgttgaagagtacttcgcacctcgagcaagagaaagatggtgtgtctcttcttatgaaaacagagggaattcttcagctgctgctccacagaaagctttggatacgtggcgatgtggcatttgcaatacacatggtgggaaaggatatgttacctatgaagtacttcctaggctctgccaaattagatttgaccatggtgttattgatgaatacttatactttgactcacccaacgaattccggttgcctaatggacaaatggtgctggagcatgcaaaagtagttcaaaaaagtgtttatgaacatctgcatgttatacacgagggacatctgagaataattttcacaccagaactgaagataatgtcttgggagttctgttcacgacgccatgaggagtacaccactcgcaagactatagcaccacaggttaataatcttctgcaagttgcccagaaattccaagctgttgtcagtgaaagtggatcagctgggatatcaaataatgatgcacaaaccatctgcaacatgtttgttaatgcatcacggcaactggcaaaaaatctagagcatcacaccttaaatgaacatgggctttctaaaagatatgtacgctgcctgcagatatcggaggtggtgaatcacatgaaggacttgatcgagttcagccacaagagcaagcttggtcctaaagagagcctgaacagttattctaaaaccacggcaaagtttgagaatatgcatgattcgagacaggccatggctgccgctaaccttgccaacaaccagagcaacaccaaattgatgggggtcaaacaagagacaagcacttctgcgaacaaccagactcctggtgccggagccattggcaacaacaatctaccgattgccgcacctctaaacacctaccagaacatgctcagaagctcaggtgccagtacgatttcgctgcagcaggaggcgtcgagtgtcttcaaaggtcctacagcaatgcacaacggcatgcagctggaagcggccaggtccttcctgggacctaaccaagttcaattccagcaccacccaccgtcgtcgtcgtttcagcagcagcagcaaaacagtttccatggctttggtgtcaacccgcagtaccagcagcatgtcctcaaccagcttctgcaggaagttaagaacagtaacaaccgctcgaaagcgcagcaaccgcctctggatgcaccaccgccgaatgcgagcggcgggggtctcgcgccaggagttgctacccccaacgtcattgctgctactggggagcaggggcagcatgtcaataacagtagctctaaccataacggcacggtaaagggtgctgctggtactggccctagcaatgtcatcaacaatagcacagccagcatggcttcggccagaaacagcagcttcaagtcggtgagcagcagtccagctgctgctggcaatgccgtgagctcgaaggtcgatgactccttccatcaactggaggacctcgacgacatgatcgctaacgaactggtggagagcgggctgttcggtgcaggacacgggtggtagtacgctactgtggtaaagccaagcaatgagatataagcctaagcctgattggtgctggcaagtgcttttgccgccgccacccttctctttctgtagagctttatgtattgacagttttccgatgatgatcatatcatacactggcgtcgctccagatgtgtgtgagttgagatagtgggttggattggatttggctgatagttagcgtgtgtatggcatgttgctgaatcaaatgatgtgatcatcgcaaggtcacaaacagcctctttgtcatgtacatcgttttccatcatgctatagtgggtgtcagttataatctcctgttatctggcaccgtctggtgttttgcacggtttctagcgattccactaggagattctggtttgcataatgcatcacacgacaacagatacacatagtcatggcaagagaagaaaaaaaaacaa

SEQ ID NO: 79641 - DNA, 2839 bp, Zea Mays
ccaacacacacagactgacaggcgcaagaagaggagaggagaagaacagaggggagtggaaataatctagcagcggaaggggaagcagcacgaagggaagcggcagcggaagcgggcaattccagtaatgtgccttgcctcttttacgtgactatacaagacaatgaatggaactcatccctgggcctccatgtccggaggtccatgttctaaccttggatatgccagggacatgaatgttacagccaagtactagcatgaatggtgattcattgatgcgtgttcctgcgtcaccaatatcgttttcatccaataacatctctggctcttcagtcattgacggttgcatcatgcagcaaagtccaccccaagagcaggtgcagaaacagaggtcttcaagtgtaacatcacaacctgtgattgatgctggtggtgcattgcatgctcagaagaaatcaaggattgatgtttgtcagggtggtatcacggaacaacagctgattcagcaactgctccatggtcagaattctcttcattaccaggggcaacagaatccacagcttcaagctttaatgcagcatcataaactggcacaacttcagcaacggcagcagcagcatccattttctcagatgcaacaaccccaagttggtattcctcggcagcctcaacttaggccaccactggcacagactggaatgcagttaggtggtcctgttaggtctcctatcgagagtgggatttgttctcgcaggatactgcagtatttatatcacaagcgtcatcgcccagagaataaccctataacatactggaggaagcttgttgaagagtacttcgcacctcgagcaagagaaagatggtgtgtctcttcttatgaaaacagagggaattcttcagctgctgctccacagaaagctttggatacgtggcgatgtggcatttgcaatacacatggtgggaaaggatatgaagttacctatgaagtacttcctaggctctgccaaattagatttgaccatggtgttattgatgaatacttatactttgactcacccaacgaattccggttgcctaatggacaaatggtgctggagcatgcaaaagtagttcaaaaaagtgtttatgaacatctgcatgttatacacgagggacatctgagaataattttcacaccagaactgaagataatgtcttgggagttctgttcacgacgccatgaggagtacaccactcgcaagactatagcaccacaggttaataatcttctgcaagttgcccagaaattccaagctgttgtcagtgaaagtggatcagctgggatatcaaataatgatgcacaaaccatctgcaacatgtttgttaatgcatcacggcaactggcaaaaaatctagagcatcacaccttaaatgaacatgggctttctaaaagatatgtacgctgcctgcagatatcggaggtggtgaatcacatgaaggacttgatcgagttcagccacaagagcaagcttggtcctaaagagagcctgaacagttattctaaaaccacggcaaagtttgagaatatgcatgattcgagacaggccatggctgccgctaaccttgccaacaaccagagcaacaccaaattgatgggggtcaaacaagagacaagcacttctgcgaacaaccagactcctggtgccggagccattggcaacaacaatctaccgattgccgcacctctaaacacctaccagaacatgctcagaagctcaggtgccagtacgatttcgctgcagcaggaggcgtcgagtgtcttcaaaggtcctacagcaatgcacaacggcatgcagctggaagcggccaggtccttcctgggacctaaccaagttcaattccagcaccacccaccgtcgtcgtcgtttcagcagcagcagcaaaacagtttccatggctttggtgtcaacccgcagtaccagcagcatgtcctcaaccagcttctgcaggaagttaagaacagtaacaaccgctcgaaagcgcagcaaccgcctctggatgcaccaccgccgaatgcgagcggcgggggtctcgcgccaggagttgctacccccaacgtcattgctgctactggggagcaggggcagcatgtcaataacagtagctctaaccataacggcacggtaaagggtgctgctggtactggccctagcaatgtcatcaacaatagcacagccagcatggcttcggccagaaacagcagcttcaagtcggtgagcagcagtccagctgctgctggcaatgccgtgagctcgaaggtcgatgactccttccatcaactggaggacctcgacgacatgatcgctaacgaactggtggagagcgggctgttcggtgcaggacacgggtggtagtacgctactgtggtaaagccaagcaatgagatataagcctaagcctgattggtgctggcaagtgcttttgccgccgccacccttctctttctgtagagctttatgtattgacagttttccgatgatgatcatatcatacactggcgtcgctccagatgtgtgtgagttgagatagtgggttggattggatttggctgatagttagcgtgtgtatggcatgttgctgaatcaaatgatgtgatcatcgcaaggtcacaaacagcctctttgtcatgtacatcgttttccatcatgctatagtgggtgtcagttataatctcctgttatctggcaccgtctggtgttttgcacggtttctagcgattccactaggagattctggtttgcataatgcatcacacgacaacagatacacatagtcatggcaagagaagaaaaaaaaacaa

SEQ ID NO: 79642 - DNA, 2936 bp, Zea Mays
gtttcgatttggcttgcatcgagtttttgctaagtgttcaattcaatccgtctgaggggagcgaagttttgttctgagggttctggctaaagtacgttaaggtcttttttatcagcaattccagtaatgtgccttgcctcttttacgtgactatacaagacaatgaatggaactcatccctgggcctccatgtccggaggtccatgttctaaccttggatatgccagggacatgaatggtaatgttccaataagcactacaaattcttctgggccaagcattggagttagctcattggtgactgacgccaactcgtcactttccggtggtgcccagttacagccaagtactagcatgaatggtgattcattgatgcgtgttcctgcgtcaccaatatcgttttcatccaataacatctctggctcttcagtcattgacggttgcatcatgcagcaaagtccaccccaagagcaggtgcagaaacagaggtcttcaagtgtaacatcacaacctgtgattgatgctggtggtgcattgcatgctcagaagaaatcaaggattgatgtttgtcagggtggtatcacggaacaacagctgattcagcaactgctccatggtcagaattctcttcattaccaggggcaacagaatccacagcttcaagctttaatgcagcatcataaactggcacaacttcagcaacggcagcagcagcatccattttctcagatgcaacaaccccaagttggtattcctcggcagcctcaacttaggccaccactggcacagactggaatgcagttaggtggtcctgttaggtctcctatcgagagtgggatttgttctcgcaggatactgcagtatttatatcacaagcgtcatcgcccagagaataaccctataacatactggaggaagcttgttgaagagtacttcgcacctcgagcaagagaaagatggtgtgtctcttcttatgaaaacagagggaattcttcagctgctgctccacagaaagctttggatacgtggcgatgtggcatttgcaatacacatggtgggaaaggatatgaagttacctatgaagtacttcctaggctctgccaaattagatttgaccatggtgttattgatgaatacttatactttgactcacccaacgaattccggttgcctaatggacaaatggtgctggagcatgcaaaagtagttcaaaaaagtgtttatgaacatctgcatgttatacacgagggacatctgagaataattttcacaccagaactgaagataatgtcttgggagttctgttcacgacgccatgaggagtacaccactcgcaagactatagcaccacaggttaataatcttctgcaagttgcccagaaattccaagctgttgtcagtgaaagtggatcagctgggatatcaaataatgatgcacaaaccatctgcaacatgtttgttaatgcatcacggcaactggcaaaaaatctagagcatcacaccttaaatgaacatgggctttctaaaagatatgtacgctgcctgcagatatcggaggtggtgaatcacatgaaggacttgatcgagttcagccacaagagcaagcttggtcctaaagagagcctgaacagttattctaaaaccacggcaaagtttgagaatatgcatgattcgagacaggccatggctgccgctaaccttgccaacaaccagagcaacaccaaattgatgggggtcaaacaagagacaagcacttctgcgaacaaccagactcctggtgccggagccattggcaacaacaatctaccgattgccgcacctctaaacacctaccagaacatgctcagaagctcaggtgccagtacgatttcgctgcagcaggaggcgtcgagtgtcttcaaaggtcctacagcaatgcacaacggcatgcagctggaagcggccaggtccttcctgggacctaaccaagttcaattccagcaccacccaccgtcgtcgtcgtttcagcagcagcagcaaaacagtttccatggctttggtgtcaacccgcagtaccagcagcatgtcctcaaccagcttctgcaggaagttaagaacagtaacaaccgctcgaaagcgcagcaaccgcctctggatgcaccaccgccgaatgcgagcggcgggggtctcgcgccaggagttgctacccccaacgtcattgctgctactggggagcaggggcagcatgtcaataacagtagctctaaccataacggcacggtaaagggtgctgctggtactggccctagcaatgtcatcaacaatagcacagccagcatggcttcggccagaaacagcagcttcaagtcggtgagcagcagtccagctgctgctggcaatgccgtgagctcgaaggtcgatgactccttccatcaactggaggacctcgacgacatgatcgctaacgaactggtggagagcgggctgttcggtgcaggacacgggtggtagtacgctactgtggtaaagccaagcaatgagatataagcctaagcctgattggtgctggcaagtgcttttgccgccgccacccttctctttctgtagagctttatgtattgacagttttccgatgatgatcatatcatacactggcgtcgctccagatgtgtgtgagttgagatagtgggttggattggatttggctgatagttagcgtgtgtatggcatgttgctgaatcaaatgatgtgatcatcgcaaggtcacaaacagcctctttgtcatgtacatcgttttccatcatgctatagtgggtgtcagttataatctcctgttatctggcaccgtctggtgttttgcacggtttctagcgattccactaggagattctggtttgcataatgcatcacacgacaacagatacacatagtcatggcaagagaagaaaaaaaaacaa

SEQ ID NO: 79643 - DNA, 2937 bp, Zea Mays
cagagtagagtggattggagagaccaaaatctccttaatcaaaattgaataagaggcgattttagtccttccgatttttttggctcccaaactagccatgtatgtttatcttgttcccttgggttgggttgggtcgccgaagatatgtatggctggtggaaagccaacccagcaaaaggttctggctaaagtacgttaaggtcttttttatcagcaattccagtaatgtgccttgcctcttttacgtgactatacaagacaatgaatggaactcatccctgggcctccatgtccggaggtccatgttctaaccttggatatgccagggacatgaatgttacagccaagtactagcatgaatggtgattcattgatgcgtgttcctgcgtcaccaatatcgttttcatccaataacatctctggctcttcagtcattgacggttgcatcatgcagcaaagtccaccccaagagcaggtgcagaaacagaggtcttcaagtgtaacatcacaacctgtgattgatgctggtggtgcattgcatgctcagaagaaatcaaggattgatgtttgtcagggtggtatcacggaacaacagctgattcagcaactgctccatggtcagaattctcttcattaccaggggcaacagaatccacagcttcaagctttaatgcagcatcataaactggcacaacttcagcaacggcagcagcagcatccattttctcagatgcaacaaccccaagttggtattcctcggcagcctcaacttaggccaccactggcacagactggaatgcagttaggtggtcctgttaggtctcctatcgagagtgggatttgttctcgcaggatactgcagtatttatatcacaagcgtcatcgcccagagaataaccctataacatactggaggaagcttgttgaagagtacttcgcacctcgagcaagagaaagatggtgtgtctcttcttatgaaaacagagggaattcttcagctgctgctccacagaaagctttggatacgtggcgatgtggcatttgcaatacacatggtgggaaaggatatgaagttacctatgaagtacttcctaggctctgccaaattagatttgaccatggtgttattgatgaatacttatactttgactcacccaacgaattccggttgcctaatggacaaatggtgctggagcatgcaaaagtagttcaaaaaagtgtttatgaacatctgcatgttatacacgagggacatctgagaataattttcacaccagaactgaagataatgtcttgggagttctgttcacgacgccatgaggagtacaccactcgcaagactatagcaccacaggttaataatcttctgcaagttgcccagaaattccaagctgttgtcagtgaaagtggatcagctgggatatcaaataatgatgcacaaaccatctgcaacatgtttgttaatgcatcacggcaactggcaaaaaatctagagcatcacaccttaaatgaacatgggctttctaaaagatatgtacgctgcctgcagatatcggaggtggtgaatcacatgaaggacttgatcgagttcagccacaagagcaagcttggtcctaaagagagcctgaacagttattctaaaaccacggcaaagtttgagaatatgcatgattcgagacaggccatggctgccgctaaccttgccaacaaccagagcaacaccaaattgatgggggtcaaacaagagacaagcacttctgcgaacaaccagactcctggtgccggagccattggcaacaacaatctaccgattgccgcacctctaaacacctaccagaacatgctcagaagctcaggtgccagtacgatttcgctgcagcaggaggcgtcgagtgtcttcaaaggtcctacagcaatgcacaacggcatgcagctggaagcggccaggtccttcctgggacctaaccaagttcaattccagcaccacccaccgtcgtcgtcgtttcagcagcagcagcaaaacagtttccatggctttggtgtcaacccgcagtaccagcagcatgtcctcaaccagcttctgcaggaagttaagaacagtaacaaccgctcgaaagcgcagcaaccgcctctggatgcaccaccgccgaatgcgagcggcgggggtctcgcgccaggagttgctacccccaacgtcattgctgctactggggagcaggggcagcatgtcaataacagtagctctaaccataacggcacggtaaagggtgctgctggtactggccctagcaatgtcatcaacaatagcacagccagcatggcttcggccagaaacagcagcttcaagtcggtgagcagcagtccagctgctgctggcaatgccgtgagctcgaaggtcgatgactccttccatcaactggaggacctcgacgacatgatcgctaacgaactggtggagagcgggctgttcggtgcaggacacgggtggtagtacgctactgtggtaaagccaagcaatgagatataagcctaagcctgattggtgctggcaagtgcttttgccgccgccacccttctctttctgtagagctttatgtattgacagttttccgatgatgatcatatcatacactggcgtcgctccagatgtgtgtgagttgagatagtgggttggattggatttggctgatagttagcgtgtgtatggcatgttgctgaatcaaatgatgtgatcatcgcaaggtcacaaacagcctctttgtcatgtacatcgttttccatcatgctatagtgggtgtcagttataatctcctgttatctggcaccgtctggtgttttgcacggtttctagcgattccactaggagattctggtttgcataatgcatcacacgacaacagatacacatagtcatggcaagagaagaaaaaaaaacaa

SEQ ID NO: 79644 - DNA, 2442 bp, Zea Mays
tttccatagacatccctgtcccacaaaaaaaatgcagaaacagaaaaaacagtagtgcagcagtattagcagacagcaggggtgtgcatgtgaccccaagaggccaggacaggtaggcgcacatgccacatcccccgcgagcaactactaccacggcgtcgtgcgcgctgctgtcgttcctgaaccagttcttctggtaccgcaaggagccgctgaccatcacggccatctcggcgcagatcgcggtggtgccgctgggccgcctgatggcggcggcgctccccgcgcgcgccgtgctccgcggcacccgctgggagttctcgctcaacccgggccccttcagcgtcaaggagcacgtgctcgtcaccatcttcgccaactccggcgccggcaccgtctacgccatccacgtcatcaccgccgtccgcgtcttctacggcaagcacatcaccttcttcgtctccctcctcgtcgtgctcaccacccaggtgctggggttcggctgggcgggaatattccggcggtacctggtggagccggcggcgatgtggtggccgtctaacctcgtgcaggtctccctcttcagggcgctccacgagaaggagcggcgcgtgaagggaggcatgacgcggaaccagttcttcctggtggcattcgtctgcagcttcgcctactacgtcttcccgggctacctgttccagatgctcacctccctgtcgtggctctgctgggcgttcccgcgctccgtggtggcgcagcagctggggtcggggctgagcgggctgggcgtgggcgcggtggggctcgactggtccaccatctcctcctacctcggaagcccgctcgccagcccctggttcgccaccgccaacgtggccgccggcttcgtcctcatcatgtacgtcatcacgcccgccgcgtactactggctcggcctgtacggggcgcgcagcttccccatcttctccgacgggctcttcaccgccgccgggcagacgtacaacatctccagcatcgtggactccaacttccggttcgacaccgaggcatacgagcgcaacggcccgctctacctcagcaccttcttcgccgtcacctacggggtcggcttcgcgtccctcaccgccacggttgtgcacgtcttcctcttccacgggagcgagatctggcagctgagcaggtcagcgttccaagagaagaaggtggacgtgcacacgaggctgatgaggaggtacaggcaggtccccgagtggtggttcatctgcatcctcgtcgccaacgtcgccgtcaccatattcgcctgcgagtactacatcgagcagctccagctgccctggtggggcgtcctgctcgcctgcgccatcgccttcttcttcaccctcccgatagggatcatcacagcgacgacgaaccagactccaggcctgaacatcatcaccgaatacatcatggggtacctgtacccgggccgtcccgtcgccaacatgtgcttcaaggtgtacggctacatcagcatgacgcaggcgctggccttcctgcaagacttcaagctgggccactacatgaagatcccgccgaggaccatgttcatggcgcaggtggtggggacgctgatcgcggcgctcgtgtacatcgggacggcgtggtggctcatggacagcgtccccaacatctgcagcacggagctgctccccgccgacagcccctggacgtgccccatggaccacgtgttctacgacgcgtccgtcatctggggcctcatcggcccgcgcaggatcttcggcgacctcggcacctactcggcggtcaactggttcttcctgggcggcgccgtcgcgcccctcctcgtgtggctcgcgcaccgggtgttcccgagccagagctggatcctgctcgtcaacatgcccgtgctcatcggctccaccggcatgatgccgccggccaccgccgtcaactacaccacgtggatcattgccgggttcctgtcggggtacgtggtctacaggtaccggcgtcactggtgggagcgccacaactacctgctctctggcgcgctcgacgctggcctggcgttcatggccgtgctcatctacctgtgcttgggcttggagaacgtcggcctcaactggtggggcaatgatctggacgggtgccctctcgcctcttgtcccactgccaaaggtatcgttgttgagggctgcccggtgtatacatgaggaattgagaacccatgcattcggagaagagaacatggcaatgcaagtggacaagtgtctcaagagcaatgtaaataatttatcttttcaaacaatttagggatgggaaattggtgttcctttcattgtaaaatggctggtaattacggctattccagctcggaatcaaatttattccgtggtacaacaaaacataatttattcaaaaaagcgatctcgcatgctc

SEQ ID NO: 79645 - DNA, 2965 bp, Zea Mays
tttccatagacatccctgtcccacaaaaaaaatgcagaaacagaaaaaacagtagtgcagcagtattagcagacagcaggggtgtgcatgtgaccccaagaggccaggacaggtaggcgcacatgccacatcccccgcgagcaactactaccacggcgtcgtgcgcgctgctgtcgttcctgaaccagttcttctggtaccgcaaggagccgctgaccatcacggccatctcggcgcagatcgcggtggtgccgctgggccgcctgatggcggcggcgctccccgcgcgcgccgtgctccgcggcacccgctgggagttctcgctcaacccgggccccttcagcgtcaaggagcacgtgctcgtcaccatcttcgccaactccggcgccggcaccgtctacgccatccacgtcatcaccgccgtccgcgtcttctacggcaagcacatcaccttcttcgtctccctcctcgtcgtgctcaccacccaggtgctggggttcggctgggcgggaatattccggcggtacctggtggagccggcggcgatgtggtggccgtctaacctcgtgcaggtctccctcttcaggtacaccacaactccccaaccgtttctggccaatatgtgtgttatacgattattttaattttggagcagagggaatacgattattttgtatcagctctctgtttttttatttgttacgctttagataaaaaatgaaccagcgaataacaaatattcgagaacgaaaatagtagaagctatcattgattagttgattgtgtactgcttgattggatctacaataggggtgtgagcgaggagagatgtggtaagcaatgtgtgtgtttggcgttctgattcagcataaagacataaggacgtcgccaaggtagacaatggcgcgtggatcacgtggcatgggatatgccacgtcggcttggagctcgcttgcatccaaggccgaaaagggactattcaagattcttacagattcatacggatgtacattatttgttttgttttgccactaaaaactccagtggtgacaaggaagttgacacaaacacactggcctccgctccgcacgtgtgtgctggatcaccagggcgctccacgagaaggagcggcgcgtgaagggaggcatgacgcggaaccagttcttcctggtggcattcgtctgcagcttcgcctactacgtcttcccgggctacctgttccagatgctcacctccctgtcgtggctctgctgggcgttcccgcgctccgtggtggcgcagcagctggggtcggggctgagcgggctgggcgtgggcgcggtggggctcgactggtccaccatctcctcctacctcggaagcccgctcgccagcccctggttcgccaccgccaacgtggccgccggcttcgtcctcatcatgtacgtcatcacgcccgccgcgtactactggctcggcctgtacggggcgcgcagcttccccatcttctccgacgggctcttcaccgccgccgggcagacgtacaacatctccagcatcgtggactccaacttccggttcgacaccgaggcatacgagcgcaacggcccgctctacctcagcaccttcttcgccgtcacctacggggtcggcttcgcgtccctcaccgccacggttgtgcacgtcttcctcttccacgggagcgagatctggcagctgagcaggtcagcgttccaagagaagaaggtggacgtgcacacgaggctgatgaggaggtacaggcaggtccccgagtggtggttcatctgcatcctcgtcgccaacgtcgccgtcaccatattcgcctgcgagtactacatcgagcagctccagctgccctggtggggcgtcctgctcgcctgcgccatcgccttcttcttcaccctcccgatagggatcatcacagcgacgacgaaccagactccaggcctgaacatcatcaccgaatacatcatggggtacctgtacccgggccgtcccgtcgccaacatgtgcttcaaggtgtacggctacatcagcatgacgcaggcgctggccttcctgcaagacttcaagctgggccactacatgaagatcccgccgaggaccatgttcatggcgcaggtggtggggacgctgatcgcggcgctcgtgtacatcgggacggcgtggtggctcatggacagcgtccccaacatctgcagcacggagctgctccccgccgacagcccctggacgtgccccatggaccacgtgttctacgacgcgtccgtcatctggggcctcatcggcccgcgcaggatcttcggcgacctcggcacctactcggcggtcaactggttcttcctgggcggcgccgtcgcgcccctcctcgtgtggctcgcgcaccgggtgttcccgagccagagctggatcctgctcgtcaacatgcccgtgctcatcggctccaccggcatgatgccgccggccaccgccgtcaactacaccacgtggatcattgccgggttcctgtcggggtacgtggtctacaggtaccggcgtcactggtgggagcgccacaactacctgctctctggcgcgctcgacgctggcctggcgttcatggccgtgctcatctacctgtgcttgggcttggagaacgtcggcctcaactggtggggcaatgatctggacgggtgccctctcgcctcttgtcccactgccaaaggtatcgttgttgagggctgcccggtgtatacatgaggaattgagaacccatgcattcggagaagagaacatggcaatgcaagtggacaagtgtctcaagagcaatgtaaataatttatcttttcaaacaatttagggatgggaaattggtgttcctttcattgtaaaatggctggtaattacggctattccagctcggaatcaaatttattccgtggtacaacaaaacataatttattcaaaaaagcgatctcgcatgctc

SEQ ID NO: 79646 - DNA, 2430 bp, Zea Mays
catccctcttccttttcgtgaccacaaccttcacggacacaacggaaacgcatcagatgctctctccctccttgctcctgccgtcccttacctccccttccatcctcgtcctcgagcgagccgctgcaggcgtcacaccgtcgccagaggcgcctgctgacggcgagcctgaatccaaggcctgtgcaactggcgacgacgaccatcagagggccgacgagtggtccctcgcctcctcctccggctagatggtcctgtcgcccatgtatctcccctttcatggccgtcctcgagcgtgctgttgcgggcatcacgctgccgctaaaaacacatgtcggcggcgaggacgaggcctatgcagccggcagcgacgaccaccaacagttccagcttgccgagcctaaccagagggccgaggagccaccttctccgtctagatgctcccatcgtccgtgcatctccccttccatccctgtcctcgattgtgtcgttgcgtacgtcgtgccaccgccagagtctcctgtcaacggcgaggccgagaccaacgcctgtgcacccagcggtgacgaccaccaccagctgcagcttgtcgagcctcaccagagggacgaggagtggtccctcgccgctttctcagtctaggtgtagttcagcgatacgcagtacatgcttaggtgccaagacctgcaggtccatcgcctactacgacaagggcctcgagatcttgatggctacgctcggcgagcgtgatcccccatcgcaaagacctgcagaggcagaaatgctttaaggagctgcagtgatttttgtggacatgttccagtctgatattgattcaggattctgcaatgggactgctaggggtcatcaggttcagggacaagccaaaagtagaatatgttgggccttaccttcatcacggtcccctcagaggtgccatcatgtaatggcttcaataagtgagtttcatcaggctattgaaagtggtgcaggtcagagccaggctagattttgttttggggtaaatgcacttgtcattatcaatttactttgcttgataatgatgcatcatgtcagggaccgcagttatttaactctgattttattataacttgcttctagcgaacggtcatgcaattgaccgaacatgtaaaccataagcaaatgtgatgtaggagatttttatataaatagacttttgcagccactttgatgttttgttttatgtttcctttttgtgaaaaaatattatggtgctattcgagtgtttttttcttattacaatttcaaatacttatgtgaatagcatagcgcccgatagggcgctgtcttattctagtgttcatgcaaaccggacccttcaggatgcaatcaacttgcacaaaatgtggtggttctgggaagactgtgaaggtagggtttccctcttaatgacatatatcagctgcaacaaccaaaaaaaagattatgtagcacagttgtagtatcaggcctcctatgccatgagtcattatagtacacccttggcacaggtatttcactgaggttgatgatcttgaagtctgaattacttttcctcaccatattttattctactagtcatgaatgatttatttcctgattgcatgtaaagtcagctctatcatgttaactaattgagttaccctgtaatggacttcctctatagagcagcttatgaattttgattaatcagcacaacactggttatgtttctatgttattcctttaggaattctgcaagacacgcagaggaaataaagttgtgcctggaacgaaatcagttcgtcttgacatagtgcctggtgagtggtgagtttcatgttgtcatggttcactggaatcacgcccgcccgcccgtataggctaggctatatctttatgcctgcatctctatactcccctagtcccctgaaagttattgatcaggctgccatgcacagtgttctcttagcatttttacaatattttatatgtggcaacaaaagtttcatcatcacaatgtttttaaatacaaatacaaatcaatggtttgtccatcaggcttcagcaagcaatgcaagatccgtcggcctctcctccgaaatcatcagatttcagatcttagactgtctgcagcagtctatctatagtttatccaaaagcattattttgcattgttctgtatcgtagattacactgcagtctatgtatagtttatccaaaagcattgttttgcactgttttgtatcgtagattacaccgttcgcagagtggagtttgaatatggatataggatagataagttgctggagatagttttagagggtgtttggttcctttaggggatgtttggttcaatgaatcactccatctaaaataaagtggtgtaacataagctaattttcctcaaattttggtgagatgacttca

SEQ ID NO: 79647 - DNA, 1486 bp, Zea Mays
tttacacctgcacggcatccactggttcgtaacgttcgacgcagtgtctcttctattaacctgcgagcacgcgtggcgccggcgaggccacacgcagcccaccagtaagccgccaccgccatgcggctcccctccggcgcacgcctcgcgctcctgctcgtccgccgctccctctcctccgcgtcctcctccgccgccgcccccgcatcccgcctctcgcgcgcgcacagaggtgagccccgacagaccccaccccactaggtcctcgattctcccggttcctcgggcgggcctcgcctggtcgccccgtgttcctcgggcgcgcaagcgatgatgctgaggccgcccgcgttagcgtgctgcaaactctacatctccgaggcccgcaactcgggggcgttgcgtgccatcgagcacgcggcggcggcgctccgcccgttggccgtgctcgtcaacaccttcgccgacgacgcctacaaccgggtcgggtacacgctcgtgtcccccctcgcgggcggcgccgcctcgccgccgctgcgctgcgcggcgttccgcgtggtcgcggccgcgatcgaggccgtcgacctggacgcccacgccggcgcgcacccgcgcctcggcgtcgtcgaccacatcgccttccaccctctggccagcgcccgcctcgaggacgtcaccgcgctcgccagggccgtggcggcggacatcggagacaggcttcaagtgccgacgtacctgtacggcgcagctcacagagacggcaggacgctggcgtccatcaggaggcagctgggctacttcacgccgacctcccccggcggcgagcagtggcacggcgcgccggactcgctgctgccggtggccccggacgccgggccccggacgtcgtccgcgtccaatggcgtggtggtggtgggcgccacgccgtgggtggacaactacaacgtgcccctggccacggccgacgtcagcgtcgcgaggcgcatcgcgcgcgcggtcagcgagcgcggcggcgggctcgcgtgcgtgcaggccatggggctcgcgcacggcgacggcgccaccgaggtcgcctgcaacctacttcacccggacgcggtgggcgccgaccaggtgcaggggtacttcaccgacttctcgcgggagaaggtcgtcgagctgtacttgcaggccgctcaagctgcctgaggcttctcggcagtgatagattgtttattgttcagaaagcagggtaatggaataatctactactgtgtatctaggaatccagcagttgtcagccatggcacaaaaaaaaaagttgagctgcgaacagtatgcaaccatctcaatctggtattcatagcaattatatattgccacaaagaaaaaagactagagattatactacgttgcaagccaggtccttccaaatctccaagtagctgtaattacagaatacaatacgtccaagctgagcacatagaaacgatactctagactgcag

SEQ ID NO: 79648 - DNA, 1415 bp, Zea Mays
acggctctatacctctcgccctctgagtctcgcgcgggctgcaggccatccgagctccggcttccggcatccaccagacgtccttagaatacggtgcagcgagcagcaagtcgccgagcagccgagccaccgccgagcagccgagccgccgccgagcgccgagtcttctatgtttgcttctccggtgaaaggtgtttgctaggggaccatggaggagcacggagcggaagacctcctgtgcgaggcgatgggatctgcggcgcaggtcgtggtggtagaggattgcgtggaagcaccgggggccttcgtcctccacctcctcctcaagcgcgcgctcgccggctgcggctccgctgccttcctcgccctcgcgcagcccttctcccattacgatcgcgtcctgcgcaagatgggctgtaacctttccctgcataggaggaatgagaggcttcatttctttgaattgctaggattcccaggtggagcaagggaaggcaccattgctgatagctttgctctattgtacaatgaaattcaaagactggtggaggcaaacagggctggagaaaatgaaggccagttcaccatcgttatagacgacgcttccctgttggaagtcgtggcccttggttctgtaagcgatgtgctggatttcttgcactattgtttcacactcacgtctgagatgaattgcaagctagtgatcctcattcacgaggatatatacgcaaatgaggagaacatgggtctccttttacatctgcgctacattgcggatcttgtgattaaagcagcacctttaagcactggtttggctgctgatgttcatggacagctggcggttgtgaacaagggtacattcagcgagcaaagggcaaaagcacagaaagtttggaacttccatttcaaagtgaaagaaaacggtgctgacttcttctatccagggagtagacattagggaatacttgtatacagtagaaacaactctggttgtgataactgataaccagtgctgctattcttcgtgtaccttgtgctaagcacagtaaagttttgtccaatccttcatttcacaattttgtttgtgttcaagtcaacatagcttacaaagtgttcgccacagccaagttcattgagcttgatctcgcacaagagacctattttgcatctcacgcaacagtcacatttctttttcaaggaaacagggaatgcaaaccccaacttgttttcatttggaaacatgatctttccgcccccaatctgaatttgttcaatgcagctgctcattgggagaaccgattctgatacatgtcattgccactcccacttacaatgccacctccaccgatattttggctcatgtttgcagcatgtccttcaacaggaggatcaaacacatctgatgaaccacactg

SEQ ID NO: 79649 - DNA, 1516 bp, Zea Mays
acggctctatacctctcgccctctgagtctcgcgcggccatccgagctccggcttccggcatccaccagacgtccttagaatacggtgcagcgagcagcaagtcgccgagcagccgagccaccgccgagcagccgagccgccgccgagcgccgagtcttctatgtttgcttctccggtgaaaggtgtttgctaggggaccatggaggagcacggagcggaagacctcctgtgcgaggcgatgggatctgcggcgcaggtcgtggtggtagaggattgcgtggaagcaccgggggccttcgtcctccacctcctcctcaagcgcgcgctcgccggctgcggctccgctgccttcctcgccctcgcgcagcccttctcccattacgatcgcgtcctgcgcaagatgggctgtaacctttccctgcataggaggaatgagaggcttcatttctttgaattgctaggattcccaggtggagcaagggaaggcaccattgctgatagctttgctctattgtacaatgaaattcaaagactggtggaggcaaacagggctggagaaaatgaaggccagttcaccatcgttatagacgacgcttccctgttggaagtcgtggcccttggttctgtaagcgatgtgctggatttcttgcactattgtttcacactcacgtctgagatgaattgcaagctagtgatcctcattcacgaggatatatacgcaaatgaggagaacatgggtctccttttacatctgcgctacattgcggatcttgtgattaaagcagcacctttaagcactggtttggctgctgatgttcatggacagctggcggttgtgaacaagggtacattcagcgagcaaagggcaaaagcacagaaagtttggaacttccatttcaaagtgaaagaaaacggtgctgacttcttctatccagggagtagacattagggaatacttgtatacagtagaaacaactctggttgtgataactgataaccagtgctgctattcttcgtgtaccttgtgctaagcacagtaaagttttgtccaatccttcatttcacaattttgtttgtgttcaagtcaacatagcttacaaagtgttcgccacagccaagttcattgagcttgatctcgcacaagagacctattttgcatctcacgcaacagtcacatttctttttcaaggaaacagggaatgcaaaccccaacttgttttcatttggaaacatgatctttccgcccccaatctgaatttgttcaatgcagctgctcattgggagaaccgattctgatacatgtcattgccactcccacttacaatgccacctccaccgatattttggctcatggtaccattaacatgctctatgtttggtcttgcaatattggcgacagcgctacttccattctgcccattgcacccagtatgaccaactgagataccccttcacactgtagtttgcagcatgtccttcaacaggaggatcaaacacatctgatgaaccacactg

SEQ ID NO: 79650 - DNA, 1545 bp, Zea Mays
acggctctatacctctcgccctctgagtctcgcgcggtcagtcggtctctctctctcactctctcttgtctccaagtttgtaaccctagccgccaagcttgaagctccagccgtgctcgtgtagggctgcaggccatccgagctccggcttccggcatccaccagacgtccttagaatacggtgcagcgagcagcaagtcgccgagcagccgagccaccgccgagcagccgagccgccgccgagcgccgagtcttctatgtttgcttctccggtgaaaggtgtttgctaggggaccatggaggagcacggagcggaagacctcctgtgcgaggcgatgggatctgcggcgcaggtcgtggtggtagaggattgcgtggaagcaccgggggccttcgtcctccacctcctcctcaagcgcgcgctcgccggctgcggctccgctgccttcctcgccctcgcgcagcccttctcccattacgatcgcgtcctgcgcaagatggtggagcaagggaaggcaccattgctgatagctttgctctattgtacaatgaaattcaaagactggtggaggcaaacagggctggagaaaatgaaggccagttcaccatcgttatagacgacgcttccctgttggaagtcgtggcccttggttctgtaagcgatgtgctggatttcttgcactattgtttcacactcacgtctgagatgaattgcaagctagtgatcctcattcacgaggatatatacgcaaatgaggagaacatgggtctccttttacatctgcgctacattgcggatcttgtgattaaagcagcacctttaagcactggtttggctgctgatgttcatggacagctggcggttgtgaacaagggtacattcagcgagcaaagggcaaaagcacagaaagtttggaacttccatttcaaagtgaaagaaaacggtgctgacttcttctatccagggagtagacattagggaatacttgtatacagtagaaacaactctggttgtgataactgataaccagtgctgctattcttcgtgtaccttgtgctaagcacagtaaagttttgtccaatccttcatttcacaattttgtttgtgttcaagtcaacatagcttacaaagtgttcgccacagccaagttcattgagcttgatctcgcacaagagacctattttgcatctcacgcaacagtcacatttctttttcaaggaaacagggaatgcaaaccccaacttgttttcatttggaaacatgatctttccgcccccaatctgaatttgttcaatgcagctgctcattgggagaaccgattctgatacatgtcattgccactcccacttacaatgccacctccaccgatattttggctcatggtaccattaacatgctctatgtttggtcttgcaatattggcgacagcgctacttccattctgcccattgcacccagtatgaccaactgagataccccttcacactgtagtttgcagcatgtccttcaacaggaggatcaaacacatctgatgaaccacactg

SEQ ID NO: 79651 - DNA, 2880 bp, Zea Mays
acggctctatacctctcgccctctgagtctcgcgcgggctgcaggccatccgagctccggcttccggcatccaccagacgtccttagaatacggtgcagcgagcagcaagtcgccgagcagccgagccaccgccgagcagccgagccgccgccgagcgccgagtcttctatgtttgcttctccggtgaaaggtgtttgctaggggaccatggaggagcacggagcggaagacctcctgtgcgaggcgatgggatctgcggcgcaggtcgtggtggtagaggattgcgtggaagcaccgggggccttcgtcctccacctcctcctcaagcgcgcgctcgccggctgcggctccgctgccttcctcgccctcgcgcagcccttctcccattacgatcgcgtcctgcgcaagatggtaccgctcgccccccgccccctcttcacctcaccggcatttcgtcaaacacgttttgtgcttaccggcttcatgccgggctgcctatgttagcttcactgttacaacagcgtgcatactggaaaatgcataccggattgctctagtcaaaatctacacatttgcatttatatccatcttttttggtcttcgggaatttgccagggctgtaacctttccctgcataggaggaatgagaggcttcatttctttgaattgctaggattcccaggtggagcaagggaaggcaccattgctgatagctttgctctattgtacaatgaaattcaaagactggtggaggcaaacagggctggagaaaatgaaggccagttcaccatcgttatagacgacgcttccctgttggaagtcgtggcccttggttctgtaagcgatgtgctggatttcttgcactattgtttcacactcacgtctgagatgaattgcaagctagtgatcctcattcacgaggatatatacgcaaatgaggagaacatgggtctccttttacatctgcgctacattgcggatcttgtgattaaagcagcacctttaagcactggtttggctgctgatgttcatggacagctggcggttgtgaacaagggtacattcagcgagcaaagggcaaaagcacagaaagtttggaacttccatttcaaagtgaaagaaaacggtgctgacttcttctatccagggagtagacattagggaatacttgtatacagtagaaacaactctggttgtgataactgataaccagtgctgctattcttcgtgtaccttgtgctaagcacagtaaagttttgtccaatccttcatttcacaattttgtttgtgttcaagtcaacatagcttacaaagtgttcgccacagccaagttcattgagcttgatctcgcacaagagacctattttgcatctcacgcaacagtcacatttctttttcaaggaaacagggaatgcaaaccccaacttgttttcatttggaaacatgatctttccgcccccaatctgaatttgttcaatgcagctgctcattgggagaaccgattctgatacatgtcattgccactcccacttacaatgccacctccaccgatattttggctcatggtaccattaacatgctctatgtttggtcttgcaatattggcgacagcgctacttccattctgcccattgcacccagtatgaccaactgagataccccttcacactgtagtttgcagcatgtccttcaacaggaggatcaaacacatctgatgaaccacactgaacatgccaaagccttgatgccatcctttggtgattgcagaggcaaccagcgagtgattgaggttctcacacatgagataacaaacttgctgaagaggtctgagaagaggccgcagaagctatccatggaagatccatcagaggattcaaattttcgaaagaatgtccagtgttctcttgctatggacctgcaaaacctatcattggggttctggaaaaagcagtcatcatattcaaaggagcttcggcaacaaaaagaggttccctttctgttgtcatcagataattagatgcagatcaaatgcttgcccaaccctgagtgacatgcttttgttggcgaataccttttacatgctgcatacctgattgtggtggttctttttatctctgcatatagcatgaggagtgcctatagtaacttatgtcaaatataaaaactcggacggtagaagaaagaccgccacacagtattaagaaaagcaactatcttgcgtctgggtttcaggtgtcaaaactttatgctctcttgactttcaggtgtcaaaacttaagaaaagcgactggggcagtaaaatctttgtccaacccttgagtttactgcttacagcaggcactgtcttgtgcctttatgctctctctctctctctctcccccctctcatatgtcacaggtagctgtatgcattatgtacccagtcgtgtttcttaaaataaagaaagctagctgtatgcatcggtacctgaagcttgcagtctaatgtgttgtgcaggctgagaggaagcaggagaagaaagggtgatgtgtgccactgtccttgccattctgattttggagatcattttcttctgacatacatacctatctcgtcttaatggttgatggatggcagcacttctccggtcatgtgtagtcgggagatgcaacgggatcttgtgtgggggaaacagccagcagcgctggtgctgctgatcattgtttacctgctgattattattgctgcctgcgctcagcccgtgctgtgtttgggagctcggaggccgcccctgcccgtgtggctggcatggctgggtttttgaccaacttttttgcaatttggcccttttcgagtttttttcccacatttatgcccctggcagtttcatttcaaaaaat

SEQ ID NO: 79652 - DNA, 530 bp, Zea Mays
cagaagctatccatggaagatccatcagaggattcaaattttcgaaagaatgtccagtgttctcttgctatggacctgcaaaacctatcattggggttctggaaaaagcagtcatcatattcaaaggagcttcggcaacaaaaagaggctgagaggaagcaggagaagaaagggtgatgtgtgccactgtccttgccattctgattttggagatcattttcttctgacatacatacctatctcgtcttaatggttgatggatggcagcacttctccggtcatgtgtagtcgggagatgcaacgggatcttgtgtgggggaaacagccagcagcgctggtgctgctgatcattgtttacctgctgattattattgctgcctgcgctcagcccgtgctgtgtttgggagctcggaggccgcccctgcccgtgtggctggcatggctgggtttttgaccaacttttttgcaatttggcccttttcgagtttttttcccacatttatgcccctggcagtttcatttcaaaaaat

SEQ ID NO: 79653 - DNA, 981 bp, Zea Mays
tgaacatctgctcgactgtcatcggtggtggcggtggcaactgctgctgctgggctgcatcctcttggggtgcctgctgttctagctgagcacgcctcgcacctatgcgcctgttctcagacatctgtagaaatcacacacatatttcaaatctaactctacagtccttcaacataagaaaagatgtatagaaaatcctcaaagcactgaacaaatgaccatcttcactgacagcttctcagataaagaggaaagtggaaataaatgggttacccaactaaataactgactttattaataactacaccaagttgcaggggatacccacaccttggtgacaatcattacaaagatccaacttcagtacatgtcacacccggtttcagaaggcaaaccgaatgcgaaccatgtacgtgccaggatcagaattcacgtacacaacgattacataaatgaacatcatcgcacagtgctcgaataataacataaaagagtattaacttattacatcacagagtcagagacatccacatagtcatcaacttaacaggtaaatcaaagtgctaagcgaaacgcagtaaagatagggccttcacaggcagctgactgggggttgccgccaacccacacctagaactcgtcgtagtcctggaactcctggaagtctccttccacgacttcgtcttctcctgagcagtggttgcaatgtgaacaacctggtgttttgtgaaagcaagggtgagtacacatcaacgtactcagcaaatgtcccgtttggctgaggtggactagctttattagtggaagccaagttttatcatataaccaacccgtgaatcatttcctcatcgaggaacatcattatcgtcatcgaaccaaaataataaatagaaccattgtatctcagatcatttgtatctctaatcaaagaggatcccaaggccgctcttaaccgtgagcacggctgatatatcagtttca

SEQ ID NO: 79654 - DNA, 594 bp, Zea Mays
taaatgggacataatgggtcagaggacacttgccttcaccaaacagatgctcagagtcttcaacttcgtggaacccaaagagctagaccacttggtcgccgaagcttgaccgtcgattcctcgaagcccagaaacgagtcgagatctgctcggcggcaagagggcgaaggcatcagcgagcttgacgatggcgaggcacgggcacgatgagcggcgaggctgtagggctcctccacacaacaacggggtgtgcggggacgcgtcgacgaagcagccgtgctggcacggtgaccggcgaacggctacggggcgactccgtgcggggctgggcagcggcgtaggggtagacgggctgggcggcatgcttaaccggcaaccgggctgcagtagcgaggacgactgtacgtgggggagttgctttgggtggagggttgaagcagggccatttgtcaaagatgcgagcacgtctgcagcggaagaagcggagctgagcggttgaaggagagagaggatagtgctgatgcgcagggcccacaacacaatgtacaagcggctaccaagccggatcatgttcagggcgtgcgtgtggctggg

SEQ ID NO: 79655 - DNA, 485 bp, Zea Mays
cttcaccaaacagatgctcagagtcttcaacttcgtggaacccaaagagctagaccacttggtcgccgaagcttgaccgtcgattcctcgaagcccagaaacgagtcgagatctgctcggcggcaagagggcgaaggcatcagcgagcttgacgatggcgaggcacgggcacgacgagcggcgaggctgtagggctcctccacacaacaacggggtgtgcggggacgcgtcggcgaagcagccgtgctggcacggtgaccggcaaacggctacggggcgactccgtgcggggctgggcagcggcgtaggggtagacgggctgggcggcatgcttaaccggcaaccgggctacagtagcgaggacgactgtacgtgggggagttgctttgggtggagggttgaagcagggccatttgtcaaagatgcgagcacgtctgcagcggaagaagcggagctgagcggttgaaggagagagaggatagtgc

SEQ ID NO: 79656 - DNA, 2117 bp, Zea Mays
aattaatggccgccaccaagaaccctccaacccccacctgaccttctcttcctccctcccccgaccgcctgtctgtcctccgcgcatccgttctctatcgaaagggaggaggaggagcgcgcgggagtgggctgggggcccaccgatgctgagctcggcgtcctcggccggggcggccatggggatgggcggcgggtaccaacaccagccgctgccactgccgcagcgcggggcggcggccgcggtcttcaccgccgcgcagtgggcggagctggagcagcaggcgctcatctacaagtacctcatggccggcgtccccgtcccgcccgatatcctccgccccgccccccacgccgccgccttctccttcgccagccccgccgcgtcgcccttctactttcccccaccaccacccgtcccgtaagctccccccttacctccatccccctctttttttttgttcgggagagaacagttgcatagatcttttgcccgccatgcttcttactgggattggatttgtctggttgggtattgccgcgatttatctcatcgagtgattcattaagcatgcgctgcctagcatctcggcatctgcctaatgttcgagtggggtggatctttgtcacctcctcacccgcttgctcgcgcaatgggatggggattctttattattcaaacttttaaacaaaacaaagtgggagaaagcatcttcgcattgggttggtcaaatgttcatgtgctttttgatctgccccagtagcaagtacaccatttcattataatatatgtatatactatggtttgtttcccttctgcagtgagttactacgcctactacgggaagaagctggacccggagccgtggcggtgccgccgcaccgacggcaagaagtggcggtgctccaaggaggcgcaccccgactccaagtactgcgagcgccacatgcaccgtggccgcaaccgttcaagaaagcctgtggaatccaagaccgcctcctcgccgccccagctgtccaccgtcgtcaccaccaccaccacccgggaggccgccgccgcgacgccccttgagtccctcgcgggggcggggggtaaggctcacggcctgtccctcggcggcggggctggctcgtcgcacctcagcgtcgacgcttcgaacgctcactttcgctatggcagcaagtaccctcttggagctaaatccgatgctggcgagctgagcttcttctcaggagcaccagggaactccaggggcttcaccattgattctccagcagataactcttggcactccctgccatccaacgtgcccccgtttacactgtccaagggcagagactctggcctcctgcccggtgcctactcctactcccacattgaaccaccgcaggtgctcggccaggtcaccatcgcctcgctgtcacaggaccaggagcgccaccagtcgtcgttcagcagcggcggggccggcgctggtggattgctggggagcgtgaagcaggagaaccagccgctgaggcccttcttcgacgagtggcctgggacgcgggactcgtggtcggagatggacgacgcgaggtccagtaggacctccttctcgacgacccagctctccatctccattccgatgcccagatgtgattgagaacgaagctcgtgcgcggccagtaggtggcgttgtcgcatgacgcgcacccagcatcgcgctcgctgctagcgagccaccgtcacccggtgattgatgccctcatcctagctatttgtttcgctgaatcgcattaagaacagaactctatgtaagagcaggatccttcctcatgtatcaatgggggcaatgaactccattctgtttctatggttgtagtaccgaccatgctttgtatttgttgtacccagaccgagaatgaaaaccgcccagtcgtcaggcgttgtcgtcgctgcatcagatgatccaagtgtattgtgtgctttccaggctgtgtaagatctgatggcgaatctgttactgcagtgtagagagactgtcactgcgaccctagagagacgcgtcctggtggtggtgagggcggggtggcgagacggacggcgccgcagggagcagtgctcgtggaattggg

SEQ ID NO: 79657 - DNA, 1658 bp, Zea Mays
aacccccacctgaccttctcttcctccctcccccgaccgcctgtctgtcctccgcgcatccgttctctatcgaaagggaggaggaggagcgcgcgggagtgggctgggggcccaccgatgctgagctcggcgtcctcggccggggcggccatggggatgggcggcgggtaccaacaccagccgctgccactgccgcagcgcggggcggcggccgcggtcttcaccgccgcgcagtgggcggagctggagcagcaggcgctcatctacaagtacctcatggccggcgtccccgtcccgcccgatatcctccgccccgccccccacgccgccgccttctccttcgccagccccgccgcgtcgcccttctactttcccccaccaccacccgtccctgagttactacgcctactacgggaagaagctggacccggagccgtggcggtgccgccgcaccgacggcaagaagtggcggtgctccaaggaggcgcaccccgactccaagtactgcgagcgccacatgcaccgtggccgcaaccgttcaagaaagcctgtggaatccaagaccgcctcctcgccgccccagctgtccaccgtcgtcaccaccaccaccacccgggaggccgccgccgcgacgccccttgagtccctcgcgggggcggggggtaaggctcacggcctgtccctcggcggcggggctggctcgtcgcacctcagcgtcgacgcttcgaacgctcactttcgctatggcagcaagtaccctcttggagctaaatccgatgctggcgagctgagcttcttctcaggagcaccagggaactccaggggcttcaccattgattctccagcagataactcttggcactccctgccatccaacgtgcccccgtttacactgtccaagggcagagactctggcctcctgcccggtgcctactcctactcccacattgaaccaccgcaggtgctcggccaggtcaccatcgcctcgctgtcacaggaccaggagcgccaccagtcgtcgttcagcagcggcggggccggcgctggtggattgctggggagcgtgaagcaggagaaccagccgctgaggcccttcttcgacgagtggcctgggacgcgggactcgtggtcggagatggacgacgcgaggtccagtaggacctccttctcgacgacccagctctccatctccattccgatgcccagatgtgattgagaacgaagctcgtgcgcggccagtaggtggcgttgtcgcatgacgcgcacccagcatcgcgctcgctgctagcgagccaccgtcacccggtgattgatgccctcatcctagctatttgtttcgctgaatcgcattaagaacagaactctatgtaagagcaggatccttcctcatgtatcaatgggggcaatgaactccattctgtttctatggttgtagtaccgaccatgctttgtatttgttgtacccagaccgagaatgaaaaccgcccagtcgtcaggcgttgtcgtcgctgcatcagatgatccaagtgtattgtgtgctttccaggctgtgtaagatctgatggcgaatctgttactgcagtgtaggaaaagaaatgagaagaacagaaaaaagatgccccctttgtttttgctcgcacgaattcaacacggatgcg

SEQ ID NO: 79658 - DNA, 3066 bp, Zea Mays
tagagtccgggcaggcagccatctccgtcttctccgcgctctccatcctcggcgggcgggtgggaggggcgagtcgacgaccagcacgcgcgcgcgtccagcgcaaccgcgtcacggaaccctagcgtcgcctcgttcgctgcccaactctcctccagactccagtgcacagattatcagaatgcctcgaggacaaggctcttctgtgtcaacccgtgagaatcccaaagttgatcgggcaactgattcaaatgatgacagccgcaagaataggaggggtgcttatttgctactgggattgctgatagtgttccttcatggatcatggtctgtttatcagatccagtttggaagccttcctttgccccttgatgctgagcaggctggaaagaggggtttctcggaagcttcggcgctgaagcattatgtatatgcagtagcagaaaaaataaagaagacagctcattgggaggttgatgttcaattggagttgtttcacacagatataggcgcaaatcgtctatctggtggtcttttcaagggaaagactctcttgtattcagacttaaagcatgtgctattgagagttactcccaaatatttaccagaagctgaggaaaacttgattctggtttcttctcatattgacactgtttcgacaacggaaggagctggagattgcagttcatgtgtgggagtcatgttagagcttgcacggggagtggcccagtgggcacatgggtttaagagtggtatcttgtttttatttaatactggagaagaagagggtcttgatggcgcccatagttttataactcagcaccactggagaaattcagtaatatttgcggttgatctggaagctatgggtatcagtgggaaatccacactcttccagggtactgaccattgggcattggaaagctttgcagctgtagccaaatacccatctgctcagatagcttcacaggatgtttttagttctggcgcaataaaatctgctactgattttcaaatatatgaggaagttggccgtcttcctggacttgattttgcatataccgatacaacatctgtgtatcatacgaagaatgacaagatggcgcttctgaaaccagggtctcttcagcatattggagataacatgcttgctttcctactccattctgcagcatctccaaaatttttgaaagatgcacaacaaaggaagcaaggaaagacagagcaggatagagctgtttacttcgatatcctgggaaagtacatggtggtctatccgctgcgacttgctaccatgtttcacaactcaatcatattgcagtcacttctaatatggggaacatcattgcttatgggtggacaccctgcactggtgtcctttgcaatatcatgtttgagcatcattctaatgtggatattttctatctgcttaccagttgtggtagcatttgctctgccctatatgtgtccgtttcctattccatatgttgcaaatccatggttaactattggcttatttggttcacctgcactgcttggagcatttattggtcagcatattggatttattctcctgaagaggcatcttcgacgcgtgcattccaaagcaaaaacaggcataactcctagcatgatagaaaatgttactgacctggaagctgagaggtggatttttaaatctggttttgtccagtggttaatagctctgatactaggaacatatttcaaggttggatcatcgtatatagcactcatctggcttgtttctcctgcttttgcatatggttttttggaagctactctctcccctgttcggctacctaaacagcttaaggttgtcacgttggttgtgggtttggttgcaccagttgtgtcttctgctggtttggctgttcgtatggcggatgtaattgttggaagtatagtacgtattgacaggaatcctggcggactaccagactggcttggaaatgtaatagtttcggttgccattgctgttgtcgtttgttccacgtttgtgtatctgctttcatacattcatatctcaggtgataaaagaattctgggtttgctattatccttatcctttggtctttcaattgctttggcatcaagtggcattgtgccagcatttacggaggatgtcgctcgatctgtaaacgttgtacatgtcgtcgataccacaggagtacatggcgggcatatagaaccagtatcctatatctctttgttttccaatacacctggaaagctgacgaatgaattagtggaccttggaggcgaagaattttcttgcggaaggaacatgactactgacttggtaacatttacagtgaagtatggctgttggagttacaaagagagcagtaccggatggagcaggtctgaggttcctgtgctccttgtagaaagtgattcggttataggtggtgctcgacagacagtagtatcagtggataccaagtcatcgacgcgttggacgcttggaatcaacaaagatggaatcgatgacttcacagttcaagtggattcggagaagatagtcctacctggtgataagagcgagatagatgggtggcatacaatccagtttgcagggggcaagaactcgccgacgaagttccagctgacgctatactggtcgtctagcaaaccatctgagagagaagctaaacaagcagcggacgctcctttgctggtgaaactaagaacagatgtgaatagagtcacaccgcaggtggcaagggtggtggagaagctgccacggtggtgcacgcccttcggcaagtccacctctccgtacacgctagctttcttgacggccctccgtgtcgatatttagtcagtcagcagcatttgtttcccatacataggcgtccagtccagcacctttcgttttgaactgtattttagtttgatagtagcaagttataggcccatagaattgtacacaaaagctgccaagggcggtctggtgtaaacgtgctttgcacttgctctaatttgtcctgtatcaaagtttcagattagtttgtggtatttgtgtgtaccattcctgcccccatc

SEQ ID NO: 79659 - DNA, 3542 bp, Zea Mays
tagagtccgggcaggcagccatctccgtcttctccgcgctctccatcctcggcgggcgggtgggaggggcgagtcgacgaccagcacgcgcgcgcgtccagcgcaaccgcgtcacggaaccctagcgtcgcctcgttcgctgcccaactctcctccagactccagtgcacagattatcagaatgcctcgaggacaaggctcttctgtgtcaacccgtgagaatcccaaagttgatcgggcaactgattcaaatgatgacagccgcaagaataggaggggtgcttatttgctactgggattgctgatagtgttccttcatggatcatggtctgtttatcagatccagtttggaagccttcctttgccccttgatgctgagcaggctggaaagaggggtttctcggaagcttcggcgctgaagcatgtaaagtatttgacaggcttgggtcctcacccagtcggttcagatcccctcgatcatgctattcaggttgctcattcgtgcagcctactttcacagttttaacacttgcgatcttctagtttctacagcatagaattagtttcattaagcccaccatgaaatatgtcttaattgtgccttttgtttagttttgtagatgttaatagatttttctatgagtttgatcaaaattagagtagttaatggctgctaggctgctgcgaatccagtaacaagaaaatccaaattgaagttacgattcatccatttaattcttcttgtctcttttttacatgttcatgatttgccattttctttcttacccacaatagtgttgtctatgcaccataatacatggtaattaacattagtgaagctgagtctttttttttgttgaactctgtatcctatcctattttgacatgcccatggtgtagtatgtatatgcagtagcagaaaaaataaagaagacagctcattgggaggttgatgttcaattggagttgtttcacacagatataggcgcaaatcgtctatctggtggtcttttcaagggaaagactctcttgtattcagacttaaagcatgtgctattgagagttactcccaaatatttaccagaagctgaggaaaacttgattctggtttcttctcatattgacactgtttcgacaacggaaggagctggagattgcagttcatgtgtgggagtcatgttagagcttgcacggggagtggcccagtgggcacatgggtttaagagtggtatcttgtttttatttaatactggagaagaagagggtcttgatggcgcccatagttttataactcagcaccactggagaaattcagtaatatttgcggttgatctggaagctatgggtatcagtgggaaatccacactcttccagggtactgaccattgggcattggaaagctttgcagctgtagccaaatacccatctgctcagatagcttcacaggatgtttttagttctggcgcaataaaatctgctactgattttcaaatatatgaggaagttggccgtcttcctggacttgattttgcatataccgatacaacatctgtgtatcatacgaagaatgacaagatggcgcttctgaaaccagggtctcttcagcatattggagataacatgcttgctttcctactccattctgcagcatctccaaaatttttgaaagatgcacaacaaaggaagcaaggaaagacagagcaggatagagctgtttacttcgatatcctgggaaagtacatggtggtctatccgctgcgacttgctaccatgtttcacaactcaatcatattgcagtcacttctaatatggggaacatcattgcttatgggtggacaccctgcactggtgtcctttgcaatatcatgtttgagcatcattctaatgtggatattttctatctgcttaccagttgtggtagcatttgctctgccctatatgtgtccgtttcctattccatatgttgcaaatccatggttaactattggcttatttggttcacctgcactgcttggagcatttattggtcagcatattggatttattctcctgaagaggcatcttcgacgcgtgcattccaaagcaaaaacaggcataactcctagcatgatagaaaatgttactgacctggaagctgagaggtggatttttaaatctggttttgtccagtggttaatagctctgatactaggaacatatttcaaggttggatcatcgtatatagcactcatctggcttgtttctcctgcttttgcatatggttttttggaagctactctctcccctgttcggctacctaaacagcttaaggttgtcacgttggttgtgggtttggttgcaccagttgtgtcttctgctggtttggctgttcgtatggcggatgtaattgttggaagtatagtacgtattgacaggaatcctggcggactaccagactggcttggaaatgtaatagtttcggttgccattgctgttgtcgtttgttccacgtttgtgtatctgctttcatacattcatatctcaggtgataaaagaattctgggtttgctattatccttatcctttggtctttcaattgctttggcatcaagtggcattgtgccagcatttacggaggatgtcgctcgatctgtaaacgttgtacatgtcgtcgataccacaggagtacatggcgggcatatagaaccagtatcctatatctctttgttttccaatacacctggaaagctgacgaatgaattagtggaccttggaggcgaagaattttcttgcggaaggaacatgactactgacttggtaacatttacagtgaagtatggctgttggagttacaaagagagcagtaccggatggagcaggtctgaggttcctgtgctccttgtagaaagtgattcggttataggtggtgctcgacagacagtagtatcagtggataccaagtcatcgacgcgttggacgcttggaatcaacaaagatggaatcgatgacttcacagttcaagtggattcggagaagatagtcctacctggtgataagagcgagatagatgggtggcatacaatccagtttgcagggggcaagaactcgccgacgaagttccagctgacgctatactggtcgtctagcaaaccatctgagagagaagctaaacaagcagcggacgctcctttgctggtgaaactaagaacagatgtgaatagagtcacaccgcaggtggcaagggtggtggagaagctgccacggtggtgcacgcccttcggcaagtccacctctccgtacacgctagctttcttgacggccctccgtgtcgatatttagtcagtcagcagcatttgtttcccatacataggcgtccagtccagcacctttcgttttgaactgtattttagtttgatagtagcaagttataggcccatagaattgtacacaaaagctgccaagggcggtctggtgtaaacgtgctttgcacttgctctaatttgtcctgtatcaaagtttcagattagtttgtggtatttgtgtgtaccattcctgcccccatc

SEQ ID NO: 79660 - DNA, 3248 bp, Zea Mays
tagagtccgggcaggcagccatctccgtcttctccgcgctctccatcctcggcgggcgggtgggaggggcgagtcgacgaccagcacgcgcgcgcgtccagcgcaaccgcgtcacggaaccctagcgtcgcctcgttcgctgcccaactctcctccagactccagtgcacaggtctccatcacggggaattctcatatagcaagtcgtcgtcctcgtcctcgtcctcgtcctctcctccggtgggtggatcggccatcgcgccgggccgggcgggcatacctacgtacacactccccggttcccgtccccgtccccgtcccgcattcgattggttccttcgtcttcgtctgccgattatcagaatgcctcgaggacaaggctcttctgtgtcaacccgtgagaatcccaaagttgatcgggcaactgattcaaatgatgacagccgcaagaataggaggggtgcttatttgctactgggattgctgatagtgttccttcatggatcatggtctgtttatcagatccagtttggaagccttcctttgccccttgatgctgagcaggctggaaagaggggtttctcggaagcttcggcgctgaagcattatgtatatgcagtagcagaaaaaataaagaagacagctcattgggaggttgatgttcaattggagttgtttcacacagatataggcgcaaatcgtctatctggtggtcttttcaagggaaagactctcttgtattcagacttaaagcatgtgctattgagagttactcccaaatatttaccagaagctgaggaaaacttgattctggtttcttctcatattgacactgtttcgacaacggaaggagctggagattgcagttcatgtgtgggagtcatgttagagcttgcacggggagtggcccagtgggcacatgggtttaagagtggtatcttgtttttatttaatactggagaagaagagggtcttgatggcgcccatagttttataactcagcaccactggagaaattcagtaatatttgcggttgatctggaagctatgggtatcagtgggaaatccacactcttccagggtactgaccattgggcattggaaagctttgcagctgtagccaaatacccatctgctcagatagcttcacaggatgtttttagttctggcgcaataaaatctgctactgattttcaaatatatgaggaagttggccgtcttcctggacttgattttgcatataccgatacaacatctgtgtatcatacgaagaatgacaagatggcgcttctgaaaccagggtctcttcagcatattggagataacatgcttgctttcctactccattctgcagcatctccaaaatttttgaaagatgcacaacaaaggaagcaaggaaagacagagcaggatagagctgtttacttcgatatcctgggaaagtacatggtggtctatccgctgcgacttgctaccatgtttcacaactcaatcatattgcagtcacttctaatatggggaacatcattgcttatgggtggacaccctgcactggtgtcctttgcaatatcatgtttgagcatcattctaatgtggatattttctatctgcttaccagttgtggtagcatttgctctgccctatatgtgtccgtttcctattccatatgttgcaaatccatggttaactattggcttatttggttcacctgcactgcttggagcatttattggtcagcatattggatttattctcctgaagaggcatcttcgacgcgtgcattccaaagcaaaaacaggcataactcctagcatgatagaaaatgttactgacctggaagctgagaggtggatttttaaatctggttttgtccagtggttaatagctctgatactaggaacatatttcaaggttggatcatcgtatatagcactcatctggcttgtttctcctgcttttgcatatggttttttggaagctactctctcccctgttcggctacctaaacagcttaaggttgtcacgttggttgtgggtttggttgcaccagttgtgtcttctgctggtttggctgttcgtatggcggatgtaattgttggaagtatagtacgtattgacaggaatcctggcggactaccagactggcttggaaatgtaatagtttcggttgccattgctgttgtcgtttgttccacgtttgtgtatctgctttcatacattcatatctcaggtgataaaagaattctgggtttgctattatccttatcctttggtctttcaattgctttggcatcaagtggcattgtgccagcatttacggaggatgtcgctcgatctgtaaacgttgtacatgtcgtcgataccacaggagtacatggcgggcatatagaaccagtatcctatatctctttgttttccaatacacctggaaagctgacgaatgaattagtggaccttggaggcgaagaattttcttgcggaaggaacatgactactgacttggtaacatttacagtgaagtatggctgttggagttacaaagagagcagtaccggatggagcaggtctgaggttcctgtgctccttgtagaaagtgattcggttataggtggtgctcgacagacagtagtatcagtggataccaagtcatcgacgcgttggacgcttggaatcaacaaagatggaatcgatgacttcacagttcaagtggattcggagaagatagtcctacctggtgataagagcgagatagatgggtggcatacaatccagtttgcagggggcaagaactcgccgacgaagttccagctgacgctatactggtcgtctagcaaaccatctgagagagaagctaaacaagcagcggacgctcctttgctggtgaaactaagaacagatgtgaatagagtcacaccgcaggtggcaagggtggtggagaagctgccacggtggtgcacgcccttcggcaagtccacctctccgtacacgctagctttcttgacggccctccgtgtcgatatttagtcagtcagcagcatttgtttcccatacataggcgtccagtccagcacctttcgttttgaactgtattttagtttgatagtagcaagttataggcccatagaattgtacacaaaagctgccaagggcggtctggtgtaaacgtgctttgcacttgctctaatttgtcctgtatcaaagtttcagattagtttgtggtatttgtgtgtaccattcctgcccccatc

SEQ ID NO: 79661 - DNA, 3038 bp, Zea Mays
tagagtccgggcaggcagccatctccgtcttctccgcgctctccatcctcggcgggcgggtgggaggggcgagtcgacgaccagcacgcgcgcgcgtccagcgcaaccgcgtcacggaaccctagcgtcgcctcgttcgctgcccaactctcctccagactccagtgcacagattatcagaatgcctcgaggacaaggctcttctgtgtcaacccgtgagaatcccaaagttgatcgggcaactgattcaaatgatgacagccgcaagaataggaggggtgcttatttgctactgggattgctgatagtgttccttcatggatcatggtctgtttatcagatccagtttggaagccttcctttgccccttgatgctgagcaggctggaaagaggggtttctcggaagcttcggcgctgaagcattatgtatatgcagtagcagaaaaaataaagaagacagctcattgggaggttgatgttcaattggagttgtttcacacagatataggcgcaaatcgtctatctggtggtcttttcaagggaaagactctcttgtattcagacttaaagcatgtgctattgagagttactcccaaatatttaccagaagctgaggaaaacttgattctggtttcttctcatattgacactgtttcgacaacggaaggagctggagattgcagttcatgtgtgggagtcatgttagagcttgcacggggagtggcccagtgggcacatgggtttaagagtggtatcttgtttttatttaatactggagaagaagagggtcttgatggcgcccatagttttataactcagcaccactggagaaattcagtaatatttgcggttgatctggaagctatgggtatcagtgggaaatccacactcttccagggtactgaccattgggcattggaaagctttgcagctgtagccaaatacccatctgctcagatagcttcacaggatgtttttagttctggcgcaataaaatctgctactgattttcaaatatatgaggaagttggccgtcttcctggacttgattttgcatataccgatacaacatctgtgtatcatacgaagggtctcttcagcatattggagataacatgcttgctttcctactccattctgcagcatctccaaaatttttgaaagatgcacaacaaaggaagcaaggaaagacagagcaggatagagctgtttacttcgatatcctgggaaagtacatggtggtctatccgctgcgacttgctaccatgtttcacaactcaatcatattgcagtcacttctaatatggggaacatcattgcttatgggtggacaccctgcactggtgtcctttgcaatatcatgtttgagcatcattctaatgtggatattttctatctgcttaccagttgtggtagcatttgctctgccctatatgtgtccgtttcctattccatatgttgcaaatccatggttaactattggcttatttggttcacctgcactgcttggagcatttattggtcagcatattggatttattctcctgaagaggcatcttcgacgcgtgcattccaaagcaaaaacaggcataactcctagcatgatagaaaatgttactgacctggaagctgagaggtggatttttaaatctggttttgtccagtggttaatagctctgatactaggaacatatttcaaggttggatcatcgtatatagcactcatctggcttgtttctcctgcttttgcatatggttttttggaagctactctctcccctgttcggctacctaaacagcttaaggttgtcacgttggttgtgggtttggttgcaccagttgtgtcttctgctggtttggctgttcgtatggcggatgtaattgttggaagtatagtacgtattgacaggaatcctggcggactaccagactggcttggaaatgtaatagtttcggttgccattgctgttgtcgtttgttccacgtttgtgtatctgctttcatacattcatatctcaggtgataaaagaattctgggtttgctattatccttatcctttggtctttcaattgctttggcatcaagtggcattgtgccagcatttacggaggatgtcgctcgatctgtaaacgttgtacatgtcgtcgataccacaggagtacatggcgggcatatagaaccagtatcctatatctctttgttttccaatacacctggaaagctgacgaatgaattagtggaccttggaggcgaagaattttcttgcggaaggaacatgactactgacttggtaacatttacagtgaagtatggctgttggagttacaaagagagcagtaccggatggagcaggtctgaggttcctgtgctccttgtagaaagtgattcggttataggtggtgctcgacagacagtagtatcagtggataccaagtcatcgacgcgttggacgcttggaatcaacaaagatggaatcgatgacttcacagttcaagtggattcggagaagatagtcctacctggtgataagagcgagatagatgggtggcatacaatccagtttgcagggggcaagaactcgccgacgaagttccagctgacgctatactggtcgtctagcaaaccatctgagagagaagctaaacaagcagcggacgctcctttgctggtgaaactaagaacagatgtgaatagagtcacaccgcaggtggcaagggtggtggagaagctgccacggtggtgcacgcccttcggcaagtccacctctccgtacacgctagctttcttgacggccctccgtgtcgatatttagtcagtcagcagcatttgtttcccatacataggcgtccagtccagcacctttcgttttgaactgtattttagtttgatagtagcaagttataggcccatagaattgtacacaaaagctgccaagggcggtctggtgtaaacgtgctttgcacttgctctaatttgtcctgtatcaaagtttcagattagtttgtggtatttgtgtgtaccattcctgcccccatc

SEQ ID NO: 79662 - DNA, 3132 bp, Zea Mays
tagagtccgggcaggcagccatctccgtcttctccgcgctctccatcctcggcgggcgggtgggaggggcgagtcgacgaccagcacgcgcgcgcgtccagcgcaaccgcgtcacggaaccctagcgtcgcctcgttcgctgcccaactctcctccagactccagtgcacagattatcagaatgcctcgaggacaaggctcttctgtgtcaacccgtgagaatcccaaagttgatcgggcaactgattcaaatgatgacagccgcaagaataggaggggtgcttatttgctactgggattgctgatagtgttccttcatggatcatggtctgtttatcagatccagtttggaagccttcctttgccccttgatgctgagcaggctggaaagaggggtttctcggaagcttcggcgctgaagcatgtaaagtatttgacaggcttgggtcctcacccagtcggttcagatcccctcgatcatgctattcagtatgtatatgcagtagcagaaaaaataaagaagacagctcattgggaggttgatgttcaattggagttgtttcacacagatataggcgcaaatcgtctatctggtggtcttttcaagggaaagactctcttgtattcagacttaaagcatgtgctattgagagttactcccaaatatttaccagaagctgaggaaaacttgattctggtttcttctcatattgacactgtttcgacaacggaaggagctggagattgcagttcatgtgtgggagtcatgttagagcttgcacggggagtggcccagtgggcacatgggtttaagagtggtatcttgtttttatttaatactggagaagaagagggtcttgatggcgcccatagttttataactcagcaccactggagaaattcagtaatatttgcggttgatctggaagctatgggtatcagtgggaaatccacactcttccagggtactgaccattgggcattggaaagctttgcagctgtagccaaatacccatctgctcagatagcttcacaggatgtttttagttctggcgcaataaaatctgctactgattttcaaatatatgaggaagttggccgtcttcctggacttgattttgcatataccgatacaacatctgtgtatcatacgaagaatgacaagatggcgcttctgaaaccagggtctcttcagcatattggagataacatgcttgctttcctactccattctgcagcatctccaaaatttttgaaagatgcacaacaaaggaagcaaggaaagacagagcaggatagagctgtttacttcgatatcctgggaaagtacatggtggtctatccgctgcgacttgctaccatgtttcacaactcaatcatattgcagtcacttctaatatggggaacatcattgcttatgggtggacaccctgcactggtgtcctttgcaatatcatgtttgagcatcattctaatgtggatattttctatctgcttaccagttgtggtagcatttgctctgccctatatgtgtccgtttcctattccatatgttgcaaatccatggttaactattggcttatttggttcacctgcactgcttggagcatttattggtcagcatattggatttattctcctgaagaggcatcttcgacgcgtgcattccaaagcaaaaacaggcataactcctagcatgatagaaaatgttactgacctggaagctgagaggtggatttttaaatctggttttgtccagtggttaatagctctgatactaggaacatatttcaaggttggatcatcgtatatagcactcatctggcttgtttctcctgcttttgcatatggttttttggaagctactctctcccctgttcggctacctaaacagcttaaggttgtcacgttggttgtgggtttggttgcaccagttgtgtcttctgctggtttggctgttcgtatggcggatgtaattgttggaagtatagtacgtattgacaggaatcctggcggactaccagactggcttggaaatgtaatagtttcggttgccattgctgttgtcgtttgttccacgtttgtgtatctgctttcatacattcatatctcaggtgataaaagaattctgggtttgctattatccttatcctttggtctttcaattgctttggcatcaagtggcattgtgccagcatttacggaggatgtcgctcgatctgtaaacgttgtacatgtcgtcgataccacaggagtacatggcgggcatatagaaccagtatcctatatctctttgttttccaatacacctggaaagctgacgaatgaattagtggaccttggaggcgaagaattttcttgcggaaggaacatgactactgacttggtaacatttacagtgaagtatggctgttggagttacaaagagagcagtaccggatggagcaggtctgaggttcctgtgctccttgtagaaagtgattcggttataggtggtgctcgacagacagtagtatcagtggataccaagtcatcgacgcgttggacgcttggaatcaacaaagatggaatcgatgacttcacagttcaagtggattcggagaagatagtcctacctggtgataagagcgagatagatgggtggcatacaatccagtttgcagggggcaagaactcgccgacgaagttccagctgacgctatactggtcgtctagcaaaccatctgagagagaagctaaacaagcagcggacgctcctttgctggtgaaactaagaacagatgtgaatagagtcacaccgcaggtggcaagggtggtggagaagctgccacggtggtgcacgcccttcggcaagtccacctctccgtacacgctagctttcttgacggccctccgtgtcgatatttagtcagtcagcagcatttgtttcccatacataggcgtccagtccagcacctttcgttttgaactgtattttagtttgatagtagcaagttataggcccatagaattgtacacaaaagctgccaagggcggtctggtgtaaacgtgctttgcacttgctctaatttgtcctgtatcaaagtttcagattagtttgtggtatttgtgtgtaccattcctgcccccatc

SEQ ID NO: 79663 - DNA, 3301 bp, Zea Mays
tagagtccgggcaggcagccatctccgtcttctccgcgctctccatcctcggcgggcgggtgggaggggcgagtcgacgaccagcacgcgcgcgcgtccagcgcaaccgcgtcacggaaccctagcgtcgcctcgttcgctgcccaactctcctccagactccagtgcacaggtctccatcacggggaattctcatatagcaagtcgtcgtcctcgtcctcgtcctcgtcctctcctccggtgggtggatcggccatcgcgccgggccgggcgggcatacctacgtacacactccccggttcccgtccccgtccccgtcccgcattcgattggttccttcgtcttcgtctgccgattatcagaatgcctcgaggacaaggctcttctgtgtcaacccgtgagaatcccaaagttgatcgggcaactgattcaaatgatgacagccgcaagaataggaggggtgcttatttgctactgggattgctgatagtgttccttcatggatcatggtctgtttatcagatccagtttggaagccttcctttgccccttgatgctgagcaggctggaaagaggggtttctcggaagcttcggcgctgaagcatgtaaagtatttgacaggcttgggtcctcacccagtcggttcagatcccctcgatcatgctattcagtagcagaaaaaataaagaagacagctcattgggaggttgatgttcaattggagttgtttcacacagatataggcgcaaatcgtctatctggtggtcttttcaagggaaagactctcttgtattcagacttaaagcatgtgctattgagagttactcccaaatatttaccagaagctgaggaaaacttgattctggtttcttctcatattgacactgtttcgacaacggaaggagctggagattgcagttcatgtgtgggagtcatgttagagcttgcacggggagtggcccagtgggcacatgggtttaagagtggtatcttgtttttatttaatactggagaagaagagggtcttgatggcgcccatagttttataactcagcaccactggagaaattcagtaatatttgcggttgatctggaagctatgggtatcagtgggaaatccacactcttccagggtactgaccattgggcattggaaagctttgcagctgtagccaaatacccatctgctcagatagcttcacaggatgtttttagttctggcgcaataaaatctgctactgattttcaaatatatgaggaagttggccgtcttcctggacttgattttgcatataccgatacaacatctgtgtatcatacgaagaatgacaagatggcgcttctgaaaccagggtctcttcagcatattggagataacatgcttgctttcctactccattctgcagcatctccaaaatttttgaaagatgcacaacaaaggaagcaaggaaagacagagcaggatagagctgtttacttcgatatcctgggaaagtacatggtggtctatccgctgcgacttgctaccatgtttcacaactcaatcatattgcagtcacttctaatatggggaacatcattgcttatgggtggacaccctgcactggtgtcctttgcaatatcatgtttgagcatcattctaatgtggatattttctatctgcttaccagttgtggtagcatttgctctgccctatatgtgtccgtttcctattccatatgttgcaaatccatggttaactattggcttatttggttcacctgcactgcttggagcatttattggtcagcatattggatttattctcctgaagaggcatcttcgacgcgtgcattccaaagcaaaaacaggcataactcctagcatgatagaaaatgttactgacctggaagctgagaggtggatttttaaatctggttttgtccagtggttaatagctctgatactaggaacatatttcaaggttggatcatcgtatatagcactcatctggcttgtttctcctgcttttgcatatggttttttggaagctactctctcccctgttcggctacctaaacagcttaaggttgtcacgttggttgtgggtttggttgcaccagttgtgtcttctgctggtttggctgttcgtatggcggatgtaattgttggaagtatagtacgtattgacaggaatcctggcggactaccagactggcttggaaatgtaatagtttcggttgccattgctgttgtcgtttgttccacgtttgtgtatctgctttcatacattcatatctcaggtgataaaagaattctgggtttgctattatccttatcctttggtctttcaattgctttggcatcaagtggcattgtgccagcatttacggaggatgtcgctcgatctgtaaacgttgtacatgtcgtcgataccacaggagtacatggcgggcatatagaaccagtatcctatatctctttgttttccaatacacctggaaagctgacgaatgaattagtggaccttggaggcgaagaattttcttgcggaaggaacatgactactgacttggtaacatttacagtgaagtatggctgttggagttacaaagagagcagtaccggatggagcaggtctgaggttcctgtgctccttgtagaaagtgattcggttataggtggtgctcgacagacagtagtatcagtggataccaagtcatcgacgcgttggacgcttggaatcaacaaagatggaatcgatgacttcacagttcaagtggattcggagaagatagtcctacctggtgataagagcgagatagatgggtggcatacaatccagtttgcagggggcaagaactcgccgacgaagttccagctgacgctatactggtcgtctagcaaaccatctgagagagaagctaaacaagcagcggacgctcctttgctggtgaaactaagaacagatgtgaatagagtcacaccgcaggtggcaagggtggtggagaagctgccacggtggtgcacgcccttcggcaagtccacctctccgtacacgctagctttcttgacggccctccgtgtcgatatttagtcagtcagcagcatttgtttcccatacataggcgtccagtccagcacctttcgttttgaactgtattttagtttgatagtagcaagttataggcccatagaattgtacacaaaagctgccaagggcggtctggtgtaaacgtgctttgcacttgctctaatttgtcctgtatcaaagtttcagattagtttgtggtatttgtgtgtaccattcctgcccccatc

SEQ ID NO: 79664 - DNA, 2072 bp, Zea Mays
gcgaggcccaaatccgaggtccgtttgaggcaatccgctccgcggccgcgcttatcccctccggccggccctctgcggctctgccacatcttaactttgcctcgctcgaaacccaagtcggaagccctcaggcgtagcgcgtccatggcgtccaccgcgctggtggcagtggcagtggggggcgccatttctctcggtctcgtcgcctcctctggcgtcgcgtcctgctccctgcgcgccggcggcgactcccggcggtttggcccccgactcgtcctcctgcggagaggaggcgccgaggtgagagttttcgtcttccccgtccctcctacctccccttgccattccattacttggtagcttcgaatcgggaggtacttgtctttgtttcgttatctgtgcgctatttagtatatttgcaactctgtctgccgaagcagaggggggtgtttgaatgcactagaactaatagttagtggctaaaattagttgaagacatctaaacatcctagctaatagtttaactattaggtatttttagtaaattagttaatagttagctctctttttgttagctagctaattccagtagcaattttttagctaactaattattagcttcatgtcaagttgtaccatttttcttttgccaaggaggtctcctgacttaactgcaaggctaatttgatgtgattgagtgaatccttttgatcagggggaggggacgaggacacggaattgcccaatatttcgttgtgccaataaggtggacgttgtgaccgaggatgacagcgtcgatggtgacgttaccgacgatggagaagaccttgaggatgcagctgatgacgccattgatgctgatgttggtaccgaagatgaactggagtcttcgctgcctgaggatgttgagtggataaagcagcagccacttccttatcctttggatgctctggagccatacataagcaaggagacggtggagcagcactggggagttcaccagcagattcacgtggaccggctcaatggcatgatcggtggcagcgagtgggaaggcatgtcgctggggcagatgatgctcgcctccttcaatgagggcagggagcagccccatcctcccttcttccatgccgcacaggtatggaaccatgatttctattggcgatccatgaaacctggtggcgggggcaagccaccggaacggctcctgaagtttatcaatagagactttggctcccacgagggtatgatccggcaattcatggatgctgcactaactcagttcggttctggatgggtttggctttcctacaaaggaagcgggttgccttatgtgaaatcgagaagccccatcccatcggacaaccatggtaggctggtgatctcaaagactccaaatgccatcaaccctcttgtctggggccactctccactcctcgcgattgatgtttgggagcatgcatactatctggattacgaggatcgaagggctgactatgtttctgcgattctggagaagcttgtgtcgtgggaaacagtcgagtccaggctcgcgaaagccgttgcacgggcggtagaaagagatgagcatctccgcagaaggattctaaggaaacagcgtttagctcaggcaaacggacagagcagagctaggtctcgcgctcggcaagggaggcaaggagaccaggaagtcgccaggagccgtcccgtggaggcatgacaacgcagctggtaaatggggtgcatcaggacaccgttatgtagctgaatggcgatcaaccttttccctggtgacagtcttgagagcttgcatggtcatattggtctgttttaggccgcatccaccctcagcactgcgaggagggtgggataagttttgctaagtaggattaggggtagaggtagagatgtaaaatagacagaatttcgtcagacttggactcttggagaattcgttttgctcgttattctttgtgggatgtgagtgacaatgtaagaggacatgattgtgtgttctgatttctacaatccagtgctcggttttggtgaaatatatggatttaagatctcaa

SEQ ID NO: 79665 - DNA, 907 bp, Zea Mays
gtgccgtgtttgggttgtggagcaaaacctgctgtgtggtttaatttgtgacctcgccgtcgccggccggttcggttgttgcttgcttggtggcaacaagctcagtctctctggattaggtgggatggtaccgcccagcgtcgtcgctgatgtatggatggagtccgtggttcaggttccatccagagccaacgagacggaggagttcgaggagcacgccgagaaggccaagaccctgcctgccaccacgacgaacgagagcaagctcgtcctctacggcctctacaagcaggccaccgtcggcgacgtcagcaccggtcgtcctggcatcttcagcctgaaagagagagccaaatgggatgcttggaaggctgttgaagggaaatccaaggacgaagcaatggccgactacatcaccaaggtgaagcagctgctggaggccgccgccgcatccacctcctaggctactcaagggaaaacaaaaaccatgatccgcagtcgcatatacgtatacatgttgtcatgatatacgctcgccaataaatcttatcattgttgtactgcttggtatggcttctgatgccatatatactcatcacccttcaaactaaggctgtaaactcttgcgaaaacaaactggatgtccctgtgatactagcatatgctgaaatgtttaggctgggtcccactaacatcggcgtcgacggatgacatggcagtcgttattgcccggttggtctaaatgtcaactggtctgcgctttcgaccagttgacccgatcgataaccggattgattggtatcgacctgcctgctagagaattggttgatgctgattttgatagagaattggttgatgtcgattttgatcgatcgataccaatcatttgttgctatacaacaatttc

SEQ ID NO: 79666 - DNA, 2333 bp, Zea Mays
aaattccagttgctcgctccactccactcccctcccccggtcccgttccgtcggcggccggacaaaaccgccagactctctcgtcccccggcccggccctcccagacccagttccatccttttgcttgcttgcggttgcgggcaaccgctgtgatagagcgagcgaccgacctgtagtacgggagagggttggaaggagcgaaaggagagagaggttggtggttgtttggtggaggagaatagttggttgtcttcagggagggagagagggaaagatggagcgcaaggcggtggtggtgtgcgcggtggtcggcttcctcggcgtcctcgcggcggcgctcggcttcgcggcggaggccacccgcgtcaaggtttcggacgttcaaacaagcggcagtcctggtgaatgcatatacccaagaaccccagccttggcactgggtttaatatctgccgcctctcttatgctcgcccagtccatcataaacgcagtcgctggttgcatctgttgcaagaagtctatggttggttcggttggttgtgcttggtctgtataggttgcaggttagaacagtagccgtcgccattgctgttatagctagatcctgttctttttgtttttgttctacttgtaccctcgtgtttgtcgagcatggaatgtttggttctgaatgaactgggtaatgttgaagagagcctgcttgtttcgtgttctgtaaacgtgggggctcgccggcatgaagtgcttccctttcgtcgacctccgcagcattcgctcactagatatcctcgtgtctgttacaaaatattgtatattgtatatgtgaccaatccaaagggtgcgacagattctccctaagggacataccccttgagagacaccccttcacatgtatataatcaggactctcctgcaataataaaggacaactgtcatttgcactgttcctctgttcacttgttttccactgagttacaacacgttatcagcacgaactctctccactgaacgaggaaaagtcttgcgtgtgcaccagcgacggcggttaccggatcgtcttcggcaacagtgaacatgacgatgtgcaggcaggctgatgatgtgcaagcacggatgcagtggttcatggcgttggccacgtgaacaaccaaaaagtaaatctctattatattcaggtttgagatttaccttttgatctagcaaattaaatatgcatgtttgctctaccaacgttgtgccgctacccatctcggtatgcattccagtgattgggatgtgtcgcttccgttcgcacgtccacgcatggcagcgacggcgagtctgcggcaacagcgaaatgcactccgcgggccacgcatgcagcaaacgctatgccgctggcggggctgagaagcccaccaccgtaatggtgcagttgcaccggaccatgcaatggtgcggttgcaggcttgcagcagcgctcgcatgcgtgttcggacccgagcggcgtaggaggttgggcattggctggggctgttgcgcccgtactgggccgtcacatggtcggagcccatgctggaggaggacgccggggccgcgcaccggagtgtgttgtggccggcaaagccagcctcggagccgtgcccggccgaagcgccagcgtcgggacgccgagccaccaggggccgctcccgcgcacccgcacaggggctgcgcgcagccaccgccggctgtgcgcccgttggggagcgcctgcagtgtggccgtcgtagggcggcgtgccccgatgacggggccacgacaccggtggccacgcccgcgtccgcagggctgctagggccagggtcgccgtgcccaggccgcaccatggccgcgcccgcgcgtgcaatgctgctggggccggagtcgccgtgcccaggccgcaccatggccggatcccgtgcctggccgcatgccgcgccatcggcagtggccgccggggcttggccggagcaaacaccatggcggcggctgcaagaaggtaggagcggttagggtttccaatacccttaataccgtgtctggccgcctggccatgcttgggccgcaccaggcctcatgggctggccgcgcctggccgcgtgggtcgcgccagaccgcctagatgcttggaccgcttgggccgtgcctggcttggctgagccgcccggccacatgtatgactggctaaatttactcattattttctgcaaatttaattacaagactctatgatgtatcacagtttcaatcagtatttagtatctaaatttgaatatttagactgctgatgatatatataattgtgatagtcatctgtttttattataaaaaa

SEQ ID NO: 79667 - DNA, 855 bp, Zea Mays
ggagccaagaaagttattaggaagaaggtgctggacaagagaagtgctgctttggcttaccaagaaaagaggtgtctcatatcggtgattcagcagctagctctcgattttggggcaatcaagaggtgaaattgcgaagaacatgagtaccacaactgccaagggaaaaggagaacctcaaaatgcaaatgatgcaccactcgatgttcagcccttaacaatagcgtatccgggggaaccagtggtctgcacaccaagacccatcgtgtcgcatcctgcatataatggtggatggaaggttctccgccacatcaggccaaatggaagatctgatttcacattcattcatcaaacccatggcaaattccgctccaaaaaacaagttcttaatcatctgaattgtctgttgaggggaaaggggaaggattcagcagatgaggctaagcagggttgtggcgctaatcagcaagctcaaggaatgggtggtgctccatcaagtgctagtcttctattggctgaaggaaaacctcctacagtgacgatgatgaatcaaccagctgaataaagttgcgctacatctgctagtaattcagtcagcggaatgagcaatgaatcatgctgaaggaagttgtgctagctgtatcttctagctattcaatcagtggaattggtggtacctagactattaaaaaacaatgttaactcatttaattttaaggacccaacagtaagatttgttatgttgatgtgtgtactagcatatatattcccagtattgttgctgcttctcacaatgttgttgacgctctaaatgctagtaatattgcaccacaattaattttgtgttaaacattt

SEQ ID NO: 79668 - DNA, 724 bp, Zea Mays
ggaagaaggtgctggacaagagaagtgctgctttggcttaccaagaaaagaggtgtctcatatcggtgattcagcagctagctctcgattttggggcaatcaagaggtgaaattgcgaagaacatgagtaccacaactgccaagggaaaaggagaacctcaaaatgcaaatgatgcaccactcgatgttcagcccttaacaatagcgtatccgggggaaccagtggtctgcacaccaagacccatcgtgtcgcatcctgcatataatggtggatggaaggttctccgccacatcaggccaaatggaagatctgatttcgtttgaaccattgacgacaatggtgcataacgaaagaaggcggcaacaattgatttacaccactccccttgcaacgaatttgaagttggtgagactccaagattatgttgaaactccaagagtagcaaggatgaaagccctttggtgagatattcgcaaaccaggatgaagtaggaatatgcaggacacaaacttaaccaagaggcactcgttataggcgaagtggagattggtctcaacatactttgtgcactgatgtttactaaattggtcaagagggagtggcgaccgataggccgggtcgtcgagctgggtgcgctactcgcctgtgctgcaccggaggatgaaagcggatgggcgaggcgccggggccaacgtcgcgccgggtcgggaagtggacggaggc

SEQ ID NO: 79669 - DNA, 570 bp, Zea Mays
aagagaagtgctgctttggcttaccaagaggtgtctcatatcggtgattcagcagctagctctcgattttggggcaatcaagaggtgaaattgcgaagaacatgagtaccacaactgccaagggaaaaggagaacctcaaaatgcaaatgatgcaccactcgatgttcagcccttaacaatagcgtatccgggggaaccagtggtctgcacaccaagacccatcgtgtcgcatcctgcatataatggtggatggaaggttctccgccacatcaggccaaatggaagatctgatttcgtttgaaccattgacgacaatggtgcataacgaaagaaggcggcaacaattgatttacaccactccccttgcaacgaatttgaagttggtgagactccaagattatgttgaaactccaagagtagcaaggatgaaagccctttggtgagatattcgcaaaccaggatgaagtaggaatatgcaggacacaaacttaaccaagaggcactcgttataggcgaagtggagattggtctcaacatactttgtgcactgatgtttactaaattggtca

SEQ ID NO: 79670 - DNA, 812 bp, Zea Mays
gagaagtgctgctttggcttaccaagaggtgtctcatatcggtgattcagcagctagctctcgattttggggcaatcaagaggtgaaattgcgaagaacatgagtaccacaactgccaagggaaaaggagaacctcaaaatgcaaatgatgcaccactcgatgttcagcccttaacaatagcgtatccgggggaaccagtggtctgcacaccaagacccatcgtgtcgcatcctgcatataatggtggatggaaggttctccgccacatcaggccaaatggaagatctgatttcacattcattcatcaaacccatggcaaattccgctccaaaaaacaagttcttaatcatctgaattgtctgttgaggggaaaggggaaggattcagcagatgaggctaagcagggttgtggcgctaatcagcaagctcaaggaatgggtggtgctccatcaagtgctagtcttctattggctgaaggaaaacctcctacagtgacgatgatgaatcaaccagctgaataaagttgcgctacatctgctagtaattcagtcagcggaatgagcaatgaatcatgctgaaggaagttgtgctagctgtatcttctagctattcaatcagtggaattggtggtacctagactattaaaaaacaatgttaactcatttaattttaaggacccaacagtaagatttgttatgttgatgtgtgtactagcatatatattcccagtattgttgctgcttctcacaatgttgttgacgctctaaatgctagtaatattgcaccacaattaattttgtgttaaacattt

SEQ ID NO: 79671 - DNA, 758 bp, Zea Mays
gtcctcttattctcgtatagatacctgggttctataggcaacactggtgctggagccgggtaccttgtgttggtcactgggttaccaaactagcctggcctttgtatcaattagttggtgaattcgagcaaatcaagtgcatatattgctccaataatatgtgaagatgatggaggttgtgtgataaaagaagatcatacggttattgcacaaaagaggtgtctcatatcggtgattcagcagctagctctcgattttggggcaatcaagaggtgaaattgcgaagaacatgagtaccacaactgccaagggaaaaggagaacctcaaaatgcaaatgatgcaccactcgatgttcagcccttaacaatagcgtatccgggggaaccagtggtctgcacaccaagacccatcgtgtcgcatcctgcatataatggtggatggaaggttctccgccacatcaggccaaatggaagatctgatttcgtttgaaccattgacgacaatggtgcataacgaaagaaggcggcaacaattgatttacaccactccccttgcaacgaatttgaagttggtgagactccaagattatgttgaaactccaagagtagcaaggatgaaagccctttggtgagatattcgcaaaccaggatgaagtaggaatatgcaggacacaaacttaaccaagaggcactcgttataggcgaagtggagattggtctcaacatactttgtgcactgatgtttactaaattggtca

SEQ ID NO: 79672 - DNA, 564 bp, Zea Mays
gaagatcatacggttattgcacaggtgtctcatatcggtgattcagcagctagctctcgattttggggcaatcaagaggtgaaattgcgaagaacatgagtaccacaactgccaagggaaaaggagaacctcaaaatgcaaatgatgcaccactcgatgttcagcccttaacaatagcgtatccgggggaaccagtggtctgcacaccaagacccatcgtgtcgcatcctgcatataatggtggatggaaggttctccgccacatcaggccaaatggaagatctgatttcgtttgaaccattgacgacaatggtgcataacgaaagaaggcggcaacaattgatttacaccactccccttgcaacgaatttgaagttggtgagactccaagattatgttgaaactccaagagtagcaaggatgaaagccctttggtgagatattcgcaaaccaggatgaagtaggaatatgcaggacacaaacttaaccaagaggcactcgttataggcgaagtggagattggtctcaacatactttgtgcactgatgtttactaaattggtca

SEQ ID NO: 79673 - DNA, 4954 bp, Zea Mays
gttgaactgtttcgaatcgccggctccccaacccaatcctccagctgcggaatggcggcggcggagccgtgctgcatctcgcacgcgttcgagcgcgccactcgccaggaacccggccgcctcgccgtcatccacgcagcggcctcgggcgccgacagcgaggagcgccgcttcacttgcggcgacctcctcgccgccgtcggctccctctcccgccgcatcgccgccgcgctcggcagcaccgccaccgatacccgccgcgaccgcgagcaaggctcaggtgcgtcaacgccaatcaaccgctcggctgttcgcgcttgcttgccccccctcccctgtcgtagtctcgtgtctgactgacggagactaattcggaaccgacgcaagggtttcgggccgccggcgccgtagtgccgagggttgtcggggtatacgcctcgccatcgttggagtacgtcgccgccgtcctcgcggtgctcaggtgcggcgcggcgttcctcccgctcgacccgtcgtggccggaggagagggtctcgtgggctatctcggcgtccaacgcggcgctcgtcgtgtcttcagttgggtcgcgaggagccacgctgtttgagagcagcgcctgccctgttctgcgcttttatggtggcatccggcggcgatttcgggatggaaatggcggggatgacggggaggagcttgtctggccgtgcgagcacgagtggcaccgcaagttctgctacgtgatgttcacctctggttctaccggaaaaccgaagggtgtttgcggcactgagaaaggagttcctttctgcggtcttgacttgctcaacacttgtcattcctcccagtgagtggagagctaatccagcatccttggccaacttaattaaggtttatcggatatcaaggatgacattggttccatcacttatggagataatactacctaccctggcggaaaaactttctgatggctgtaacccacttaagatcctaatatttagtggggaagttctgtctgtatcgctgtggaagagagtctatgaatttctgccagaggctactatcataaatctgtatggaacaacagaggtttccggtgactgtgcattctttgattgcaaaaaattgcctacaattttggagcaagaagaactaaacagtgtaccaattgggtttcctatttcaaattgtgaggtttctcttgtcaccaatgatggactatcagatgaaggtgaaatctctgtcagtggagcatgcttgtttactggatatttagctgatcccatgacaagtaactgccctgaaggcagtgaagttttagcatactacagaacaggtgactttgcccggcgcctaaagacaggcgaacttattttccttggaagaaaggaccgaattgttaaaatttatgggcaccgtttctcacttgaggaggtagaatccacattgagggatcatcctgatgtcagtgacgctgctgttacttttcaaagtaatggatctctggattttaaggcatacttggtgctgaggagtaataataaatttcttaaatgtactcagggttatagtggattacattcttcccgagatatcattgcaccacttcgaaactggctcatcatgaagtttccactagctatggtcccaaggctttttatccccatgaaatcattacctttgactttgtcaggaaagattgactatgtcaagttatctagcttggtttgtgcatttgagccttgtgaaattcatccagaaagcagtccagctgatcctcatatgcaagttatcaaaaaggcattttctgatgccctactggttcatgaagtgtctgagtatgatgatttcttctccttgggtggtaactcaattactgcagcacatgtggcccacaaattggagattgacatgagattactttatatttataccaccccttctaaactttttcatggtttacttggggaacacagtcatgtaattcctccaactcctgaatttcacaacagaaagaagttgagaaaatatgcaagcatatcagattcctttggcccagtttctgaatatttggacagtaactttcatgaccaagggcagataagtaaagagggtgcatacgatcactttgcagggaatcatgtaagtgatatagatggccagcttagcaaaagtaggacttacaatacataccaagcaaaaaacctgtgccctgatacatgctcaaatgatgaaattttcagtggcagaccatggatactaaattttcacttacaaaaggtgtggtctattggccgttgcaatagatttatgcatggttctgaagggatggtacaccttgaagatatttgttcatatgttccatataacaaaaagggttacctcgtgaaaatttggagcattcttctagattcatgtgttgatgcctcacctttgcttgtcataaacaatggaatgatgtccatctttattggttctcattcatatttgtttctttgcattgatggttatagtggttcagtgaggtggagtgtcaaattggaaggccgtatcgagtgttctgccgctataactggtgatttctcagaggttgttgttggatgctataaagggaaaatttacttccttgatatgtctacgggaaaattatcctggacctttcaaactgatggggagggtatctcctttcaggtaaaaatgcaaccagttgtggacaagatgaggaatttaatatggtgtggctcgtatgaccattacttgtatgcgttaaattacaaagatcgctgctgcacatacaaagttttttgtggtggaagcatttatggatctcctgctattgacatggcacaaaatgtaatctatgtcgcatctacgagtggccttgtgactgcagtatcatttaaggaaccatccttcagagttctttggcaatatgaagctggtgcgccaatttttggttctctcgccatagatcatcaaagtggaacaggtatttctccagccatttgatgtggatattctggaatatggatgtacatacacatactgttatatttcaaaattcaaaagtaggagtaagtcatactttggttcaatatgcatgttacattgaatgccatagtgtaattctgtgctaaccaatcatcatttgctggttatatgccattgtgtttaaggttgcaaggtcattcattgtaggtacagttaccatcaatcaaaccttatttgatcagtcactatacaccatgaatgtaataacagaatgtgtatatagatgtcattcttttatacatcatggctcatgccaatctgggccaacgcagggtttgctagatacattttccttttatttgctgtgctgactatcacacttgctacatgcagttatttgttgtttagtgaatggcctagttatgacattgaactcacaaggttctgttgtttggaaggtaatttttctgatgcaccttgtttttatagccagaggtaatgtgtatgcatagttgagtaagaaagaaagagctattgatgcttagaatctacactagtccatatataacattgtttcaatgagagcaaaaatgcacatttttcactctgatgttgtacatttgacccagtttttcttgtgtggttcattctccacatatttattagtgtctgtccaaaatccataacttgctatttaaaatgcaggcaactgttggtggtcctatttttgctggtgcatgtttgtcacccaccctccctcatcaggtgcttataccttcccgtgatggcaacttgtactcttttgatactgtgtctggtgcccttctttgggtatacaaggctggggatccaattactgcatccacttttgttgatgagctgttaacatcagtgtcatttggaccatctgagagatttgcttgtatctgcacgagttccgggaaggtccatgtcatcagaattagagtagacatcagaactagagtagatgctaagtacaatcaggagcaaggtggtgacggtgttaaatctgaggagttagttcaaggactggatgctaagtacaatcaggagcaagctggtgaaggtgctaaatctgaggagttagttcaaggactggcatccattgatcttccgggggacatattttcgtctcccttgatggttggtggacgcatctttgttggatgccgagatgatcgattacattgtctcaccgtcaccacatagtttcaagtgattttgctggaggtgatatagttttgcccatgcctgctgcccgacaacctctcttccgcgacaagggcctttggcctttcctattggtaaggtgcgtggcaggctggcagcacaacacaggccacgaatgagtttggttgaagctcctgattgcatttggtgatttgggtctccaatgattgctttccatgtctacacaagaagctttccacagcctgctctcgcctaagcaagtgctacttgatgtcttgatcaaaggacaatattctccaagaaatggttcgagtcgatccagcttcctgcaccagaaatgtactagtctctaggagtagaagttttttctttgcattaggtttcatgtttttttacttaccttgcatgcttccagaactctcgctgggaatgcacacatttttcatttcctttggctattagtagggatgccaatggagaattccccgtcgggttttggctccactatagaaaacgatccccgcggggatccctacgaactcttcctaattccccgttctctcgcggggataaattcccgtcggggatctctgtccccgtttaaattataatcatgatatacttttttttgttatgaatacaaaatattgtcacttgtatatattgtcagatgttagaaatcattatgtatacatcaaaataaatatatttgtataacgagtgatatcttaacaatgtgattatttatttt

SEQ ID NO: 79674 - DNA, 4746 bp, Zea Mays
ggctccccaacccaatcctccagctgcggaatggcggcggcggagccgtgctgcatctcgcacgcgttcgagcgcgccactcgccaggaacccggccgcctcgccgtcatccacgcagcggcctcgggcgccgacagcgaggagcgccgcttcacttgcggcgacctcctcgccgccgtcggctccctctcccgccgcatcgccgccgcgctcggcagcaccgccaccgatacccgccgcgaccgcgagcaaggctcaggtgcgtcaacgccaatcaaccgctcggctgttcgcgcttgcttgccccccctcccctgtcgtagtctcgtgtctgactgacggagactaattcggaaccgacgcaagggtttcgggccgccggcgccgtagtgccgagggttgtcggggtatacgcctcgccatcgttggagtacgtcgccgccgtcctcgcggtgctcaggtgcggcgcggcgttcctcccgctcgacccgtcgtggccggaggagagggtctcgtgggctatctcggcgtccaacgcggcgctcgtcgtgtcttcagttgggtcgcgaggagccacgctgtttgagagcagcgcctgccctgttctgcgcttttatggtggcatccggcggcgatttcgggatggaaatggcggggatgacggggaggagcttgtctggccgtgcgagcacgagtggcaccgcaagttctgctacgtgatgttcacctctggttctaccggaaaaccgaagggtgtttgcggcactgagaaaggagttcctttctgcggtcttgacttgctcaacacttgtcattcctcccagtgagtggagagctaatccagcatccttggccaacttaattaaggtttatcggatatcaaggatgacattggttccatcacttatggagataatactacctaccctggcggaaaaactttctgatggctgtaacccacttaagatcctaatatttagtggggaagttctgtctgtatcgctgtggaagagagtctatgaatttctgccagaggctactatcataaatctgtatggaacaacagaggtttccggtgactgtgcattctttgattgcaaaaaattgcctacaattttggagcaagaagaactaaacagtgtaccaattgggtttcctatttcaaattgtgaggtttctcttgtcaccaatgatggactatcagatgaaggtgaaatctctgtcagtggagcatgcttgtttactggatatttagctgatcccatgacaagtaactgccctgaaggcagtgaagttttagcatactacagaacaggtgactttgcccggcgcctaaagacaggcgaacttattttccttggaagaaaggaccgaattgttaaaatttatgggcaccgtttctcacttgaggaggtagaatccacattgagggatcatcctgatgtcagtgacgctgctgttacttttcaaaggttatagtggattacattcttcccgagatatcattgcaccacttcgaaactggctcatcatgaagtttccactagctatggtcccaaggctttttatccccatgaaatcattacctttgactttgtcaggaaagattgactatgtcaagttatctagcttggtttgtgcatttgagccttgtgaaattcatccagaaagcagtccagctgatcctcatatgcaagttatcaaaaaggcattttctgatgccctactggttcatgaagtgtctgagtatgatgatttcttctccttgggtggtaactcaattactgcagcacatgtggcccacaaattggagattgacatgagattactttatatttataccaccccttctaaactttttcatggtttacttggggaacacagtcatgtaattcctccaactcctgaatttcacaacagaaagaagttgagaaaatatgcaagcatatcagattcctttggcccagtttctgaatatttggacagtaactttcatgaccaagggcagataagtaaagagggtgcatacgatcactttgcagggaatcattggcagaccatggatactaaattttcacttacaaaaggtgtggtctattggccgttgcaatagatttatgcatggttctgaagggatggtacaccttgaagatatttgttcatatgttccatataacaaaaagggttacctcgtgaaaatttggagcattcttctagattcatgtgttgatgcctcacctttgcttgtcataaacaatggaatgatgtccatctttattggttctcattcatatttgtttctttgcattgatggttatagtggttcagtgaggtggagtgtcaaattggaaggccgtatcgagtgttctgccgctataactggtgatttctcagaggttgttgttggatgctataaagggaaaatttacttccttgatatgtctacgggaaaattatcctggacctttcaaactgatggggaggtaaaaatgcaaccagttgtggacaagatgaggaatttaatatggtgtggctcgtatgaccattacttgtatgcgttaaattacaaagatcgctgctgcacatacaaagttttttgtggtggaagcatttatggatctcctgctattgacatggcacaaaatgtaatctatgtcgcatctacgagtggccttgtgactgcagtatcatttaaggaaccatccttcagagttctttggcaatatgaagctggtgcgccaatttttggttctctcgccatagatcatcaaagtggaacaggtatttctccagccatttgatgtggatattctggaatatggatgtacatacacatactgttatatttcaaaattcaaaagtaggagtaagtcatactttggttcaatatgcatgttacattgaatgccatagtgtaattctgtgctaaccaatcatcatttgctggttatatgccattgtgtttaaggttgcaaggtcattcattgtaggtacagttaccatcaatcaaaccttatttgatcagtcactatacaccatgaatgtaataacagaatgtgtatatagatgtcattcttttatacatcatggctcatgccaatctgggccaacgcagggtttgctagatacattttccttttatttgctgtgctgactatcacacttgctacatgcagttatttgttgtttagtgaatggcctagttatgacattgaactcacaaggttctgttgtttggaaggtaatttttctgatgcaccttgtttttatagccagaggtaatgtgtatgcatagttgagtaagaaagaaagagctattgatgcttagaatctacactagtccatatataacattgtttcaatgagagcaaaaatgcacatttttcactctgatgttgtacatttgacccagtttttcttgtgtggttcattctccacatatttattagtgtctgtccaaaatccataacttgctatttaaaatgcaggcaactgttggtggtcctatttttgctggtgcatgtttgtcacccaccctccctcatcaggtgcttataccttcccgtgatggcaacttgtactcttttgatactgtgtctggtgcccttctttgggtatacaaggctggggatccaattactgcatccacttttgttgatgagctgttaacatcagtgtcatttggaccatctgagagatttgcttgtatctgcacgagttccgggaaggtccatgtcatcagaattagagtagacatcagaactagagtagatgctaagtacaatcaggagcaaggtggtgacggtgttaaatctgaggagttagttcaaggactggatgctaagtacaatcaggagcaagctggtgaaggtgctaaatctgaggagttagttcaaggactggcatccattgatcttccgggggacatattttcgtctcccttgatggttggtggacgcatctttgttggatgccgagatgatcgattacattgtctcaccgtcaccacatagtttcaagtgattttgctggaggtgatatagttttgcccatgcctgctgcccgacaacctctcttccgcgacaagggcctttggcctttcctattggtaaggtgcgtggcaggctggcagcacaacacaggccacgaatgagtttggttgaagctcctgattgcatttggtgatttgggtctccaatgattgctttccatgtctacacaagaagctttccacagcctgctctcgcctaagcaagtgctacttgatgtcttgatcaaaggacaatattctccaagaaatggttcgagtcgatccagcttcctgcaccagaaatgtactagtctctaggagtagaagttttttctttgcattaggtttcatgtttttttacttaccttgcatgcttccagaactctcgctgggaatgcacacatttttcatttcctttggctattagtagggatgccaatggagaattccccgtcgggttttggctccactatagaaaacgatccccgcggggatccctacgaactcttcctaattccccgttctctcgcggggataaattcccgtcggggatctctgtccccgtttaaattataatcatgatatacttttttttgttatgaatacaaaatattgtcacttgtatatattgtcagatgttagaaatcattatgtatacatcaaaataaatatatttgtataacgagtgatatcttaacaatgtgattatttatttt

SEQ ID NO: 79675 - DNA, 4205 bp, Zea Mays
ggctccccaacccaatcctccagctgcggaatggcggcggcggagccgtgctgcatctcgcacgcgttcgagcgcgccactcgccaggaacccggccgcctcgccgtcatccacgcagcggcctcgggcgccgacagcgaggagcgccgcttcacttgcggcgacctcctcgccgccgtcggctccctctcccgccgcatcgccgccgcgctcggcagcaccgccaccgatacccgccgcgaccgcgagcaaggctcagggtttcgggccgccggcgccgtagtgccgagggttgtcggggtatacgcctcgccatcgttggagtacgtcgccgccgtcctcgcggtgctcaggtgcggcgcggcgttcctcccgctcgacccgtcgtggccggaggagagggtctcgtgggctatctcggcgtccaacgcggcgctcgtcgtgtcttcagttgggtcgcgaggagccacgctgtttgagagcagcgcctgccctgttctgcgcttttatggtggcatccggcggcgatttcgggatggaaatggcggggatgacggggaggagcttgtctggccgtgcgagcacgagtggcaccgcaagttctgctacgtgatgttcacctctggttctaccggaaaaccgaagggtgtttgcggcactgagaaaggagttcctttctgcggtcttgacttgctcaacacttgtcattcctcccagtgagtggagagctaatccagcatccttggccaacttaattaaggtttatcggatatcaaggatgacattggttccatcacttatggagataatactacctaccctggcggaaaaactttctgatggctgtaacccacttaagatcctaatatttagtggggaagttctgtctgtatcgctgtggaagagagtctatgaatttctgccagaggctactatcataaatctgtatggaacaacagaggtttccggtgactgtgcattctttgattgcaaaaaattgcctacaattttggagcaagaagaactaaacagtgtaccaattgggtttcctatttcaaattgtgaggtttctcttgtcaccaatgatggactatcagatgaaggtgaaatctctgtcagtggagcatgcttgtttactggatatttagctgatcccatgacaagtaactgccctgaaggcagtgaagttttagcatactacagaacaggtgactttgcccggcgcctaaagacaggcgaacttattttccttggaagaaaggaccgaattgttaaaatttatgggcaccgtttctcacttgaggaggtagaatccacattgagggatcatcctgatgtcagtgacgctgctgttacttttcaaaggttatagtggattacattcttcccgagatatcattgcaccacttcgaaactggctcatcatgaagtttccactagctatggtcccaaggctttttatccccatgaaatcattacctttgactttgtcaggaaagattgactatgtcaagttatctagcttggtttgtgcatttgagccttgtgaaattcatccagaaagcagtccagctgatcctcatatgcaagttatcaaaaaggcattttctgatgccctactggttcatgaagtgtctgagtatgatgatttcttctccttgggtggtaactcaattactgcagcacatgtggcccacaaattggagattgacatgagattactttatatttataccaccccttctaaactttttcatggtttacttggggaacacagtcatgtaattcctccaactcctgaatttcacaacagaaagaagttgagaaaatatgcaagcatatcagattcctttggcccagtttctgaatatttggacagtaactttcatgaccaagggcagataagtaaagagggtgcatacgatcactttgcagggaatcattggcagaccatggatactaaattttcacttacaaaaggtgtggtctattggccgttgcaatagatttatgcatggttctgaagggatggtacaccttgaagatatttgttcatatgttccatataacaaaaagggttacctcgtgaaaatttggagcattcttctagattcatgtgttgatgcctcacctttgcttgtcataaacaatggaatgatgtccatctttattggttctcattcatatttgtttctttgcattgatggttatagtggttcagtgaggtggagtgtcaaattggaaggccgtatcgagtgttctgccgctataactggtgatttctcagaggttgttgttggatgctataaagggaaaatttacttccttgatatgtctacgggaaaattatcctggacctttcaaactgatggggaggtaaaaatgcaaccagttgtggacaagatgaggaatttaatatggtgtggctcgtatgaccattacttgtatgcgttaaattacaaagatcgctgctgcacatacaaagttttttgtggtggaagcatttatggatctcctgctattgacatggcacaaaatgtaatctatgtcgcatctacgagtggccttgtgactgcagtatcatttaaggaaccatccttcagagttctttggcaatatgaagctggtgcgccaatttttggttctctcgccatagatcatcaaagtggaacagttatttgttgtttagtgaatggcctagttatgacattgaactcacaaggttctgttgtttggaaggcaactgttggtggtcctatttttgctggtgcatgtttgtcacccaccctccctcatcaggtgcttataccttcccgtgatggcaacttgtactcttttgatactgtgtctggtgcccttctttgggtatacaaggctggggatccaattactgcatccacttttgttgatgagctgttaacatcagtgtcatttggaccatctgagagatttgcttgtatctgcacgagttccgggaaggtccatgtcatcagaattagagtagacatcagaactagagtagatgctaagtacaatcaggagcaaggtggtgacggtgttaaatctgaggagttagttcaaggactggatgctaagtacaatcaggagcaagctggtgaaggtgctaaatctgaggagttagttcaaggactggcatccattgatcttccgggggacatattttcgtctcccttgatggttggtggacgcatctttgttggatgccgagatgatcgattacattgtctcaccgtcaccacatagtttcaagtgattttgctggaggtgatatagttttgcccatgcctgctgcccgacaacctctcttccgcgacaagggcctttggcctttcctattggtaaggtgcgtggcaggctggcagcacaacacaggccacgaatgagtttggttgaagctcctgattgcatttggtgatttgggtctccaatgattgctttccatgtctacacaagaagctttccacagcctgctctcgcctaagcaagtgctacttgatgtcttgatcaaagtgagtggaaacctctcaacctcacattctccttgcagcatctgtattcagcccatgtggaacctttgccactgtcctgcaaggctggtcagtcatgccgctgttcccttcagtggaaattaactgataggaagaccagtgatttgcggagactgtaaaaattgttccacatagatctatactatttcctaaaaggagtttatgacagggacaatattctccaagaaatggttcgagtcgatccagcttcctgcaccagaaatgtactagtctctaggagtagaagttttttctttgcattaggtttcatgtttttttacttaccttgcatgcttccagaactctcgctgggaatgcacacatttttcatttcctttggctattagtagggatgccaatggagaattccccgtcgggttttggctccactatagaaaacgatccccgcggggatccctacgaactcttcctaattccccgttctctcgcggggataaattcccgtcggggatctctgtccccgtttaaattataatcatgatatacttttttttgttatgaatacaaaatattgtcacttgtatatattgtcagatgttagaaatcattatgtatacatcaaaataaatatatttgtataacgagtgatatcttaacaatgtgattatttatttt

SEQ ID NO: 79676 - DNA, 4270 bp, Zea Mays
ggctccccaacccaatcctccagctgcggaatggcggcggcggagccgtgctgcatctcgcacgcgttcgagcgcgccactcgccaggaacccggccgcctcgccgtcatccacgcagcggcctcgggcgccgacagcgaggagcgccgcttcacttgcggcgacctcctcgccgccgtcggctccctctcccgccgcatcgccgccgcgctcggcagcaccgccaccgatacccgccgcgaccgcgagcaaggctcagggtttcgggccgccggcgccgtagtgccgagggttgtcggggtatacgcctcgccatcgttggagtacgtcgccgccgtcctcgcggtgctcaggtgcggcgcggcgttcctcccgctcgacccgtcgtggccggaggagagggtctcgtgggctatctcggcgtccaacgcggcgctcgtcgtgtcttcagttgggtcgcgaggagccacgctgtttgagagcagcgcctgccctgttctgcgcttttatggtggcatccggcggcgatttcgggatggaaatggcggggatgacggggaggagcttgtctggccgtgcgagcacgagtggcaccgcaagttctgctacgtgatgttcacctctggttctaccggaaaaccgaagggtgtttgcggcactgagaaaggtcttctgaatcgttttttgtggatgcaaagaaggaatcctctgtgttcagatgatgttttgttgtttaagacatctgtcagctttgttgaccatctacaggagttcctttctgcggtcttgacttgctcaacacttgtcattcctcccagtgagtggagagctaatccagcatccttggccaacttaattaaggtttatcggatatcaaggatgacattggttccatcacttatggagataatactacctaccctggcggaaaaactttctgatggctgtaacccacttaagatcctaatatttagtggggaagttctgtctgtatcgctgtggaagagagtctatgaatttctgccagaggctactatcataaatctgtatggaacaacagaggtttccggtgactgtgcattctttgattgcaaaaaattgcctacaattttggagcaagaagaactaaacagtgtaccaattgggtttcctatttcaaattgtgaggtttctcttgtcaccaatgatggactatcagatgaaggtgaaatctctgtcagtggagcatgcttgtttactggatatttagctgatcccatgacaagtaactgccctgaaggcagtgaagttttagcatactacagaacaggtgactttgcccggcgcctaaagacaggcgaacttattttccttggaagaaaggaccgaattgttaaaatttatgggcaccgtttctcacttgaggaggtagaatccacattgagggatcatcctgatgtcagtgacgctgctgttacttttcaaagtaatggatctctggattttaaggcatacttggtgctgaggagtaataataaatttcttaaatgtactcagggttatagtggattacattcttcccgagatatcattgcaccacttcgaaactggctcatcatgaagtttccactagctatggtcccaaggctttttatccccatgaaatcattacctttgactttgtcaggaaagattgactatgtcaagttatctagcttggtttgtgcatttgagccttgtgaaattcatccagaaagcagtccagctgatcctcatatgcaagttatcaaaaaggcattttctgatgccctactggttcatgaagtgtctgagtatgatgatttcttctccttgggtggtaactcaattactgcagcacatgtggcccacaaattggagattgacatgagattactttatatttataccaccccttctaaactttttcatggtttacttggggaacacagtcatgtaattcctccaactcctgaatttcacaacagaaagaagttgagaaaatatgcaagcatatcagattcctttggcccagtttctgaatatttggacagtaactttcatgaccaagggcagataagtaaagagggtgcatacgatcactttgcagggaatcatgtaagtgatatagatggccagcttagcaaaagtaggacttacaatacataccaagcaaaaaacctgtgccctgatacatgctcaaatgatgaaattttcagtggcagaccatggatactaaattttcacttacaaaaggtgtggtctattggccgttgcaatagatttatgcatggttctgaagggatggtacaccttgaagatatttgttcatatgttccatataacaaaaagggttacctcgtgaaaatttggagcattcttctagattcatgtgttgatgcctcacctttgcttgtcataaacaatggaatgatgtccatctttattggttctcattcatatttgtttctttgcattgatggttatagtggttcagtgaggtggagtgtcaaattggaaggccgtatcgagtgttctgccgctataactggtgatttctcagaggttgttgttggatgctataaagggaaaatttacttccttgatatgtctacgggaaaattatcctggacctttcaaactgatggggaggtaaaaatgcaaccagttgtggacaagatgaggaatttaatatggtgtggctcgtatgaccattacttgtatgcgttaaattacaaagatcgctgctgcacatacaaagttttttgtggtggaagcatttatggatctcctgctattgacatggcacaaaatgtaatctatgtcgcatctacgagtggccttgtgactgcagtatcatttaaggaaccatccttcagagttctttggcaatatgaagctggtgcgccaatttttggttctctcgccatagatcatcaaagtggaacagttatttgttgtttagtgaatggcctagttatgacattgaactcacaaggttctgttgtttggaaggcaactgttggtggtcctatttttgctggtgcatgtttgtcacccaccctccctcatcaggtgcttataccttcccgtgatggcaacttgtactcttttgatactgtgtctggtgcccttctttgggtatacaaggctggggatccaattactgcatccacttttgttgatgagctgttaacatcagtgtcatttggaccatctgagagatttgcttgtatctgcacgagttccgggaaggtccatgtcatcagaattagagtagacatcagaactagagtagatgctaagtacaatcaggagcaaggtggtgacggtgttaaatctgaggagttagttcaaggactggatgctaagtacaatcaggagcaagctggtgaaggtgctaaatctgaggagttagttcaaggactggcatccattgatcttccgggggacatattttcgtctcccttgatggttggtggacgcatctttgttggatgccgagatgatcgattacattgtctcaccgtcaccacatagtttcaagtgattttgctggaggtgatatagttttgcccatgcctgctgcccgacaacctctcttccgcgacaagggcctttggcctttcctattggtaaggtgcgtggcaggctggcagcacaacacaggccacgaatgagtttggttgaagctcctgattgcatttggtgatttgggtctccaatgattgctttccatgtctacacaagaagctttccacagcctgctctcgcctaagcaagtgctacttgatgtcttgatcaaaggacaatattctccaagaaatggttcgagtcgatccagcttcctgcaccagaaatgtactagtctctaggagtagaagttttttctttgcattaggtttcatgtttttttacttaccttgcatgcttccagaactctcgctgggaatgcacacatttttcatttcctttggctattagtagggatgccaatggagaattccccgtcgggttttggctccactatagaaaacgatccccgcggggatccctacgaactcttcctaattccccgttctctcgcggggataaattcccgtcggggatctctgtccccgtttaaattataatcatgatatacttttttttgttatgaatacaaaatattgtcacttgtatatattgtcagatgttagaaatcattatgtatacatcaaaataaatatatttgtataacgagtgatatcttaacaatgtgattatttatttt

SEQ ID NO: 79677 - DNA, 4290 bp, Zea Mays
ggctccccaacccaatcctccagctgcggaatggcggcggcggagccgtgctgcatctcgcacgcgttcgagcgcgccactcgccaggaacccggccgcctcgccgtcatccacgcagcggcctcgggcgccgacagcgaggagcgccgcttcacttgcggcgacctcctcgccgccgtcggctccctctcccgccgcatcgccgccgcgctcggcagcaccgccaccgatacccgccgcgaccgcgagcaaggctcaggtgcgtcaacgccaatcaaccgctcggctgttcgcgcttgcttgccccccctcccctgtcgtagtctcgtgtctgactgacggagactaattcggaaccgacgcaagggtttcgggccgccggcgccgtagtgccgagggttgtcggggtatacgcctcgccatcgttggagtacgtcgccgccgtcctcgcggtgctcaggtgcggcgcggcgttcctcccgctcgacccgtcgtggccggaggagagggtctcgtgggctatctcggcgtccaacgcggcgctcgtcgtgtcttcagttgggtcgcgaggagccacgctgtttgagagcagcgcctgccctgttctgcgcttttatggtggcatccggcggcgatttcgggatggaaatggcggggatgacggggaggagcttgtctggccgtgcgagcacgagtggcaccgcaagttctgctacgtgatgttcacctctggttctaccggaaaaccgaagggtgtttgcggcactgagaaaggtttatcggatatcaaggatgacattggttccatcacttatggagataatactacctaccctggcggaaaaactttctgatggctgtaacccacttaagatcctaatatttagtggggaagttctgtctgtatcgctgtggaagagagtctatgaatttctgccagaggctactatcataaatctgtatggaacaacagaggtttccggtgactgtgcattctttgattgcaaaaaattgcctacaattttggagcaagaagaactaaacagtgtaccaattgggtttcctatttcaaattgtgaggtttctcttgtcaccaatgatggactatcagatgaaggtgaaatctctgtcagtggagcatgcttgtttactggatatttagctgatcccatgacaagtaactgccctgaaggcagtgaagttttagcatactacagaacaggtgactttgcccggcgcctaaagacaggcgaacttattttccttggaagaaaggaccgaattgttaaaatttatgggcaccgtttctcacttgaggaggtagaatccacattgagggatcatcctgatgtcagtgacgctgctgttacttttcaaagtaatggatctctggattttaaggcatacttggtgctgaggagtaataataaatttcttaaatgtactcagggttatagtggattacattcttcccgagatatcattgcaccacttcgaaactggctcatcatgaagtttccactagctatggtcccaaggctttttatccccatgaaatcattacctttgactttgtcaggaaagattgactatgtcaagttatctagcttggtttgtgcatttgagccttgtgaaattcatccagaaagcagtccagctgatcctcatatgcaagttatcaaaaaggcattttctgatgccctactggttcatgaagtgtctgagtatgatgatttcttctccttgggtggtaactcaattactgcagcacatgtggcccacaaattggagattgacatgagattactttatatttataccaccccttctaaactttttcatggtttacttggggaacacagtcatgtaattcctccaactcctgaatttcacaacagaaagaagttgagaaaatatgcaagcatatcagattcctttggcccagtttctgaatatttggacagtaactttcatgaccaagggcagataagtaaagagggtgcatacgatcactttgcagggaatcattggcagaccatggatactaaattttcacttacaaaaggtgtggtctattggccgttgcaatagatttatgcatggttctgaagggatggtacaccttgaagatatttgttcatatgttccatataacaaaaagggttacctcgtgaaaatttggagcattcttctagattcatgtgttgatgcctcacctttgcttgtcataaacaatggaatgatgtccatctttattggttctcattcatatttgtttctttgcattgatggttatagtggttcagtgaggtggagtgtcaaattggaaggccgtatcgagtgttctgccgctataactggtgatttctcagaggttgttgttggatgctataaagggaaaatttacttccttgatatgtctacgggaaaattatcctggacctttcaaactgatggggaggtaaaaatgcaaccagttgtggacaagatgaggaatttaatatggtgtggctcgtatgaccattacttgtatgcgttaaattacaaagatcgctgctgcacatacaaagttttttgtggtggaagcatttatggatctcctgctattgacatggcacaaaatgtaatctatgtcgcatctacgagtggccttgtgactgcagtatcatttaaggaaccatccttcagagttctttggcaatatgaagctggtgcgccaatttttggttctctcgccatagatcatcaaagtggaacagttatttgttgtttagtgaatggcctagttatgacattgaactcacaaggttctgttgtttggaaggcaactgttggtggtcctatttttgctggtgcatgtttgtcacccaccctccctcatcaggtgcttataccttcccgtgatggcaacttgtactcttttgatactgtgtctggtgcccttctttgggtatacaaggctggggatccaattactgcatccacttttgttgatgagctgttaacatcagtgtcatttggaccatctgagagatttgcttgtatctgcacgagttccgggaaggtccatgtcatcagaattagagtagacatcagaactagagtagatgctaagtacaatcaggagcaaggtggtgacggtgttaaatctgaggagttagttcaaggactggatgctaagtacaatcaggagcaagctggtgaaggtgctaaatctgaggagttagttcaaggactggcatccattgatcttccgggggacatattttcgtctcccttgatggttggtggacgcatctttgttggatgccgagatgatcgattacattgtctcaccgtcaccacatagtttcaagtgattttgctggaggtgatatagttttgcccatgcctgctgcccgacaacctctcttccgcgacaagggcctttggcctttcctattggtaaggtgcgtggcaggctggcagcacaacacaggccacgaatgagtttggttgaagctcctgattgcatttggtgatttgggtctccaatgattgctttccatgtctacacaagaagctttccacagcctgctctcgcctaagcaagtgctacttgatgtcttgatcaaagtgagtggaaacctctcaacctcacattctccttgcagcatctgtattcagcccatgtggaacctttgccactgtcctgcaaggctggtcagtcatgccgctgttcccttcagtggaaattaactgataggaagaccagtgatttgcggagactgtaaaaattgttccacatagatctatactatttcctaaaaggagtttatgacagggacaatattctccaagaaatggttcgagtcgatccagcttcctgcaccagaaatgtactagtctctaggagtagaagttttttctttgcattaggtttcatgtttttttacttaccttgcatgcttccagaactctcgctgggaatgcacacatttttcatttcctttggctattagtagggatgccaatggagaattccccgtcgggttttggctccactatagaaaacgatccccgcggggatccctacgaactcttcctaattccccgttctctcgcggggataaattcccgtcggggatctctgtccccgtttaaattataatcatgatatacttttttttgttatgaatacaaaatattgtcacttgtatatattgtcagatgttagaaatcattatgtatacatcaaaataaatatatttgtataacgagtgatatcttaacaatgtgattatttatttt

SEQ ID NO: 79678 - DNA, 4427 bp, Zea Mays
ggctccccaacccaatcctccagctgcggaatggcggcggcggagccgtgctgcatctcgcacgcgttcgagcgcgccactcgccaggaacccggccgcctcgccgtcatccacgcagcggcctcgggcgccgacagcgaggagcgccgcttcacttgcggcgacctcctcgccgccgtcggctccctctcccgccgcatcgccgccgcgctcggcagcaccgccaccgatacccgccgcgaccgcgagcaaggctcagggtttcgggccgccggcgccgtagtgccgagggttgtcggggtatacgcctcgccatcgttggagtacgtcgccgccgtcctcgcggtgctcaggtgcggcgcggcgttcctcccgctcgacccgtcgtggccggaggagagggtctcgtgggctatctcggcgtccaacgcggcgctcgtcgtgtcttcagttgggtcgcgaggagccacgctgtttgagagcagcgcctgccctgttctgcgcttttatggtggcatccggcggcgatttcgggatggaaatggcggggatgacggggaggagcttgtctggccgtgcgagcacgagtggcaccgcaagttctgctacgtgatgttcacctctggttctaccggaaaaccgaagggtgtttgcggcactgagaaagatgatgttttgttgtttaagacatctgtcagctttgttgaccatctacaggagttcctttctgcggtcttgacttgctcaacacttgtcattcctcccagtgagtggagagctaatccagcatccttggccaacttaattaaggtttatcggatatcaaggatgacattggttccatcacttatggagataatactacctaccctggcggaaaaactttctgatggctgtaacccacttaagatcctaatatttagtggggaagttctgtctgtatcgctgtggaagagagtctatgaatttctgccagaggctactatcataaatctgtatggaacaacagaggtttccggtgactgtgcattctttgattgcaaaaaattgcctacaattttggagcaagaagaactaaacagtgtaccaattgggtttcctatttcaaattgtgaggtttctcttgtcaccaatgatggactatcagatgaaggtgaaatctctgtcagtggagcatgcttgtttactggatatttagctgatcccatgacaagtaactgccctgaaggcagtgaagttttagcatactacagaacaggtgactttgcccggcgcctaaagacaggcgaacttattttccttggaagaaaggaccgaattgttaaaatttatgggcaccgtttctcacttgaggaggtagaatccacattgagggatcatcctgatgtcagtgacgctgctgttacttttcaaagtaatggatctctggattttaaggcatacttggtgctgaggagtaataataaatttcttaaatgtactcagggttatagtggattacattcttcccgagatatcattgcaccacttcgaaactggctcatcatgaagtttccactagctatggtcccaaggctttttatccccatgaaatcattacctttgactttgtcaggaaagattgactatgtcaagttatctagcttggtttgtgcatttgagccttgtgaaattcatccagaaagcagtccagctgatcctcatatgcaagttatcaaaaaggcattttctgatgccctactggttcatgaagtgtctgagtatgatgatttcttctccttgggtggtaactcaattactgcagcacatgtggcccacaaattggagattgacatgagattactttatatttataccaccccttctaaactttttcatggtttacttggggaacacagtcatgtaattcctccaactcctgaatttcacaacagaaagaagttgagaaaatatgcaagcatatcagattcctttggcccagtttctgaatatttggacagtaactttcatgaccaagggcagataagtaaagagggtgcatacgatcactttgcagggaatcatgtaagtgatatagatggccagcttagcaaaagtaggacttacaatacataccaagcaaaaaacctgtgccctgatacatgctcaaatgatgaaattttcagtggcagaccatggatactaaattttcacttacaaaaggtgtggtctattggccgttgcaatagatttatgcatggttctgaagggatggtacaccttgaagatatttgttcatatgttccatataacaaaaagggttacctcgtgaaaatttggagcattcttctagattcatgtgttgatgcctcacctttgcttgtcataaacaatggaatgatgtccatctttattggttctcattcatatttgtttctttgcattgatggttatagtggttcagtgaggtggagtgtcaaattggaaggccgtatcgagtgttctgccgctataactggtgatttctcagaggttgttgttggatgctataaagggaaaatttacttccttgatatgtctacgggaaaattatcctggacctttcaaactgatggggaggtaaaaatgcaaccagttgtggacaagatgaggaatttaatatggtgtggctcgtatgaccattacttgtatgcgttaaattacaaagatcgctgctgcacatacaaagttttttgtggtggaagcatttatggatctcctgctattgacatggcacaaaatgtaatctatgtcgcatctacgagtggccttgtgactgcagtatcatttaaggaaccatccttcagagttctttggcaatatgaagctggtgcgccaatttttggttctctcgccatagatcatcaaagtggaacagttatttgttgtttagtgaatggcctagttatgacattgaactcacaaggttctgttgtttggaaggcaactgttggtggtcctatttttgctggtgcatgtttgtcacccaccctccctcatcaggtgcttataccttcccgtgatggcaacttgtactcttttgatactgtgtctggtgcccttctttgggtatacaaggctggggatccaattactgcatccacttttgttgatgagctgttaacatcagtgtcatttggaccatctgagagatttgcttgtatctgcacgagttccgggaaggtccatgtcatcagaattagagtagacatcagaactagagtagatgctaagtacaatcaggagcaaggtggtgacggtgttaaatctgaggagttagttcaaggactggatgctaagtacaatcaggagcaagctggtgaaggtgctaaatctgaggagttagttcaaggactggcatccattgatcttccgggggacatattttcgtctcccttgatggttggtggacgcatctttgttggatgccgagatgatcgattacattgtctcaccgtcaccacatagtttcaagtgattttgctggaggtgatatagttttgcccatgcctgctgcccgacaacctctcttccgcgacaagggcctttggcctttcctattggtaaggtgcgtggcaggctggcagcacaacacaggccacgaatgagtttggttgaagctcctgattgcatttggtgatttgggtctccaatgattgctttccatgtctacacaagaagctttccacagcctgctctcgcctaagcaagtgctacttgatgtcttgatcaaagtgagtggaaacctctcaacctcacattctccttgcagcatctgtattcagcccatgtggaacctttgccactgtcctgcaaggctggtcagtcatgccgctgttcccttcagtggaaattaactgataggaagaccagtgatttgcggagactgtaaaaattgttccacatagatctatactatttcctaaaaggagtttatgacagggacaatattctccaagaaatggttcgagtcgatccagcttcctgcaccagaaatgtactagtctctaggagtagaagttttttctttgcattaggtttcatgtttttttacttaccttgcatgcttccagaactctcgctgggaatgcacacatttttcatttcctttggctattagtagggatgccaatggagaattccccgtcgggttttggctccactatagaaaacgatccccgcggggatccctacgaactcttcctaattccccgttctctcgcggggataaattcccgtcggggatctctgtccccgtttaaattataatcatgatatacttttttttgttatgaatacaaaatattgtcacttgtatatattgtcagatgttagaaatcattatgtatacatcaaaataaatatatttgtataacgagtgatatcttaacaatgtgattatttatttt

SEQ ID NO: 79679 - DNA, 4416 bp, Zea Mays
ggctccccaacccaatcctccagctgcggaatggcggcggcggagccgtgctgcatctcgcacgcgttcgagcgcgccactcgccaggaacccggccgcctcgccgtcatccacgcagcggcctcgggcgccgacagcgaggagcgccgcttcacttgcggcgacctcctcgccgccgtcggctccctctcccgccgcatcgccgccgcgctcggcagcaccgccaccgatacccgccgcgaccgcgagcaaggctcagggtttcgggccgccggcgccgtagtgccgagggttgtcggggtatacgcctcgccatcgttggagtacgtcgccgccgtcctcgcggtgctcaggtgcggcgcggcgttcctcccgctcgacccgtcgtggccggaggagagggtctcgtgggctatctcggcgtccaacgcggcgctcgtcgtgtcttcagttgggtcgcgaggagccacgctgtttgagagcagcgcctgccctgttctgcgcttttatggtggcatccggcggcgatttcgggatggaaatggcggggatgacggggaggagcttgtctggccgtgcgagcacgagtggcaccgcaagttctgctacgtgatgttcacctctggttctaccggaaaaccgaagggtgtttgcggcactgagaaaggtcttctgaatcgttttttgtggatgcaaagaaggaatcctctgtgttcagatgatgttttgttgtttaagacatctgtcagctttgttgaccatctacaggagttcctttctgcggtcttgacttgctcaacacttgtcattcctcccagtgagtggagagctaatccagcatccttggccaacttaattaaggtttatcggatatcaaggatgacattggttccatcacttatggagataatactacctaccctggcggaaaaactttctgatggctgtaacccacttaagatcctaatatttagtggggaagttctgtctgtatcgctgtggaagagagtctatgaatttctgccagaggctactatcataaatctgtatggaacaacagaggtttccggtgactgtgcattctttgattgcaaaaaattgcctacaattttggagcaagaagaactaaacagtgtaccaattgggtttcctatttcaaattgtgaggtttctcttgtcaccaatgatggactatcagatgaaggtgaaatctctgtcagtggagcatgcttgtttactggatatttagctgatcccatgacaagtaactgccctgaaggcagtgaagttttagcatactacagaacaggtgactttgcccggcgcctaaagacaggcgaacttattttccttggaagaaaggaccgaattgttaaaatttatgggcaccgtttctcacttgaggaggtagaatccacattgagggatcatcctgatgtcagtgacgctgctgttacttttcaaagtaatggatctctggattttaaggcatacttggtgctgaggagtaataataaatttcttaaatgtactcagggttatagtggattacattcttcccgagatatcattgcaccacttcgaaactggctcatcatgaagtttccactagctatggtcccaaggctttttatccccatgaaatcattacctttgactttgtcaggaaagattgactatgtcaagttatctagcttggtttgtgcatttgagccttgtgaaattcatccagaaagcagtccagctgatcctcatatgcaagttatcaaaaaggcattttctgatgccctactggttcatgaagtgtctgagtatgatgatttcttctccttgggtggtaactcaattactgcagcacatgtggcccacaaattggagattgacatgagattactttatatttataccaccccttctaaactttttcatggtttacttggggaacacagtcatgtaattcctccaactcctgaatttcacaacagaaagaagttgagaaaatatgcaagcatatcagattcctttggcccagtttctgaatatttggacagtaactttcatgaccaagggcagataagtaaagagggtgcatacgatcactttgcagggaatcattggcagaccatggatactaaattttcacttacaaaaggtgtggtctattggccgttgcaatagatttatgcatggttctgaagggatggtacaccttgaagatatttgttcatatgttccatataacaaaaagggttacctcgtgaaaatttggagcattcttctagattcatgtgttgatgcctcacctttgcttgtcataaacaatggaatgatgtccatctttattggttctcattcatatttgtttctttgcattgatggttatagtggttcagtgaggtggagtgtcaaattggaaggccgtatcgagtgttctgccgctataactggtgatttctcagaggttgttgttggatgctataaagggaaaatttacttccttgatatgtctacgggaaaattatcctggacctttcaaactgatggggaggtaaaaatgcaaccagttgtggacaagatgaggaatttaatatggtgtggctcgtatgaccattacttgtatgcgttaaattacaaagatcgctgctgcacatacaaagttttttgtggtggaagcatttatggatctcctgctattgacatggcacaaaatgtaatctatgtcgcatctacgagtggccttgtgactgcagtatcatttaaggaaccatccttcagagttctttggcaatatgaagctggtgcgccaatttttggttctctcgccatagatcatcaaagtggaacagttatttgttgtttagtgaatggcctagttatgacattgaactcacaaggttctgttgtttggaaggtaatttttctgatgcaccttgtttttatagccagaggtaatgtgtatgcatagttgagtaagaaagaaagagctattgatgcttagaatctacactagtccatatataacattgtttcaatgagagcaaaaatgcacatttttcactctgatgttgtacatttgacccagtttttcttgtgtggttcattctccacatatttattagtgtctgtccaaaatccataacttgctatttaaaatgcaggcaactgttggtggtcctatttttgctggtgcatgtttgtcacccaccctccctcatcaggtgcttataccttcccgtgatggcaacttgtactcttttgatactgtgtctggtgcccttctttgggtatacaaggctggggatccaattactgcatccacttttgttgatgagctgttaacatcagtgtcatttggaccatctgagagatttgcttgtatctgcacgagttccgggaaggtccatgtcatcagaattagagtagacatcagaactagagtagatgctaagtacaatcaggagcaaggtggtgacggtgttaaatctgaggagttagttcaaggactggatgctaagtacaatcaggagcaagctggtgaaggtgctaaatctgaggagttagttcaaggactggcatccattgatcttccgggggacatattttcgtctcccttgatggttggtggacgcatctttgttggatgccgagatgatcgattacattgtctcaccgtcaccacatagtttcaagtgattttgctggaggtgatatagttttgcccatgcctgctgcccgacaacctctcttccgcgacaagggcctttggcctttcctattggtaaggtgcgtggcaggctggcagcacaacacaggccacgaatgagtttggttgaagctcctgattgcatttggtgatttgggtctccaatgattgctttccatgtctacacaagaagctttccacagcctgctctcgcctaagcaagtgctacttgatgtcttgatcaaaggacaatattctccaagaaatggttcgagtcgatccagcttcctgcaccagaaatgtactagtctctaggagtagaagttttttctttgcattaggtttcatgtttttttacttaccttgcatgcttccagaactctcgctgggaatgcacacatttttcatttcctttggctattagtagggatgccaatggagaattccccgtcgggttttggctccactatagaaaacgatccccgcggggatccctacgaactcttcctaattccccgttctctcgcggggataaattcccgtcggggatctctgtccccgtttaaattataatcatgatatacttttttttgttatgaatacaaaatattgtcacttgtatatattgtcagatgttagaaatcattatgtatacatcaaaataaatatatttgtataacgagtgatatcttaacaatgtgattatttatttt

SEQ ID NO: 79680 - DNA, 4446 bp, Zea Mays
ggctccccaacccaatcctccagctgcggaatggcggcggcggagccgtgctgcatctcgcacgcgttcgagcgcgccactcgccaggaacccggccgcctcgccgtcatccacgcagcggcctcgggcgccgacagcgaggagcgccgcttcacttgcggcgacctcctcgccgccgtcggctccctctcccgccgcatcgccgccgcgctcggcagcaccgccaccgatacccgccgcgaccgcgagcaaggctcagggtttcgggccgccggcgccgtagtgccgagggttgtcggggtatacgcctcgccatcgttggagtacgtcgccgccgtcctcgcggtgctcaggtgcggcgcggcgttcctcccgctcgacccgtcgtggccggaggagagggtctcgtgggctatctcggcgtccaacgcggcgctcgtcgtgtcttcagttgggtcgcgaggagccacgctgtttgagagcagcgcctgccctgttctgcgcttttatggtggcatccggcggcgatttcgggatggaaatggcggggatgacggggaggagcttgtctggccgtgcgagcacgagtggcaccgcaagttctgctacgtgatgttcacctctggttctaccggaaaaccgaagggtgtttgcggcactgagaaagatgatgttttgttgtttaagacatctgtcagctttgttgaccatctacaggagttcctttctgcggtcttgacttgctcaacacttgtcattcctcccagtgagtggagagctaatccagcatccttggccaacttaattaaggtttatcggatatcaaggatgacattggttccatcacttatggagataatactacctaccctggcggaaaaactttctgatggctgtaacccacttaagatcctaatatttagtggggaagttctgtctgtatcgctgtggaagagagtctatgaatttctgccagaggctactatcataaatctgtatggaacaacagaggtttccggtgactgtgcattctttgattgcaaaaaattgcctacaattttggagcaagaagaactaaacagtgtaccaattgggtttcctatttcaaattgtgaggtttctcttgtcaccaatgatggactatcagatgaaggtgaaatctctgtcagtggagcatgcttgtttactggatatttagctgatcccatgacaagtaactgccctgaaggcagtgaagttttagcatactacagaacaggtgactttgcccggcgcctaaagacaggcgaacttattttccttggaagaaaggaccgaattgttaaaatttatgggcaccgtttctcacttgaggaggtagaatccacattgagggatcatcctgatgtcagtgacgctgctgttacttttcaaagtaatggatctctggattttaaggcatacttggtgctgaggagtaataataaatttcttaaatgtactcagggttatagtggattacattcttcccgagatatcattgcaccacttcgaaactggctcatcatgaagtttccactagctatggtcccaaggctttttatccccatgaaatcattacctttgactttgtcaggaaagattgactatgtcaagttatctagcttggtttgtgcatttgagccttgtgaaattcatccagaaagcagtccagctgatcctcatatgcaagttatcaaaaaggcattttctgatgccctactggttcatgaagtgtctgagtatgatgatttcttctccttgggtggtaactcaattactgcagcacatgtggcccacaaattggagattgacatgagattactttatatttataccaccccttctaaactttttcatggtttacttggggaacacagtcatgtaattcctccaactcctgaatttcacaacagaaagaagttgagaaaatatgcaagcatatcagattcctttggcccagtttctgaatatttggacagtaactttcatgaccaagggcagataagtaaagagggtgcatacgatcactttgcagggaatcatgtaagtgatatagatggccagcttagcaaaagtaggacttacaatacataccaagcaaaaaacctgtgccctgatacatgctcaaatgatgaaattttcagtggcagaccatggatactaaattttcacttacaaaaggtgtggtctattggccgttgcaatagatttatgcatggttctgaagggatggtacaccttgaagatatttgttcatatgttccatataacaaaaagggttacctcgtgaaaatttggagcattcttctagattcatgtgttgatgcctcacctttgcttgtcataaacaatggaatgatgtccatctttattggttctcattcatatttgtttctttgcattgatggttatagtggttcagtgaggtggagtgtcaaattggaaggccgtatcgagtgttctgccgctataactggtgatttctcagaggttgttgttggatgctataaagggaaaatttacttccttgatatgtctacgggaaaattatcctggacctttcaaactgatggggaggtaaaaatgcaaccagttgtggacaagatgaggaatttaatatggtgtggctcgtatgaccattacttgtatgcgttaaattacaaagatcgctgctgcacatacaaagttttttgtggtggaagcatttatggatctcctgctattgacatggcacaaaatgtaatctatgtcgcatctacgagtggccttgtgactgcagtatcatttaaggaaccatccttcagagttctttggcaatatgaagctggtgcgccaatttttggttctctcgccatagatcatcaaagtggaacagttatttgttgtttagtgaatggcctagttatgacattgaactcacaaggttctgttgtttggaaggcaactgttggtggtcctatttttgctggtgcatgtttgtcacccaccctccctcatcaggtgcttataccttcccgtgatggcaacttgtactcttttgatactgtgtctggtgcccttctttgggtatacaaggctggggatccaattactgcatccacttttgttgatgagctgttaacatcagtgtcatttggaccatctgagagatttgcttgtatctgcacgagttccgggaaggtccatgtcatcagaattagagtagacatcagaactagagtagatgctaagtacaatcaggagcaaggtggtgacggtgttaaatctgaggagttagttcaaggactggatgctaagtacaatcaggagcaagctggtgaaggtgctaaatctgaggagttagttcaaggactggcatccattgatcttccgggggacatattttcgtctcccttgatggttggtggacgcatctttgttggatgccgagatgatcgattacattgtctcaccgtcaccacatagtttcaagtgattttgctggaggtgatatagttttgcccatgcctgctgcccgacaacctctcttccgcgacaagggcctttggcctttcctattggtaaggtgcgtggcaggctggcagcacaacacaggccacgaatgagtttggttgaagctcctgattgcatttggtgatttgggtctccaatgattgctttccatgtctacacaagaagctttccacagcctgctctcgcctaagcaagtgctacttgatgtcttgatcaaactgcctaggtgtcgagtttttgctagcccccaacagctcagctcttgtaagaagccctgccccgtcaaagatacttcgattttgctgcagccaaagaccaaagtgtcgcggattacaggactgataaaaccctttcttaactctttataaagatctctacacgcctttctctacgcctcagcatttggtactaggtgcccaaaacagaaggggacaaattgccgaacaaacacaactgcctcttccaaggtttaaaaacaagctttatagcaagatttggaagagaagctcctcaatgtctcatgcctccaaaaatggatatcattctccaagataaggatcacttcttccaaggtgcctcagataagaagatattgttgaatgccaactaaaattatctccaacagcttattcatttctatccttatattcaaactccactttgtaaacagtgtaatgtataatactccctccgtcccagtatatatggcgtaattatctcttgttcaaagatcaatcaatgtatttaattttctctataccactgcttcgatgtacgtatgcatagagagagcgcgccttatattatgggacaagaacaaaaagtggttacaccttgtattatgggacagagggagtataaaaacaaagttttagataactatatgagtaaactgttggacgtagcctaaga

SEQ ID NO: 79681 - DNA, 4750 bp, Zea Mays
ggctccccaacccaatcctccagctgcggaatggcggcggcggagccgtgctgcatctcgcacgcgttcgagcgcgccactcgccaggaacccggccgcctcgccgtcatccacgcagcggcctcgggcgccgacagcgaggagcgccgcttcacttgcggcgacctcctcgccgccgtcggctccctctcccgccgcatcgccgccgcgctcggcagcaccgccaccgatacccgccgcgaccgcgagcaaggctcagggtttcgggccgccggcgccgtagtgccgagggttgtcggggtatacgcctcgccatcgttggagtacgtcgccgccgtcctcgcggtgctcaggtgcggcgcggcgttcctcccgctcgacccgtcgtggccggaggagagggtctcgtgggctatctcggcgtccaacgcggcgctcgtcgtgtcttcagttgggtcgcgaggagccacgctgtttgagagcagcgcctgccctgttctgcgcttttatggtggcatccggcggcgatttcgggatggaaatggcggggatgacggggaggagcttgtctggccgtgcgagcacgagtggcaccgcaagttctgctacgtgatgttcacctctggttctaccggaaaaccgaagggtgtttgcggcactgagaaaggtcttctgaatcgttttttgtggatgcaaagaaggaatcctctgtgttcagatgatgttttgttgtttaagacatctgtcagctttgttgaccatctacaggagttcctttctgcggtcttgacttgctcaacacttgtcattcctcccagtgagtggagagctaatccagcatccttggccaacttaattaaggtttatcggatatcaaggatgacattggttccatcacttatggagataatactacctaccctggcggaaaaactttctgatggctgtaacccacttaagatcctaatatttagtggggaagttctgtctgtatcgctgtggaagagagtctatgaatttctgccagaggctactatcataaatctgtatggaacaacagaggtttccggtgactgtgcattctttgattgcaaaaaattgcctacaattttggagcaagaagaactaaacagtgtaccaattgggtttcctatttcaaattgtgaggtttctcttgtcaccaatgatggactatcagatgaaggtgaaatctctgtcagtggagcatgcttgtttactggatatttagctgatcccatgacaagtaactgccctgaaggcagtgaagttttagcatactacagaacaggtgactttgcccggcgcctaaagacaggcgaacttattttccttggaagaaaggaccgaattgttaaaatttatgggcaccgtttctcacttgaggaggtagaatccacattgagggatcatcctgatgtcagtgacgctgctgttacttttcaaagtaatggatctctggattttaaggcatacttggtgctgaggagtaataataaatttcttaaatgtactcagggttatagtggattacattcttcccgagatatcattgcaccacttcgaaactggctcatcatgaagtttccactagctatggtcccaaggctttttatccccatgaaatcattacctttgactttgtcaggaaagattgactatgtcaagttatctagcttggtttgtgcatttgagccttgtgaaattcatccagaaagcagtccagctgatcctcatatgcaagttatcaaaaaggcattttctgatgccctactggttcatgaagtgtctgagtatgatgatttcttctccttgggtggtaactcaattactgcagcacatgtggcccacaaattggagattgacatgagattactttatatttataccaccccttctaaactttttcatggtttacttggggaacacagtcatgtaattcctccaactcctgaatttcacaacagaaagaagttgagaaaatatgcaagcatatcagattcctttggcccagtttctgaatatttggacagtaactttcatgaccaagggcagataagtaaagagggtgcatacgatcactttgcagggaatcatgtaagtgatatagatggccagcttagcaaaagtaggacttacaatacataccaagcaaaaaacctgtgccctgatacatgctcaaatgatgaaattttcagtggcagaccatggatactaaattttcacttacaaaaggtgtggtctattggccgttgcaatagatttatgcatggttctgaagggatggtacaccttgaagatatttgttcatatgttccatataacaaaaagggttacctcgtgaaaatttggagcattcttctagattcatgtgttgatgcctcacctttgcttgtcataaacaatggaatgatgtccatctttattggttctcattcatatttgtttctttgcattgatggttatagtggttcagtgaggtggagtgtcaaattggaaggccgtatcgagtgttctgccgctataactggtgatttctcagaggttgttgttggatgctataaagggaaaatttacttccttgatatgtctacgggaaaattatcctggacctttcaaactgatggggaggtaaaaatgcaaccagttgtggacaagatgaggaatttaatatggtgtggctcgtatgaccattacttgtatgcgttaaattacaaagatcgctgctgcacatacaaagttttttgtggtggaagcatttatggatctcctgctattgacatggtatcatcaccggttcacaaaaaaacattttattagatgatatatacatataggctctaccgctctattagttttgtgtcatctatattacccctttgcaggcacaaaatgtaatctatgtcgcatctacgagtggccttgtgactgcagtatcatttaaggaaccatccttcagagttctttggcaatatgaagctggtgcgccaatttttggttctctcgccatagatcatcaaagtggaacagttatttgttgtttagtgaatggcctagttatgacattgaactcacaaggttctgttgtttggaaggcaactgttggtggtcctatttttgctggtgcatgtttgtcacccaccctccctcatcaggtgcttataccttcccgtgatggcaacttgtactcttttgatactgtgtctggtgcccttctttgggtatacaaggctggggatccaattactgcatccacttttgttgatgagctgttaacatcagtgtcatttggaccatctgagagatttgcttgtatctgcacgagttccgggaaggtccatgtcatcagaattagagtagacatcagaactagagtagatgctaagtacaatcaggagcaaggtggtgacggtgttaaatctgaggagttagttcaaggactggatgctaagtacaatcaggagcaagctggtgaaggtgctaaatctgaggagttagttcaaggactggcatccattgatcttccgggggacatattttcgtctcccttgatggttggtggacgcatctttgttggatgccgagatgatcgattacattgtctcaccgtcaccacatagtttcaagtgattttgctggaggtgatatagttttgcccatgcctgctgcccgacaacctctcttccgcgacaagggcctttggcctttcctattggtaaggtgcgtggcaggctggcagcacaacacaggccacgaatgagtttggttgaagctcctgattgcatttggtgatttgggtctccaatgattgctttccatgtctacacaagaagctttccacagcctgctctcgcctaagcaagtgctacttgatgtcttgatcaaactgcctaggtgtcgagtttttgctagcccccaacagctcagctcttgtaagaagccctgccccgtcaaagatacttcgattttgctgcagccaaagaccaaagtgtcgcggattacaggactgataaaaccctttcttaactctttataaagatctctacacgcctttctctacgcctcagcatttggtactaggtgcccaaaacagaaggggacaaattgccgaacaaacacaactggtaagaaaggtgttgaaccgttttttttgggtcgcaaagagggttagggtgatcgagtcctcttttctccgacctatatgttgtccaacattttatttctactttaaccaaagaaaagttttgtattttggtggtgtccatgatttccatagcctcttccaaggtttaaaaacaagctttatagcaagatttggaagagaagctcctcaatgtctcatgcctccaaaaatggatatcattctccaagataaggatcacttcttccaaggtgcctcagataagaagatattgttgaatgccaactaaaattatctccaacagcttattcatttctatccttatattcaaactccactttgtaaacagtgtaatgtataatactccctccgtcccagtatatatggcgtaattatctcttgttcaaagatcaatcaatgtatttaattttctctataccactgcttcgatgtacgtatgcatagagagagcgcgccttatattatgggacaagaacaaaaagtggttacaccttgtattatgggacagagggagtataaaaacaaagttttagataactatatgagtaaactgttggacgtagcctaaga

SEQ ID NO: 79682 - DNA, 3722 bp, Zea Mays
ggctccccaacccaatcctccagctgcggaatggcggcggcggagccgtgctgcatctcgcacgcgttcgagcgcgccactcgccaggaacccggccgcctcgccgtcatccacgcagcggcctcgggcgccgacagcgaggagcgccgcttcacttgcggcgacctcctcgccgccgtcggctccctctcccgccgcatcgccgccgcgctcggcagcaccgccaccgatacccgccgcgaccgcgagcaaggctcagggtttcgggccgccggcgccgtagtgccgagggttgtcggggtatacgcctcgccatcgttggagtacgtcgccgccgtcctcgcggtgctcaggtgcggcgcggcgttcctcccgctcgacccgtcgtggccggaggagagggtctcgtgggctatctcggcgtccaacgcggcgctcgtcgtgtcttcagttgggtcgcgaggagccacgctgtttgagagcagcgcctgccctgttctgcgcttttatggtggcatccggcggcgatttcgggatggaaatggcggggatgacggggaggagcttgtctggccgtgcgagcacgagtggcaccgcaagttctgctacgtgatgttcacctctggttctaccggaaaaccgaagggtgtttgcggcactgagaaaggagttcctttctgcggtcttgacttgctcaacacttgtcattcctcccagtgagtggagagctaatccagcatccttggccaacttaattaaggtttatcggatatcaaggatgacattggttccatcacttatggagataatactacctaccctggcggaaaaactttctgatggctgtaacccacttaagatcctaatatttagtggggaagttctgtctgtatcgctgtggaagagagtctatgaatttctgccagaggctactatcataaatctgtatggaacaacagaggtttccggtgactgtgcattctttgattgcaaaaaattgcctacaattttggagcaagaagaactaaacagtgtaccaattgggtttcctatttcaaattgtgaggtttctcttgtcaccaatgatggactatcagatgaaggtgaaatctctgtcagtggagcatgcttgtttactggatatttagctgatcccatgacaagtaactgccctgaaggcagtgaagttttagcatactacagaacaggtgactttgcccggcgcctaaagacaggcgaacttattttccttggaagaaaggaccgaattgttaaaatttatgggcaccgtttctcacttgaggaggtagaatccacattgagggatcatcctgatgtcagtgacgctgctgttacttttcaaagtaatggatctctggattttaaggcatacttggtgctgaggagtaataataaatttcttaaatgtactcagggttatagtggattacattcttcccgagatatcattgcaccacttcgaaactggctcatcatgaagtttccactagctatggtcccaaggctttttatccccatgaaatcattacctttgactttgtcaggaaagattgactatgtcaagttatctagcttggtttgtgcatttgagccttgtgaaattcatccagaaagcagtccagctgatcctcatatgcaagttatcaaaaaggcattttctgatgccctactggttcatgaagtgtctgagtatgatgatttcttctccttgggtggtaactcaattactgcagcacatgtggcccacaaattggagattgacatgagattactttatatttataccaccccttctaaactttttcatggtttacttggggaacacagtcatgtaattcctccaactcctgaatttcacaacagaaagaagttgagaaaatatgcaagcatatcagattcctttggcccagtttctgaatatttggacagtaactttcatgaccaagggcagataagtaaagagggtgcatacgatcactttgcagggaatcatgtaagtgatatagatggccagcttagcaaaagtaggacttacaatacataccaagcaaaaaacctgtgccctgatacatgctcaaatgatgaaattttcagtggcagaccatggatactaaattttcacttacaaaaggtgtggtctattggccgttgcaatagatttatgcatggttctgaagggatggtacaccttgaagatatttgttcatatgttccatataacaaaaagggttacctcgtgaaaatttggagcattcttctagattcatgtgttgatgcctcacctttgcttgtcataaacaatggaatgatgtccatctttattggttctcattcatatttgtttctttgcattgatggttatagtggttcagtgaggtggagtgtcaaattggaaggccgtatcgagtgttctgccgctataactggtgatttctcagaggttgttgttggatgctataaagggaaaatttacttccttgatatgtctacgggaaaattatcctggacctttcaaactgatggggaggtaaaaatgcaaccagttgtggacaagatgaggaatttaatatggtgtggctcgtatgaccattacttgtatgcgttaaattacaaagatcgctgctgcacatacaaagttttttgtggtggaagcatttatggatctcctgctattgacatggcacaaaatgtaatctatgtcgcatctacgagtggccttgtgactgcagtatcatttaaggaaccatccttcagagttctttggcaatatgaagctggtgcgccaatttttggttctctcgccatagatcatcaaagtggaacagttatttgttgtttagtgaatggcctagttatgacattgaactcacaaggttctgttgtttggaaggcaactgttggtggtcctatttttgctggtgcatgtttgtcacccaccctccctcatcaggtgcttataccttcccgtgatggcaacttgtactcttttgatactgtgtctggtgcccttctttgggtatacaaggctggggatccaattactgcatccacttttgttgatgagctgttaacatcagtgtcatttggaccatctgagagatttgcttgtatctgcacgagttccgggaaggtccatgtcatcagaattagagtagacatcagaactagagtagatgctaagtacaatcaggagcaaggtggtgacggtgttaaatctgaggagttagttcaaggactggatgctaagtacaatcaggagcaagctggtgaaggtgctaaatctgaggagttagttcaaggactggcatccattgatcttccgggggacatattttcgtctcccttgatggttggtggacgcatctttgttggatgccgagatgatcgattacattgtctcaccgtcaccacatagtttcaagtgattttgctggaggtgatatagttttgcccatgcctgctgcccgacaacctctcttccgcgacaagggcctttggcctttcctattggtaaggtgcgtggcaggctggcagcacaacacaggccacgaatgagtttggttgaagctcctgattgcatttggtgatttgggtctccaatgattgctttccatgtctacacaagaagctttccacagcctgctctcgcctaagcaagtgctacttgatgtcttgatcaaaggggctaaatgaaaaaaaat

SEQ ID NO: 79683 - DNA, 2007 bp, Zea Mays
gaaaagcccattccgctcatcactgaacaacccccggcggcaaccctccccacagatggccggcgaacccagcgccgccgtggcatcggggcccgaatccgcggccgaggccgaccgcctcctggcgctggccgagtcggagctctccgcgggcaggctccgagccgcgcgcaggcacgccctccgcgccgcccgcctgtacccgacctccccgcgcgccccggtggtggccaccgccgccaacgtgctcctcgccgacgcctcctcccaccacgccgcgctgctgctgcccgaacccgacgaccccgacgcctcgccgctctccgcctccgagctccgccgccactttaagtcgctcgtcaagtccctccgcgtaggcctcgacgccgccaccgcagccgcctacccctccgtcgccgccgccgctgaggaggcactcggccgcgccaccgaggcctacgaggcgctcaccgcccctgcccctgggaccttctggaccgcctgcgccgggtgccgcctcctccacgagttcgagcgcaagtatgtgggataccgcctcgcctgcccatcctgccgccgtaccttcatcgccgtggaggtcacacctccgccggaggacgaacccgttgcccgtaggcctgcgcctcagcggctgccaccggccaagaggccggagaagatggagatgacgctcgccgagatgcagctccagctcgtcaagaagcggaggggcgcagaggttccggagacctcttcccgagacttggtggtggcggaggaggaggaggacgccgccgccgaggaggctgaggcggagaacaaccatttagacctgatgcccgtggaggactccgacttctacaacttcgacgccgaccgtggcgagaggtgcttcaagagaggccagctgtgggctctgtacgtcgacgccgatggcatgccgcggcactatgcgctggtggatgaggtgcagcgaggcacccagttcagggtgcagatacggtggctcgatggcgaggaggggaagccggggaagccatgcggtcagttcaatgttgggagagcagacaccgtggattcggtgaacgtcttctcccaccttctggcctgcgagagggcagcgagcgaggtgtaccgggtttatcccaggaaggcctcggtttgggcgctccatggtggcgacagggcgaagataaagtatgacatcgtggtgatcctcagtggttacgatgatcggtatggtgccagcttcgggtacctggagaaggtggagggcttcaggagcatcttcacacgccgggacatcggaagccatgctgtccacttccttcagaagggtgatcttggggcgctttcgcatcagataccagccaggaaagtgcccaagggcgagggatcggtcctgcctcccggggattgctgggaacttgatcctgcatcgttgcctcccgagttgctgtgcctgtgcatcgaaccaccgaaatgacctgcttatggtgtcaaaggttgttgcaggtgttttagttgttaggatcggctgtgtatatggcacataaatcgcagaggaaggctgctggtttgttctgccatgtcaaatagtatgaggatccgtctgatttgccaactctagctgggcactgctcatgtttatgatccttcttcatgtagtttctcaggtagcatgattaaacttgtagctatttgagtgttaattcctggtacccatggtgtatgacatgaatggttttttggtactgatggcagactaacactgctctggtatatggatgattcttatgaacttcctttatattaaagccgagtcgaaacggctcctgtccggtgtacacgtcgctcaaatgcttctcagccgttggatttctcatcagcgcttaggatttcaggcgtgggttttccatcgttgccctccttcgcgctccaggaaacgacggttggcagcaacgcggaggatgaggcgaaggagtggactgtctaggtggatccatg

SEQ ID NO: 79684 - DNA, 3585 bp, Zea Mays
tccgctcctcggatctcttcatctattccccctcctcttctctctccgccggagaaattcaaaaccatactcctcggtactgtctctctccctccccccgtctttccgtctcatcgtttccttgcgcggcggttgctgctcgcccgatctgccgccgtcagccggcgcccgatctgctcctatactgtggcgcggaggcgcggagcagcagctaggaatacaaatacaagatgggcgcgtcaagacccccaagcacccctgcatcgaagggtgagcacacaccgatgtcgactcctggtggcagctcaagggccaaggaggagaagatttttgttacggtgagggtgaggccactaagcaagaaggagctggctgcgaaggatgacgtggcatgggaatgcgctgatacccagacaatcttgtacaagggccccgcgcaggaccgagctgcacccatgtcttacacttttgataaagtgtttgggccagcttgccaaacagacgtcgtctatgaagagggagctaaggatgttgcaatgtctgcactgacaggcattaatgccaccatttttgcatatgggcaaaccagcagtggtaaaacattcacgatgaggggcgttacagagagtgctgttagtgatatttatagacacatagatagtactcctgagagggaatttgtgataaaaatatctgctatggaaatttacaatgagattgtcaaggatcttctgcggcctgactctgttccccttcggttgttagatgatcctgagaaaggaaccattgtggagaagttgcaagaagaaattgcgaaggatagccaacatctgaggcatctaatcagcatttgtgaagaacaaagacaggttggggagacggcactaaatgacactagttcacgttcccaccaaatcattaggctgacacttgagagcaggctccgtgaagtttcaggatgtgttaaatctttcgttgctaacctgaattttgttgaccttgctggaagtgaacgagctgcacaaacacatgccataggtgcaaggttgaaagagggttgccatataaatcgcagtttattgactttgactactgtcatcagaaagctaagttcggggaaaagaagtggacacattccctaccgggactcaaagctgacacgcattctacagctttctttgggtggaaatgcaagaacagcaatcatctgtaccatgagcccagccctgacacatgtagaacaatctagaaatactctattcttcgcaacctgtgcaaaggaagtcacaaatactgcgaaagttaatatggttatatcagataagcaattggtgaagcaccttcagacagaacttgctagactagaatcagagctgaggacccctgaccgtggctcctcttctgatatcctcataatggaaaaggacaggaagattagacagatggaaattgaaatagaggaactcaggaaacagcgagataatgcacagtcagagctcgaagaactgaggaagaagaaggttgatcaccagccagggtggaatccctttgactcgccacaaaaggcgcgaaagtgccttacattttcaggatcgctagagccaagtaacaaaaataagatgatgatgagctcgattaggcaatcatctactgctccatttatgttaaagcatgaaatccgcaagctggagcagctacaacaacagcttgaggttgaagcaaaccgcgccattgaagtacttcacaaagaagttgaatgccacaagcatggcaaccaggatgctgcggaaaccatcgctaaacttcaggcagaaatcagggagatgcaaactgttaggtctgagaacagagacatggagatgattacagatgaaggaaatggatccgatttgaaagatgagatttctagacttcatatgcaagacaatgatattgccaaacttgaggcgaagctggaaaatgtgcaacggtctattgacagattggtgatgtcacttccaaacgttgccatgccgtgtaatgagactaccccaaagtcaaacagatcaaagaagaagaagaggctgcttcttcctctgggtgtgagcaacaacatcaacagagcaaatcttctcagagcaccctgttctccccattcttctagtaggccttcggaatcagaagttgagaacagggcgccagagggtgacactatgtctgttgagggttcagaaaaggctactcccaccaagagtgaagatggagatatgtcatctcgtgatgaaacgccacgctacaggcgctccagttcagtcaatatgaaaaagatgcagaggatgttccaaaatgctgcggaagaaaacgttaggagcatcagggcttacgtgactgaactgaaggagcgagttgcaaaacttcagtaccagaagcagctgctagtctgccaggtcctggagctggaatctaacgagggcaagccgaatggagaggataattctgggcctctacaggatggtcctgattcatgggacagattattcaaagagcagatgcagtgcatcattcatctgtgggatcagtgtcaagtatcgatcatacacaggacccagttctacctgttattcaggggggacaaggctgatcagatatacatcgaggtcgaagtaagaagactcgtatggttgcagcagcactttgccgaggtcggtgatgcaagccctggtgctgttgaagaccctgcagtttcacttgtctccagtatgaaggcgctgaggaacgagcgagagttcctcgcgagaaggatgggatcaaggctgacggacgaagagcgtgagcggctcttcatcaagtggcaggtgcccctggacgcgaagcagcggaagctgcagctggtgaacaagctgtggacggaccccaacgaccaggcgcacatcgacgagagcgcggggctggtggcccggctggtgggcttctgcgagggcggcaacatcagcaaggagatgttcgagctcaacttcgccgtccccacgagcaggaggccgtggctggtgggctggcaacccatctcgaacatgatcagggagaagacccagcagctctggtgagaactgaacgcatcatggcgcagcgccgtgttgtacagatggaatggaacaagagacagacagtgcatttcggtttcagctctggaaattgctgatcaattaattgtggggggaagcgtctctacttccttcccggttgatcaaggcggacaagcggtcgtcggtctggtatccccttcctgtgtccctaaatgtagatggcgaattcgtggagtccgaagaatctgaatgatctcgcattctttacgtaatcccttgccaattttatggcaagttttgtttgctccatttgttttatggtatgatgatctggatctgatgagcccattcaaattcttttgccgagcccccctccctctttttctgctgtctgtctgtgcatcggaattgctggatctatcacgatcttgtttgtcaatcacatcgcaaatacacccaacttttgtttggcacatgcatcgattcagagtttcagacaagaaattcagagtctaactccata

SEQ ID NO: 79685 - DNA, 1173 bp, Zea Mays
caaaaatcgtccagtgttttttttttcgttctttgccgtttctgcacacaagcacccatggcgacggcggtggaggttcccgtggaggcgccggtgaggacagtgaaggtcaccaatgtctctcttagtgcaactgtgcaagacattaaggagttcttttccttttcaggagatattgatcatgtggagatgcagagtggtgatgagtggtcccaagttgcatatgtcactttcaaagatgcacaaggcgcagaaacagcacttcttctttcgggtgccacaatagttgatctttctgtcatcattgcacctgctccagagtatcagccacctcctactgcctctgctccaccaatgagtggaaccagagttccagttggtggtggagacaacaacgttgttcacaaagccgaggacgttgtgagcactatgcttgccaagggtttcgtgctaggcaaagacgcggttggcaaggccaaagcattcgatgagaagcatggcttcacatccacagccggtgctacagtggcctcaattgacaagaagattgggctgactgataagatcacgacaggcacttccttggttagcgggaaggtgaaggagatggaccagaagttccaggtctccgacaagaccaagtctgcactcgctgccgccgagcagaaggtgagcagtgccgggtctgccatcatgaagaacaggtacgtcttcaccggcgcgtcatgggtcaccagcgcgttcaacaaggtcgccaagaccgccacggacgtcgggacgatgaccaaggagaagatggccgccgaggagcatcacaagggctctggcccgtcttctggcggccactcgtacacgcccatccgatgattcatgcattggcttgctgttacgtgcctcactcaaacggtgttgtactgcatattggtggatgtaaaacatggtcttttagtcccaactcttattatgttgtggttagctagagttgaaacctaatagaaaccacaagttaaggttcaagcacatgaatacctattttccatacacatatatttaaagttaaattttgtactcttatcattttaagtcttctttatcgtctttccacatattaaagttggtatttctctatatctctttccatagctgtcgcgctttaggatactactatgtacg

SEQ ID NO: 79686 - DNA, 1128 bp, Zea Mays
aaaaaagtcaatgagatctagctcatgagctttacaggcatcccaatggtgaggacagtgaaggtcaccaatgtctctcttagtgcaactgtgcaagacattaaggagttcttttccttttcaggagatattgatcatgtggagatgcagagtggtgatgagtggtcccaagttgcatatgtcactttcaaagatgcacaaggcgcagaaacagcacttcttctttcgggtgccacaatagttgatctttctgtcatcattgcacctgctccagagtatcagccacctcctactgcctctgctccaccaatgagtggaaccagagttccagttggtggtggagacaacaacgttgttcacaaagccgaggacgttgtgagcactatgcttgccaagggtttcgtgctaggcaaagacgcggttggcaaggccaaagcattcgatgagaagcatggcttcacatccacagccggtgctacagtggcctcaattgacaagaagattgggctgactgataagatcacgacaggcacttccttggttagcgggaaggtgaaggagatggaccagaagttccaggtctccgacaagaccaagtctgcactcgctgccgccgagcagaaggtgagcagtgccgggtctgccatcatgaagaacaggtacgtcttcaccggcgcgtcatgggtcaccagcgcgttcaacaaggtcgccaagaccgccacggacgtcgggacgatgaccaaggagaagatggccgccgaggagcatcacaagggctctggcccgtcttctggcggccactcgtacacgcccatccgatgattcatgcattggcttgctgttacgtgcctcactcaaacggtgttgtactgcatattggtggatgtaaaacatggtcttttagtcccaactcttattatgttgtggttagctagagttgaaacctaatagaaaccacaagttaaggttcaagcacatgaatacctattttccatacacatatatttaaagttaaattttgtactcttatcattttaagtcttctttatcgtctttccacatattaaagttggtatttctctatatctctttccatagctgtcgcgctttaggatactactatgtacg

SEQ ID NO: 79687 - DNA, 1689 bp, Zea Mays
ctcctagtaaacactaaacaccgtgcgtgatgctctgttattgatgccctgcttggcagctaccccaccgccatccctgattctccagccacatgctgccaaaagcaactaaaatttgtctctgacgattcttctgccctcgcggccggtccatccaaagcgactggttttttgtttttttttttaattcagacacgaatatgttctgaacatctatctagctctctctctctgagctagatttatgtggttcggtcgcacgggcgtgtaccgaagcttcatgttcagcagcccgactgtgctggtgacgacggcggaggggtgcaagcaggtgctgatggacgacgacgcgttcgtgacggggtggcccaaggcgacggttgcgctggtcgggccgcggtcgttcgtggcgatgccgtacgacgagcaccggcgcatccgcaagctgactgccgcgcccatcaacggcttcgacgcgctgacggggtacctgcccttcatcgaccgcaccgtcacgtcgtcgctgcgcgcgtgggcggaccacggcggcagcgtcgagttcctgacggagctgcggcgcatgacgttcaagatcatcgtgcagatcttcctgggcggcgcggaccaggccaccacgcgcgcgctggagcgcagctacacggagctcaactacggcatgcgcgccatggccatcaacctgcccggcttcgcgtaccgcggggcgctgcgcgcgcgccgccgcctcgtggccgtgctgcagggcgtgctggacgagcgccgcgccgccagggccaagggggtctcgggcggaggagtggacatgatggaccggctgatcgaggcccaggacgagcgcgggcggcacctggacgacgacgagatcatcgacgtgctcgtcatgtacctcaacgccggccacgagtcgtccggccacatcaccatgtgggccaccgtgttcctgcaggagaacccggacatgttcgcgagagcaaaggcggagcaggaggcgatcatgaggagcatcccgtcgtcgcagcgggggctgacgctcagggacttcaggaagatggagtacctgtcgcaggtgatcgacgagacgctgcggctcgtcaacatctccttcgtctccttccgtcaggccaccagagacgtcttcgtgaacggatacctcatccccaaggggtggaaggttcagctctggtaccggagcgtgcacatggacccacaggtgtaccctgaccccaccaagttcgacccgtcgagatgggagggccactcgccgagagccggcacgttcctggcgttcgggctgggcgccaggctctgccccggcaacgacctcgccaagctggagatttccgtcttcctccaccacttcctcctcggctacaagctggcgaggacgaaccctaggtgccgggtgaggtacctgccgcacccgaggccggtggacaactgcttggccaagatcaccagagtcggtagctagctgctagattgtgatggaagtacgaatgaaaaaaaagcccagcagaaactctagcggctgggccggctggaaattatgggccgggccattgtggttgccccccctgtctgtgcaaaaataaaacaagcagaaaggaataaaaaaaaggaaaagtattacttcgaacgctgaaattcttggtcgggtcgggcctgttttcg

SEQ ID NO: 79688 - DNA, 1492 bp, Zea Mays
gtgttgctcactcgcttgctcctcctcgcagtctcaatggatggatgaatcagttcggtcgcacgggcgtgtaccgaagcttcatgttcagcagcccgactgtgctggtgacgacggcggaggggtgcaagcaggtgctgatggacgacgacgcgttcgtgacggggtggcccaaggcgacggttgcgctggtcgggccgcggtcgttcgtggcgatgccgtacgacgagcaccggcgcatccgcaagctgactgccgcgcccatcaacggcttcgacgcgctgacggggtacctgcccttcatcgaccgcaccgtcacgtcgtcgctgcgcgcgtgggcggaccacggcggcagcgtcgagttcctgacggagctgcggcgcatgacgttcaagatcatcgtgcagatcttcctgggcggcgcggaccaggccaccacgcgcgcgctggagcgcagctacacggagctcaactacggcatgcgcgccatggccatcaacctgcccggcttcgcgtaccgcggggcgctgcgcgcgcgccgccgcctcgtggccgtgctgcagggcgtgctggacgagcgccgcgccgccagggccaagggggtctcgggcggaggagtggacatgatggaccggctgatcgaggcccaggacgagcgcgggcggcacctggacgacgacgagatcatcgacgtgctcgtcatgtacctcaacgccggccacgagtcgtccggccacatcaccatgtgggccaccgtgttcctgcaggagaacccggacatgttcgcgagagcaaaggcggagcaggaggcgatcatgaggagcatcccgtcgtcgcagcgggggctgacgctcagggacttcaggaagatggagtacctgtcgcaggtgatcgacgagacgctgcggctcgtcaacatctccttcgtctccttccgtcaggccaccagagacgtcttcgtgaacggatacctcatccccaaggggtggaaggttcagctctggtaccggagcgtgcacatggacccacaggtgtaccctgaccccaccaagttcgacccgtcgagatgggagggccactcgccgagagccggcacgttcctggcgttcgggctgggcgccaggctctgccccggcaacgacctcgccaagctggagatttccgtcttcctccaccacttcctcctcggctacaagctggcgaggacgaaccctaggtgccgggtgaggtacctgccgcacccgaggccggtggacaactgcttggccaagatcaccagagtcggtagctagctgctagattgtgatggaagtacgaatgaaaaaaaagcccagcagaaactctagcggctgggccggctggaaattatgggccgggccattgtggttgccccccctgtctgtgcaaaaataaaacaagcagaaaggaataaaaaaaaggaaaagtattacttcgaacgctgaaattcttggtcgggtcgggcctgttttcg

SEQ ID NO: 79689 - DNA, 1322 bp, Zea Mays
gcaacgtcagcataccatctatctgtcttctctcgctcatgtgcaccagacagaggcaacgaactgcctcacgaacgccacgccgccatttcccgcaagcaaagccatccaaaccgttcgctactgcctactactagtagctcgatcgtcgtcgtcatcttcgtcgtttcgctctcagttggcggttagctagcttgcatactagcatcaggtgccccttgccgagccgtacgtgtcgtcgtcgacgacgatggtggcggcgcccagcaagtgccggccgtcggcggcagcgctggtggtggcaccgccgggggcccctcggcgccagctgcggtgccggtgctgcgaggacacgctgggcgtcccgcgccgccggctgcagccgcagctgcacctgaagcagcaggcacctgcggcgacgaccgcccccgccgcggcgccgccgccgaggccccggcggatcgtgctggtgcggcacggcgagagcgagggcaacgtggacgaggctgcatacacgcgcgtcccggaccccaggatcgggctcaccgccaagggctggcgcgaggccgacgactgcggccgccgcctgcgcgacctcttctcctctggatcccgcgaccaggacgactggaaggtctacttctacgcgtcgccgtaccgccgcagcctggagaccctgcgcggcatcggccacgccttcgagccccaccgcatcgccggcgtccgcgaggagccccgcctccgcgagcaggacttcggcaacttccaggaccgggagcagatgcgggtggagaaggagatccggcaacgctacggccgcttcttctaccgcttccccaacggcgagtcggcggcggacgtgtacgaccgcatcaccggcttccgggagaccctgctctccgacatcgtcctcggccgcttccagcccccgggccaccgcagcaccagcggagacatgaacatcgtgctcgtctcccacggcctcaccctccgcgtcttcctcatgcgctggtacaagtggaccgtccgccagttcgagggcctcgagaacctcgccaacggcggcgagctcgtcatgcagactggagaaggcggcaggaccagatgtggcagaagacggccaggcccggcgagctcaaccaccgcttcatgacaaacggacagtccttctttgatccatttactgtaatctactagttcttgacgaccgaccacatgttatgtatgtgataagtgattaaatgtttttttttatggctgtacacattttttcccgtttccattcaaatgctgcagttaagaatatccgaaatgacatcaga

SEQ ID NO: 79690 - DNA, 706 bp, Zea Mays
gtaccatctttcttgtcttgttttcttatccacatgatccccacccgtcagcgcatccgagaaatcctcatggcaacttccaggaccgggagcagatgcgggtggagaaggagatccggcaacgctacggccgcttcttctaccgcttccccaacggcgagtcggcggcggacgtgtacgaccgcatcaccggcttccgggagaccctgctctccgacatcgtcctcggccgcttccagcccccgggccaccgcagcaccagcggagacatgaacatcgtgctcgtctcccacggcctcaccctccgcgtcttcctcatgcgctggtacaagtggaccgtccgccagttcgagggcctcgagaacctcgccaacggcggcgagctcgtcatgcagactggagaaggcggcaggtacagcctcctagtgcaccacacgcccgacgagctcagggcgttcggcctcaccgacgagatgctgcaggaccagatgtggcagaagacggccaggcccggcgagctcaaccaccgcttcatgacaaacggacagtccttctttgatccatttactgtaatctactagttcttgacgaccgaccacatgttatgtatgtgataagtgattaaatgtttttttttatggctgtacacattttttcccgtttccattcaaatgctgcagttaagaatatccgaaatgacatcaga

SEQ ID NO: 79691 - DNA, 1286 bp, Zea Mays
tcgtgagcatccagcgacgagcaagcccaacaagaaaatgcagctgcatgttttctgttgtgacctaagcccaacaagaagagaaatctcgggcgggtgagcagcccaacaggcaacagcagctctccaccttcctcaccctttcctcctgaatcctgatatttcctcctttccccatcccttcccctggcttcacggctcggctggctgcacgccggagccccggcgccagatctcgccaagtgccagggccgccgcaggcccctctttgcctgcgcgagtctcagaatcccgagagggaaaaagaaaagaaaagatgatgacttcctctgcctgttactacctgtgccgctccctcgtccgggctcctccgctcaagtcgaggagtgcagtgcgctgtccaagcgccgccccgccaggagccagcggtgccacctccacctccaagacacaggatccagttgaaaaccagaagctatgtgcctatttggttgagaaggcagtcaatagacttccgccaggagcagagaatatacttgggatctttgatctgcgaggctttcgggttgaaaatggtgatctccagttcctaaagtttttgatggacgttttttactattactacccgaagcggcttggccaagttctttttgtcgatgctccatttgtttttcaaccaatgtggcaggttgttaaacctctgttgaaatcatatgcctccctggtaagattttgtgataccgagactgtgaggaaggaatacttcaaagaagaaactgtgcctcctgatttccgcgattaggtgacatgattatttcttcagtaattgcaagtggtctcggaaacatgacctttaattgattgagaatcgattggcacccaggggggctggcgccttcctataccttttgattaacttctcaaaagttgctcagacgacaacaaacgattggagagtccagtaaaaaatgaccctgtagtcctgtacttgtataacttctgcgaagtagaatgctgagtttaggctgctgtctggagtgctcctgtaccatatttttctggttttggatgaagctatatggaccaaattcatctctgttgaacaattgccaattacataacttgtgtttgcccaattccatggtgtagtaccataacttctcagtgcagtgcagacaacacatggattccatttttgattaaagtatcatctgctacaaatatgaatcatggtttagtttgtagacatcataaagaaacacacagattaatcaaaccagtcttcg

SEQ ID NO: 79692 - DNA, 1137 bp, Zea Mays
cagctctccaccttcctcaccctttcctcctgaatcctgatatttcctcctttccccatcccttcccctggcttcacggctcggctggctgcacgccggagccccggcgccagatctcgccaagtgccagggccgccgcaggcccctctttgcctgcgcgagtctcagaatcccgagagggaaaaagaaaagaaaagatgatgacttcctctgcctgttactacctgtgccgctccctcgtccgggctcctccgctcaagtcgaggagtgcagtgcgctgtccaagcgccgccccgccaggagccagcggtgccacctccacctccaagacacaggatccagttgaaaaccagaagctatgtgcctatttggttgagaaggcagtcaatagacttccgccaggagcagagaatatacttgggatctttgatctgcgaggctttcgggttgaaaatggtgatctccagttcctaaagtttttgatggacgttttttactattactacccgaagcggcttggccaagttctttttgtcgatgctccatttgtttttcaaccaatgtggcaggttgttaaacctctgttgaaatcatatgcctccctggtaagattttgtgataccgagactgtgaggaaggaatacttcaaagaagaaactgtgcctcctgatttccgcgattaggtggtctcggaaacatgacctttaattgattgagaatcgattggcacccaggggggctggcgccttcctataccttttgattaacttctcaaaagttgctcagacgacaacaaacgattggagagtccagtaaaaaatgaccctgtagtcctgtacttgtataacttctgcgaagtagaatgctgagtttaggctgctgtctggagtgctcctgtaccatatttttctggttttggatgaagctatatggaccaaattcatctctgttgaacaattgccaattacataacttgtgtttgcccaattccatggtgtagtaccataacttctcagtgcagtgcagacaacacatggattccatttttgattaaagtatcatctgctacaaatatgaatcatggtttagtttgtagacatcataaagaaacacacagattaatcaaaccagtcttcg

SEQ ID NO: 79693 - DNA, 4019 bp, Zea Mays
ccaccttcctcaccctttcctcctgaatcctgatatttcctcctttccccatcccttcccctggcttcacggctcggctggctgcacgccggagccccggcgccagatctcgccaagtgccagggccgccgcaggcccctctttgcctgcgcgagtctcagaatcccgagagggaaaaagaaaagaaaagatgatgacttcctctgcctgttactacctgtgccgctccctcgtccgggctcctccgctcaagtcgaggagtgcagtgcgctgtccaagcgccgccccgccaggagccagcggtgccacctccacctccaagcttgtcctagaggtgaaagaacggctagcaagggagcacccaggcctccccacgggcaggaacgggagggacgatgacgacatggtcctctggttcctaaaggaccgcaagttctccgtcgatgaagccgtctccaagctcaccaaggcgatcgtatcctctaattcactcgtaccagtgaagctcacacctaatagcttctttactcgctcaataatttcctggtatttttttgacgaaggggcgaagccccctatttcattaagaaataggtacgtttgaaacaaccgccatcacgcggtaatatcaccaaaagatcaaccacggccagaacgctatctagactctaaaacactatcactagaacagtgacgagcctacgataacaggagaagttttgcctactaaggactacataagactttcttatatacatccaccaagacaggcagagagccacaaaagacctgaacagtttggccagcaaaagacagacaaatatcctcgcacagcttctaagttccaacttcttgtcatccagaaatacgcctgtcaagtgggcaccaccccaaggccctcccgaaagcttcacttgccgtctttcggattaacttgctttctagcaccaccattctttgctccttctttttctgccgaatcgcccaggaatccaaccagaagcggcaaagaaaaatgatgttagaagggtcaagtaaatgattttttccaaagcaccaatcatttctagtgcgccaaatagcccagaataaagcaccacaaccaaataacacaagatgagccatcttgtctgttggtttacacaaccaattatcatacaagtctttgatattattcgggattgatctcaaattcaaagaaacttgaacaactctccacatgtattgagcaatggggcatttgaagaaaaggtggtcaatagattcatccaccccacagaagcagcagtttaaagatccaatccaacatctttttttcaaattatccttagtaagaatcttatttcttaccactaaccagaagaaaaccttgattttatgaggcaatttagatttccacaaaaatttatatggaatcaaagattgattttccatttttttcctgtacaaagaattaactgagaagcctttttcccccagggaccaaacaatcttatcttcttgatcagatagatttacctgattacaataactaatcaactcatcataaatcaatttcagattacccacaatccttcttctgaaagtaagggatgcaaattttgaagtgaaaacttcgttaacagagacatctttgtcataggtcaagtcaaacaaaacatgaaaacgaatagacaaaggttggttacccaaccaaatgcttttccagaaactagtttttaaaccattgccaacttcagatttacagtatttgtaaaagaagtcacgtaaactcagaagctttttccagaagtgtgaatcattttgtttttgcttaactaaaataaggggctttcccttaagatacttactagcaataatcttttgccataaaccattcgaattttcaatatgccaaagctatttagcaagaagggcgtcattcataacctcaagatttaaaacacccaaaccaccctgacttttgggagaacaaacagacccccaatcagcaaggtgaaattttctggactgttttccccctgccataaaagcctccttctcaacaaatcaatttttttgataacagtcttgggtgcaggatagattgaaagcatatataaaggaacattagaaaggcaactatttagcagagtaagtctaccacccagactcaggaatctaccctgccacccagctaatcttttttccaacttctcaatcatgggataccaaagacttttattgatcttcttcttatcaattggcacaccaagatatttcataggaagattacctataggacaagtaaaaatatcagcatacaaaaagtctatatctttagcctcaccaaagcataatatttcacttttgtgaaaattaattttcaaacctgacatgctttcaaacaaacataaaatgaatttaagatttctggctccttctaaacaatcttgaataagaaaaatggtatcatccgcatactgcaaacaacagcaaccattctgaataatgtgaggaatcagaccttcaatcagaccttcctcccgagccttcttaatcatacaagctaaaccatcagcaaccaaattgaataataggggagaaaaaggatctccttgcctcacccctttgtgagttgtgaaataagggcccagaatatcattagtcttgatggcaactttaccacctctcacgatcctcatgacccaatcacaccacttactaccaaaaccttttttctccatcatatagtaaaggaaatgccaattcactttgtcataagctttttcaaaatcaatttttaaaactactccactttgatttttccttttaacttcatggagaatttcattaagcgaaatgacgccatccatgatatatctattcttgatgaaaccatattgagaatcacttatcacttttgtgatacaactcgccagtctgttattcaaaactttggaaatgatcttatagcacacatttagaagacagataggtctaaaatttttcatgtcagctctggtatggtaaccgagttcatataagcacctctaatcttcagttttcctttcaactgcattagaaatggcgttaggactttggtgttgcagagttatcagaggaatcagtgaaaatcctgtaccaaactggcaaggcatatgtacatgattccttggacatttatggccgaccagtgctaattgtagtggcagccaaacattttccttcgacacaggatccagttgaaaaccagaagctatgtgcctatttggttgagaaggcagtcaatagacttccgccaggagcagagaatatacttgggatctttgatctgcgaggctttcgggttgaaaatggtgatctccagttcctaaagtttttgatggacgttttttactattactacccgaagcggcttggccaagttctttttgtcgatgctccatttgtttttcaaccaatgtggcaggttgttaaacctctgttgaaatcatatgcctccctggtaagattttgtgataccgagactgtgaggaaggaatacttcaaagaagaaactgtgcctcctgatttccgcgattaggtggtctcggaaacatgacctttaattgattgagaatcgattggcacccaggggggctggcgccttcctataccttttgattaacttctcaaaagttgctcagacgacaacaaacgattggagagtccagtaaaaaatgaccctgtagtcctgtacttgtataacttctgcgaagtagaatgctgagtttaggctgctgtctggagtgctcctgtaccatatttttctggttttggatgaagctatatggaccaaattcatctctgttgaacaattgccaattacataacttgtgtttgcccaattccatggtgtagtaccataacttctcagtgcagtgcagacaacacatggattccatttttgattaaagtatcatctgctacaaatatgaatcatggtttagtttgtagacatcataaagaaacacacagattaatcaaaccagtcttcg

SEQ ID NO: 79694 - DNA, 2820 bp, Zea Mays
ccggaattgagatgggtggaacggtttccctccacaaccacttgctcctcatctacttttctcctccgccttaaactcatccttgctcctgcctgccgtcgtgcatcatcatctccggccagggccagggcattcgtctccgcctccggtccggcctcctccactccgcgcccccccagacgcgtcgctgcgtagctgctggccgccatggccaccgtcatggccgcggccgtctagtccttcccgtcctcctcggccgtcgtcgccaaggcgtcgccggcgtccccctgtgccgccccgcacttccgcccgagggccgtgcgggccgctatccgggcgcaggcgtccgccgtcgaggcgcccgccacggccaaggccaagaaggagtccaagaagcaggaggagggcgtcgtcaccaacctatacaagcccaaggagccgtacgtcggcaggtgcctcctcaacaccaagatcaccggcgacgacgcgccgggggagacgtggcacatggtcttcagcaccgaaggcccttctttgcctgcgcgaggtctcagaatccggggggaaaaagaaaagaaaagaaaagatgatgactgtctctacctcttgctacatgtgccgcttcctcgtccgggctcctccgctcaagtccaggagtgcagtgcgctgtccaagcgccgccccaccaggtgctagcggtgccacctccacctccaagcttgtcctagaggtgaaagaacggctagcaagggagcacccaggcctccccacgggcaggtacgggagggacgatgacgacatggtcctctggttcctaaaggaccgcaagttctccgtcgatgaagccgtctccaagctcaccaaggcgattgtatcctctaattcactcgcttgtagcagtgaagctcacacctaatagcttctttactggctcactaaattcctggtatggtaaccgagttcatatagcactgctatcttcagttttcctttcaactgcattagaaatggcgtcaggactttggtgttgcagagttatcagaggaatcagtgaaaagcctgtaccaaactggcaaggcatatgtacatgattccttggacatttatggccgacctgtgctgattgtagtggcagccaaacattttccttcgacacaggatccagttgaaaaccagaagctatgtgcctatttggttgagaaggcagtcaacagacttccgccaggagcagagaatatacttgggatctttgatctgcgaggctttcgggttgaaaatggtgatctccagttcctaaagtttttgatggacgttttttactattactacccgaagcggcttggccaagttctttttgtcgatgctccatttgtttttcaaccaatgtggcaggttgttaaacctctattgaaatcatatgcctccctggtaagattttgtgatgccgagactgtgaggaaggaatacttcaaagaagaaacggtgcctcctgatttccgcgattaggtgacatgattatttcttcagtaattgcaaggcagttctacctctgcctttgtgtaacgattgaaattctaaattgtgcagattatttttagttcttccaatccctcctaaaagctattttgcagaaatgtgcaggtggtctcggaaacatgacctttaattgattcagaatcgattggcacccaggggggctggcgccttcctataccttttgattaacttctcaaaagttgctcagacggcagcaaacgattggagagtccagtaaaaaatgaccctgtacttgtataacttctgcgaagtagaatgctgagtttaggctggtgtctggagtgctcctgtaccatatttttctggttttggatgaagctatatggaccaaattcatctctgttgaacaattgccaattacataacttgtgtttgcccaattccatggtgtagtaccataacttctcagtgcagtgcagacaacacatggattccattttttgattaaagtatcatctgctacaaatatgaatcatggcttagtttgtagacttcataaagaaacacacagattaatcaaaccagtcttcgaagagtctctgtggataggaacgttccaaagcaaagtaagatgcaagttgtattgcataaaaaccaggtacacatcaatcagctgcattctggaagactaaactgcaacacaactacatctgcaatcacagagaaatcaggtcaacaacggagagggtcaagcgatccccacgtacagatgccagcatggtcttttacatggttccaagaggaggggctcattcaagtactctactgatcgaaaatggatggcgtctgtgatggttcattcttttgcacgtcttctacacgggtacattgacggttgatggagatggatggtggtgtagctgttttgtttagcaattagcactctaggtgttggaccactgttttgttaatggatgctatgtaacagtagtatgtaactaatgtgaacttgtttaggttgctgtgaaactgttatacaacacattgttatggggttgttacacagctgatatgttatgaacatgatatggagatatcttttcctttttggtttgggttttactgttgtgccattcgtctcataagttatgccattttattatttacttttggattgatatatattcgtctctgaagccttccttcactacaatatgtctctgtcatcaacgtatccactggctgagacacgaagccgtggatagcttcctttatggccgtgtccacgcttccgcatctcatattttttcttatcaaaagatg

SEQ ID NO: 79695 - DNA, 1678 bp, Zea Mays
acggtttccctccacaaccacttgctcctcatctacttttctcctccgccttaaactcatccttgctcctgcctgccgtcgtgcatcatcatctccggccagggccagggcattcgtctccgcctccggtccggcctcctccactccgcgcccccccagacgcgtcgctgcgtagctgctggccgccatggccaccgtcatggccgcggccgcgtccgccgtcgaggcgcccgccacggccaaggccaagaaggagtccaagaagcaggaggagggcgtcgtcaccaacctatacaagcccaaggagccgtacgtcggcaggtgcctcctcaacaccaagatcaccggcgacgacgcgccgggggagacgtggcacatggtcttcagcaccgaaggcccttctttgcctgcgcgaggtctcagaatccggggggaaaaagaaaagaaaagaaaagatgatgactgtctctacctcttgctacatgtgccgcttcctcgtccgggctcctccgctcaagtccaggagtgcagtgcgctgtccaagcgccgccccaccaggtgctagcggtgccacctccacctccaaggtaaacccacacctactacctgtgtgcttcgtaaggcctatctacacctgcaggctgcagccaccagcacagggatatgtaccagcctgctcgtttcagctggaacagtattctccagttttggattggaacatgcagccacagccaaaagtagctgaagcgattggagttgtagcttttcggggataatcaaatgataggagagtggaggtggtggatcatgtgtaagctttagactactgactgattcacttgtctatccggcgctggttgctttccctgtgtgaagcttgtcctagaggtgaaagaacggctagcaagggagcacccaggcctccccacgggcaggtacgggagggacgatgacgacatggtcctctggttcctaaaggaccgcaagttctccgtcgatgaagccgtctccaagctcaccaaggcgattaaatggcgtcaggactttggtgttgcagagttatcagaggaatcagtgaaaagcctgtaccaaactggcaaggcatatgtacatgattccttggacatttatggccgacctgtgctgattgtagtggcagccaaacattttccttcgacacaggatccagttgaaaaccagaagctatgtgcctatttggttgagaaggcagtcaacagacttccgccaggagcagagaatatacttgggatctttgatctgcgaggctttcgggttgaaaatggtgatctccagttcctaaagtttttggtgagtttggtagcttcaaggcatgactaagcatctctgattacctttttttcggtggtagacatgcatatttttatttgtgacgatatgaatgaaacattgtgtttatttgtgacgatatgaatgaaacattgcggccgtggcggctgtggttccggcgggaactgccgatctggaggactccaacccgccaccgccaatccccccgtcgatggttgtcgatccgccgcctcctccaccgctcacccaccaggaagacactgtcgccgccctcaccgctgctcgtgcagagcacgctgctcgacaggcccgcttgcgggaagcggccctcgcgtgggagcgcgcgcgc

SEQ ID NO: 79696 - DNA, 1389 bp, Zea Mays
acggtttccctccacaaccacttgctcctcatctacttttctcctccgccttaaactcatccttgctcctgcctgccgtcgtgcatcatcatctccggccagggccagggcattcgtctccgcctccggtccggcctcctccactccgcgcccccccagacgcgtcgctgcgtagctgctggccgccatggccaccgtcatggccgcggccgcgtccgccgtcgaggcgcccgccacggccaaggccaagaaggagtccaagaagcaggaggagggcgtcgtcaccaacctatacaagcccaaggagccgtacgtcggcaggtgcctcctcaacaccaagatcaccggcgacgacgcgccgggggagacgtggcacatggtcttcagcaccgaaggcccttctttgcctgcgcgaggtctcagaatccggggggaaaaagaaaagaaaagaaaagatgatgactgtctctacctcttgctacatgtgccgcttcctcgtccgggctcctccgctcaagtccaggagtgcagtgcgctgtccaagcgccgccccaccaggtgctagcggtgccacctccacctccaagcttgtcctagaggtgaaagaacggctagcaagggagcacccaggcctccccacgggcaggtacgggagggacgatgacgacatggtcctctggttcctaaaggaccgcaagttctccgtcgatgaagccgtctccaagctcaccaaggcgattaaatggcgtcaggactttggtgttgcagagttatcagaggaatcagtgaaaagcctgtaccaaactggcaaggcatatgtacatgattccttggacatttatggccgacctgtgctgattgtagtggcagccaaacattttccttcgacacaggatccagttgaaaaccagaagctatgtgcctatttggttgagaaggcagtcaacagacttccgccaggagcagagaatatacttgggatctttgatctgcgaggctttcgggttgaaaatggtgatctccagttcctaaagtttttggtgagtttggtagcttcaaggcatgactaagcatctctgattacctttttttcggtggtagacatgcatatttttatttgtgacgatatgaatgaaacattgtgtttatttgtgacgatatgaatgaaacattgcggccgtggcggctgtggttccggcgggaactgccgatctggaggactccaacccgccaccgccaatccccccgtcgatggttgtcgatccgccgcctcctccaccgctcacccaccaggaagacactgtcgccgccctcaccgctgctcgtgcagagcacgctgctcgacaggcccgcttgcgggaagcggccctcgcgtgggagcgcgcgcgc

SEQ ID NO: 79697 - DNA, 3156 bp, Zea Mays
acggtttccctccacaaccacttgctcctcatctacttttctcctccgccttaaactcatccttgctcctgcctgccgtcgtgcatcatcatctccggccagggccagggcattcgtctccgcctccggtccggcctcctccactccgcgcccccccagacgcgtcgctgcgtagctgctggccgccatggccaccgtcatggccgcggccgcgtccgccgtcgaggcgcccgccacggccaaggccaagaaggagtccaagaagcaggaggagggcgtcgtcaccaacctatacaagcccaaggagccgtacgtcggcaggtgcctcctcaacaccaagatcaccggcgacgacgcgccgggggagacgtggcacatggtcttcagcaccgaaggcccttctttgcctgcgcgaggtctcagaatccggggggaaaaagaaaagaaaagaaaagatgatgactgtctctacctcttgctacatgtgccgcttcctcgtccgggctcctccgctcaagtccaggagtgcagtgcgctgtccaagcgccgccccaccaggtgctagcggtgccacctccacctccaaggtaaacccacacctactacctgtgtgcttcgtaaggcctatctacacctgcaggctgcagccaccagcacagggatatgtaccagcctgctcgtttcagctggaacagtattctccagttttggattggaacatgcagccacagccaaaagtagctgaagcgattggagttgtagcttttcggggataatcaaatgataggagagtggaggtggtggatcatgtgtaagctttagactactgactgattcacttgtctatccggcgctggttgctttccctgtgtgaagcttgtcctagaggtgaaagaacggctagcaagggagcacccaggcctccccacgggcaggtacgggagggacgatgacgacatggtcctctggttcctaaaggaccgcaagttctccgtcgatgaagccgtctccaagctcaccaaggcgattgtatcctctaattcactcgcttgtagcagtgaagctcacacctaatagcttctttactggctcactaaattcctgagttatcagaggaatcagtgaaaagcctgtaccaaactggcaaggcatatgtacatgattccttggacatttatggccgacctgtgctgattgtagtggcagccaaacattttccttcgacacaggatccagttgaaaaccagaagctatgtgcctatttggttgagaaggcagtcaacagacttccgccaggagcagagaatatacttgggatctttgatctgcgaggctttcgggttgaaaatggtgatctccagttcctaaagtttttgatggacgttttttactattactacccgaagcggcttggccaagttctttttgtcgatgctccatttgtttttcaaccaatgtggcaggttgttaaacctctattgaaatcatatgcctccctggtaagattttgtgatgccgagactgtgaggaaggaatacttcaaagaagaaacggtgcctcctgatttccgcgattagaaatgtgcaggtggtctcggaaacatgacctttaattgattcagaatcgattggcacccaggggggctggcgccttcctataccttttgattaacttctcaaaagttgctcagacggcagcaaacgattggagagtccagtaaaaaatgaccctgtacttgtataacttctgcgaagtagaatgctgagtttaggctggtgtctggagtgctcctgtaccatatttttctggttttggatgaagctatatggaccaaattcatctctgttgaacaattgccaattacataacttgtgtttgcccaattccatggtgtagtaccataacttctcagtgcagtgcagacaacacatggattccattttttgattaaagtatcatctgctacaaatatgaatcatggcttagtttgtagacttcataaagaaacacacagattaatcaaaccagtcttcgaagagtctctgtggataggaacgttccaaagcaaagtaagatgcaagttgtattgcataaaaaccaggtacacatcaatcagctgcattctggaagactaaactgcaacacaactacatctgcaatcacagagaaatcaggtcaacaacggagagggtcaagcgatccccacgtacagatgccagcatggtcttttacatggttccaagaggaggtaaatcgagtgtagccctaaaaagatctgccttgtgccacttcaacactttaacccagatgcaataaaaaaacactttaacccagatgctgcattgtggtgtggcaaaggcttgagaatatgacaataacagctgctcaaaaactgttggtaggaacatttatagcagcaaaagaacaaaatggaatgtgtggtttcttatctgccttagatgagataagatttcggacatgtgtattcatgttttcgagtgatttggcactatgaatgcgctagatggttggttgcttttttttgttaattgctcaggtgatatatgctgtatttctagtcactagtgttgtattgtttgtgcttgtgctaagatgatctcttttgcacttgtaacaggggctcattcaagtactctactgatcgaaaatggatggcgtctgtgatggttcattcttttgcacgtcttctacacgggtacattgacggttgatggagatggatggtggtgtagctgttttgtttagcaattagcactctaggtgttggaccactgttttgttaatggatgctatgtaacagtagtatgtaactaatgtgaacttgtttaggttgctgtgaaactgttatacaacacattgttatggggttgttacacagctgatatgttatgaacatgatatggagatatcttttcctttttggtttgggttttactgttgtgccattcgtctcataagttatgccattttattatttacttttggattgatatatattcgtctctgaagccttccttcactacaatatgtctctgtcatcaacgtatccactggctgagacacgaagccgtggatagcttcctttatggccgtgtccacgcttccgcatctcatattttttcttatcaaaagatg

SEQ ID NO: 79698 - DNA, 2820 bp, Zea Mays
acggtttccctccacaaccacttgctcctcatctacttttctcctccgccttaaactcatccttgctcctgcctgccgtcgtgcatcatcatctccggccagggccagggcattcgtctccgcctccggtccggcctcctccactccgcgcccccccagacgcgtcgctgcgtagctgctggccgccatggccaccgtcatggccgcggccgcgtccgccgtcgaggcgcccgccacggccaaggccaagaaggagtccaagaagcaggaggagggcgtcgtcaccaacctatacaagcccaaggagccgtacgtcggcaggtgcctcctcaacaccaagatcaccggcgacgacgcgccgggggagacgtggcacatggtcttcagcaccgaaggcccttctttgcctgcgcgaggtctcagaatccggggggaaaaagaaaagaaaagaaaagatgatgactgtctctacctcttgctacatgtgccgcttcctcgtccgggctcctccgctcaagtccaggagtgcagtgcgctgtccaagcgccgccccaccaggtgctagcggtgccacctccacctccaagcttgtcctagaggtgaaagaacggctagcaagggagcacccaggcctccccacgggcaggtacgggagggacgatgacgacatggtcctctggttcctaaaggaccgcaagttctccgtcgatgaagccgtctccaagctcaccaaggcgattaaatggcgtcaggactttggtgttgcagagttatcagaggaatcagtgaaaagcctgtaccaaactggcaaggcatatgtacatgattccttggacatttatggccgacctgtgctgattgtagtggcagccaaacattttccttcgacacaggatccagttgaaaaccagaagctatgtgcctatttggttgagaaggcagtcaacagacttccgccaggagcagagaatatacttgggatctttgatctgcgaggctttcgggttgaaaatggtgatctccagttcctaaagtttttgatggacgttttttactattactacccgaagcggcttggccaagttctttttgtcgatgctccatttgtttttcaaccaatgtggcaggttgttaaacctctattgaaatcatatgcctccctggtaagattttgtgatgccgagactgtgaggaaggaatacttcaaagaagaaacggtgcctcctgatttccgcgattagaaatgtgcaggtggtctcggaaacatgacctttaattgattcagaatcgattggcacccaggggggctggcgccttcctataccttttgattaacttctcaaaagttgctcagacggcagcaaacgattggagagtccagtaaaaaatgaccctgtacttgtataacttctgcgaagtagaatgctgagtttaggctggtgtctggagtgctcctgtaccatatttttctggttttggatgaagctatatggaccaaattcatctctgttgaacaattgccaattacataacttgtgtttgcccaattccatggtgtagtaccataacttctcagtgcagtgcagacaacacatggattccattttttgattaaagtatcatctgctacaaatatgaatcatggcttagtttgtagacttcataaagaaacacacagattaatcaaaccagtcttcgaagagtctctgtggataggaacgttccaaagcaaagtaagatgcaagttgtattgcataaaaaccaggtacacatcaatcagctgcattctggaagactaaactgcaacacaactacatctgcaatcacagagaaatcaggtcaacaacggagagggtcaagcgatccccacgtacagatgccagcatggtcttttacatggttccaagaggaggtaaatcgagtgtagccctaaaaagatctgccttgtgccacttcaacactttaacccagatgcaataaaaaaacactttaacccagatgctgcattgtggtgtggcaaaggcttgagaatatgacaataacagctgctcaaaaactgttggtaggaacatttatagcagcaaaagaacaaaatggaatgtgtggtttcttatctgccttagatgagataagatttcggacatgtgtattcatgttttcgagtgatttggcactatgaatgcgctagatggttggttgcttttttttgttaattgctcaggtgatatatgctgtatttctagtcactagtgttgtattgtttgtgcttgtgctaagatgatctcttttgcacttgtaacaggggctcattcaagtactctactgatcgaaaatggatggcgtctgtgatggttcattcttttgcacgtcttctacacgggtacattgacggttgatggagatggatggtggtgtagctgttttgtttagcaattagcactctaggtgttggaccactgttttgttaatggatgctatgtaacagtagtatgtaactaatgtgaacttgtttaggttgctgtgaaactgttatacaacacattgttatggggttgttacacagctgatatgttatgaacatgatatggagatatcttttcctttttggtttgggttttactgttgtgccattcgtctcataagttatgccattttattatttacttttggattgatatatattcgtctctgaagccttccttcactacaatatgtctctgtcatcaacgtatccactggctgagacacgaagccgtggatagcttcctttatggccgtgtccacgcttccgcatctcatattttttcttatcaaaagatg

SEQ ID NO: 79699 - DNA, 2815 bp, Zea Mays
acggtttccctccacaaccacttgctcctcatctacttttctcctccgccttaaactcatccttgctcctgcctgccgtcgtgcatcatcatctccggccagggccagggcattcgtctccgcctccggtccggcctcctccactccgcgcccccccagacgcgtcgctgcgtagctgctggccgccatggccaccgtcatggccgcggccgcgtccgccgtcgaggcgcccgccacggccaaggccaagaaggagtccaagaagcaggaggagggcgtcgtcaccaacctatacaagcccaaggagccgtacgtcggcaggtgcctcctcaacaccaagatcaccggcgacgacgcgccgggggagacgtggcacatggtcttcagcaccgaaggcccttctttgcctgcgcgaggtctcagaatccggggggaaaaagaaaagaaaagaaaagatgatgactgtctctacctcttgctacatgtgccgcttcctcgtccgggctcctccgctcaagtccaggagtgcagtgcgctgtccaagcgccgccccaccaggtgctagcggtgccacctccacctccaagcttgtcctagaggtgaaagaacggctagcaagggagcacccaggcctccccacgggcaggtacgggagggacgatgacgacatggtcctctggttcctaaaggaccgcaagttctccgtcgatgaagccgtctccaagctcaccaaggcgattaaatggcgtcaggactttggtgttgcagagttatcagaggaatcagtgaaaagcctgtaccaaactggcaaggcatatgtacatgattccttggacatttatggccgacctgtgctgattgtagtggcagccaaacattttccttcgacacaggatccagttgaaaaccagaagctatgtgcctatttggttgagaaggcagtcaacagacttccgccaggagcagagaatatacttgggatctttgatctgcgaggctttcgggttgaaaatggtgatctccagttcctaaagtttttgatggacgttttttactattactacccgaagcggcttggccaagttctttttgtcgatgctccatttgtttttcaaccaatgtggcaggttgttaaacctctattgaaatcatatgcctccctgattttgtgatgccgagactgtgaggaaggaatacttcaaagaagaaacggtgcctcctgatttccgcgattagaaatgtgcaggtggtctcggaaacatgacctttaattgattcagaatcgattggcacccaggggggctggcgccttcctataccttttgattaacttctcaaaagttgctcagacggcagcaaacgattggagagtccagtaaaaaatgaccctgtacttgtataacttctgcgaagtagaatgctgagtttaggctggtgtctggagtgctcctgtaccatatttttctggttttggatgaagctatatggaccaaattcatctctgttgaacaattgccaattacataacttgtgtttgcccaattccatggtgtagtaccataacttctcagtgcagtgcagacaacacatggattccattttttgattaaagtatcatctgctacaaatatgaatcatggcttagtttgtagacttcataaagaaacacacagattaatcaaaccagtcttcgaagagtctctgtggataggaacgttccaaagcaaagtaagatgcaagttgtattgcataaaaaccaggtacacatcaatcagctgcattctggaagactaaactgcaacacaactacatctgcaatcacagagaaatcaggtcaacaacggagagggtcaagcgatccccacgtacagatgccagcatggtcttttacatggttccaagaggaggtaaatcgagtgtagccctaaaaagatctgccttgtgccacttcaacactttaacccagatgcaataaaaaaacactttaacccagatgctgcattgtggtgtggcaaaggcttgagaatatgacaataacagctgctcaaaaactgttggtaggaacatttatagcagcaaaagaacaaaatggaatgtgtggtttcttatctgccttagatgagataagatttcggacatgtgtattcatgttttcgagtgatttggcactatgaatgcgctagatggttggttgcttttttttgttaattgctcaggtgatatatgctgtatttctagtcactagtgttgtattgtttgtgcttgtgctaagatgatctcttttgcacttgtaacaggggctcattcaagtactctactgatcgaaaatggatggcgtctgtgatggttcattcttttgcacgtcttctacacgggtacattgacggttgatggagatggatggtggtgtagctgttttgtttagcaattagcactctaggtgttggaccactgttttgttaatggatgctatgtaacagtagtatgtaactaatgtgaacttgtttaggttgctgtgaaactgttatacaacacattgttatggggttgttacacagctgatatgttatgaacatgatatggagatatcttttcctttttggtttgggttttactgttgtgccattcgtctcataagttatgccattttattatttacttttggattgatatatattcgtctctgaagccttccttcactacaatatgtctctgtcatcaacgtatccactggctgagacacgaagccgtggatagcttcctttatggccgtgtccacgcttccgcatctcatattttttcttatcaaaagatg

SEQ ID NO: 79700 - DNA, 2346 bp, Zea Mays
acggtttccctccacaaccacttgctcctcatctacttttctcctccgccttaaactcatccttgctcctgcctgccgtcgtgcatcatcatctccggccagggccagggcattcgtctccgcctccggtccggcctcctccactccgcgcccccccagacgcgtcgctgcgtagctgctggccgccatggccaccgtcatggccgcggccgcgtccgccgtcgaggcgcccgccacggccaaggccaagaaggagtccaagaagcaggaggagggcgtcgtcaccaacctatacaagcccaaggagccgtacgtcggcaggtgcctcctcaacaccaagatcaccggcgacgacgcgccgggggagacgtggcacatggtcttcagcaccgaaggcccttctttgcctgcgcgaggtctcagaatccggggggaaaaagaaaagaaaagaaaagatgatgactgtctctacctcttgctacatgtgccgcttcctcgtccgggctcctccgctcaagtccaggagtgcagtgcgctgtccaagcgccgccccaccaggtgctagcggtgccacctccacctccaagcttgtcctagaggtgaaagaacggctagcaagggagcacccaggcctccccacgggcaggtacgggagggacgatgacgacatggtcctctggttcctaaaggaccgcaagttctccgtcgatgaagccgtctccaagctcaccaaggcgattaaatggcgtcaggactttggtgttgcagagttatcagaggaatcagtgaaaagcctgtaccaaactggcaaggcatatgtacatgattccttggacatttatggccgacctgtgctgattgtagtggcagccaaacattttccttcgacacaggatccagttgaaaaccagaagctatgtgcctatttggttgagaaggcagtcaacagacttccgccaggagcagagaatatacttgggatctttgatctgcgaggctttcgggttgaaaatggtgatctccagttcctaaagtttttgatggacgttttttactattactacccgaagcggcttggccaagttctttttgtcgatgctccatttgtttttcaaccaatgtggcaggttgttaaacctctattgaaatcatatgcctccctggtaagattttgtgatgccgagactgtgaggaaggaatacttcaaagaagaaacggtgcctcctgatttccgcgattaggtggtctcggaaacatgacctttaattgattcagaatcgattggcacccaggggggctggcgccttcctataccttttgattaacttctcaaaagttgctcagacggcagcaaacgattggagagtccagtaaaaaatgaccctgtacttgtataacttctgcgaagtagaatgctgagtttaggctggtgtctggagtgctcctgtaccatatttttctggttttggatgaagctatatggaccaaattcatctctgttgaacaattgccaattacataacttgtgtttgcccaattccatggtgtagtaccataacttctcagtgcagtgcagacaacacatggattccattttttgattaaagtatcatctgctacaaatatgaatcatggcttagtttgtagacttcataaagaaacacacagattaatcaaaccagtcttcgaagagtctctgtggataggaacgttccaaagcaaagtaagatgcaagttgtattgcataaaaaccaggtacacatcaatcagctgcattctggaagactaaactgcaacacaactacatctgcaatcacagagaaatcaggggctcattcaagtactctactgatcgaaaatggatggcgtctgtgatggttcattcttttgcacgtcttctacacgggtacattgacggttgatggagatggatggtggtgtagctgttttgtttagcaattagcactctaggtgttggaccactgttttgttaatggatgctatgtaacagtagtatgtaactaatgtgaacttgtttaggttgctgtgaaactgttatacaacacattgttatggggttgttacacagctgatatgttatgaacatgatatggagatatcttttcctttttggtttgggttttactgttgtgccattcgtctcataagttatgccattttattatttacttttggattgatatatattcgtctctgaagccttccttcactacaatatgtctctgtcatcaacgtatccactggctgagacacgaagccgtggatagcttcctttatggccgtgtccacgcttccgcatctcatattttttcttatcaaaagatg

SEQ ID NO: 79701 - DNA, 2356 bp, Zea Mays
acggtttccctccacaaccacttgctcctcatctacttttctcctccgccttaaactcatccttgctcctgcctgccgtcgtgcatcatcatctccggccagggccagggcattcgtctccgcctccggtccggcctcctccactccgcgcccccccagacgcgtcgctgcgtagctgctggccgccatggccaccgtcatggccgcggccgcgtccgccgtcgaggcgcccgccacggccaaggccaagaaggagtccaagaagcaggaggagggcgtcgtcaccaacctatacaagcccaaggagccgtacgtcggcaggtgcctcctcaacaccaagatcaccggcgacgacgcgccgggggagacgtggcacatggtcttcagcaccgaaggcccttctttgcctgcgcgaggtctcagaatccggggggaaaaagaaaagaaaagaaaagatgatgactgtctctacctcttgctacatgtgccgcttcctcgtccgggctcctccgctcaagtccaggagtgcagtgcgctgtccaagcgccgccccaccaggtgctagcggtgccacctccacctccaagcttgtcctagaggtgaaagaacggctagcaagggagcacccaggcctccccacgggcaggtacgggagggacgatgacgacatggtcctctggttcctaaaggaccgcaagttctccgtcgatgaagccgtctccaagctcaccaaggcgattaaatggcgtcaggactttggtgttgcagagttatcagaggaatcagtgaaaagcctgtaccaaactggcaaggcatatgtacatgattccttggacatttatggccgacctgtgctgattgtagtggcagccaaacattttccttcgacacaggatccagttgaaaaccagaagctatgtgcctatttggttgagaaggcagtcaacagacttccgccaggagcagagaatatacttgggatctttgatctgcgaggctttcgggttgaaaatggtgatctccagttcctaaagtttttgatggacgttttttactattactacccgaagcggcttggccaagttctttttgtcgatgctccatttgtttttcaaccaatgtggcaggttgttaaacctctattgaaatcatatgcctccctggtaagattttgtgatgccgagactgtgaggaaggaatacttcaaagaagaaacggtgcctcctgatttccgcgattagaaatgtgcaggtggtctcggaaacatgacctttaattgattcagaatcgattggcacccaggggggctggcgccttcctataccttttgattaacttctcaaaagttgctcagacggcagcaaacgattggagagtccagtaaaaaatgaccctgtacttgtataacttctgcgaagtagaatgctgagtttaggctggtgtctggagtgctcctgtaccatatttttctggttttggatgaagctatatggaccaaattcatctctgttgaacaattgccaattacataacttgtgtttgcccaattccatggtgtagtaccataacttctcagtgcagtgcagacaacacatggattccattttttgattaaagtatcatctgctacaaatatgaatcatggcttagtttgtagacttcataaagaaacacacagattaatcaaaccagtcttcgaagagtctctgtggataggaacgttccaaagcaaagtaagatgcaagttgtattgcataaaaaccaggtacacatcaatcagctgcattctggaagactaaactgcaacacaactacatctgcaatcacagagaaatcaggggctcattcaagtactctactgatcgaaaatggatggcgtctgtgatggttcattcttttgcacgtcttctacacgggtacattgacggttgatggagatggatggtggtgtagctgttttgtttagcaattagcactctaggtgttggaccactgttttgttaatggatgctatgtaacagtagtatgtaactaatgtgaacttgtttaggttgctgtgaaactgttatacaacacattgttatggggttgttacacagctgatatgttatgaacatgatatggagatatcttttcctttttggtttgggttttactgttgtgccattcgtctcataagttatgccattttattatttacttttggattgatatatattcgtctctgaagccttccttcactacaatatgtctctgtcatcaacgtatccactggctgagacacgaagccgtggatagcttcctttatggccgtgtccacgcttccgcatctcatattttttcttatcaaaagatg

SEQ ID NO: 79702 - DNA, 2921 bp, Zea Mays
acggtttccctccacaaccacttgctcctcatctacttttctcctccgccttaaactcatccttgctcctgcctgccgtcgtgcatcatcatctccggccagggccagggcattcgtctccgcctccggtccggcctcctccactccgcgcccccccagacgcgtcgctgcgtagctgctggccgccatggccaccgtcatggccgcggccgtctagtccttcccgtcctcctcggccgtcgtcgccaaggcgtcgccggcgtccccctgtgccgccccgcacttccgcccgagggccgtgcgggccgctatccgggcgcaggcgtccgccgtcgaggcgcccgccacggccaaggccaagaaggagtccaagaagcaggaggagggcgtcgtcaccaacctatacaagcccaaggagccgtacgtcggcaggtgcctcctcaacaccaagatcaccggcgacgacgcgccgggggagacgtggcacatggtcttcagcaccgaaggcccttctttgcctgcgcgaggtctcagaatccggggggaaaaagaaaagaaaagaaaagatgatgactgtctctacctcttgctacatgtgccgcttcctcgtccgggctcctccgctcaagtccaggagtgcagtgcgctgtccaagcgccgccccaccaggtgctagcggtgccacctccacctccaagcttgtcctagaggtgaaagaacggctagcaagggagcacccaggcctccccacgggcaggtacgggagggacgatgacgacatggtcctctggttcctaaaggaccgcaagttctccgtcgatgaagccgtctccaagctcaccaaggcgattaaatggcgtcaggactttggtgttgcagagttatcagaggaatcagtgaaaagcctgtaccaaactggcaaggcatatgtacatgattccttggacatttatggccgacctgtgctgattgtagtggcagccaaacattttccttcgacacaggatccagttgaaaaccagaagctatgtgcctatttggttgagaaggcagtcaacagacttccgccaggagcagagaatatacttgggatctttgatctgcgaggctttcgggttgaaaatggtgatctccagttcctaaagtttttgatggacgttttttactattactacccgaagcggcttggccaagttctttttgtcgatgctccatttgtttttcaaccaatgtggcaggttgttaaacctctattgaaatcatatgcctccctggtaagattttgtgatgccgagactgtgaggaaggaatacttcaaagaagaaacggtgcctcctgatttccgcgattaggtggtctcggaaacatgacctttaattgattcagaatcgattggcacccaggggggctggcgccttcctataccttttgattaacttctcaaaagttgctcagacggcagcaaacgattggagagtccagtaaaaaatgaccctgtacttgtataacttctgcgaagtagaatgctgagtttaggctggtgtctggagtgctcctgtaccatatttttctggttttggatgaagctatatggaccaaattcatctctgttgaacaattgccaattacataacttgtgtttgcccaattccatggtgtagtaccataacttctcagtgcagtgcagacaacacatggattccattttttgattaaagtatcatctgctacaaatatgaatcatggcttagtttgtagacttcataaagaaacacacagattaatcaaaccagtcttcgaagagtctctgtggataggaacgttccaaagcaaagtaagatgcaagttgtattgcataaaaaccaggtacacatcaatcagctgcattctggaagactaaactgcaacacaactacatctgcaatcacagagaaatcaggtcaacaacggagagggtcaagcgatccccacgtacagatgccagcatggtcttttacatggttccaagaggaggtaaatcgagtgtagccctaaaaagatctgccttgtgccacttcaacactttaacccagatgcaataaaaaaacactttaacccagatgctgcattgtggtgtggcaaaggcttgagaatatgacaataacagctgctcaaaaactgttggtaggaacatttatagcagcaaaagaacaaaatggaatgtgtggtttcttatctgccttagatgagataagatttcggacatgtgtattcatgttttcgagtgatttggcactatgaatgcgctagatggttggttgcttttttttgttaattgctcaggtgatatatgctgtatttctagtcactagtgttgtattgtttgtgcttgtgctaagatgatctcttttgcacttgtaacaggggctcattcaagtactctactgatcgaaaatggatggcgtctgtgatggttcattcttttgcacgtcttctacacgggtacattgacggttgatggagatggatggtggtgtagctgttttgtttagcaattagcactctaggtgttggaccactgttttgttaatggatgctatgtaacagtagtatgtaactaatgtgaacttgtttaggttgctgtgaaactgttatacaacacattgttatggggttgttacacagctgatatgttatgaacatgatatggagatatcttttcctttttggtttgggttttactgttgtgccattcgtctcataagttatgccattttattatttacttttggattgatatatattcgtctctgaagccttccttcactacaatatgtctctgtcatcaacgtatccactggctgagacacgaagccgtggatagcttcctttatggccgtgtccacgcttccgcatctcatattttttcttatcaaaagatg

SEQ ID NO: 79703 - DNA, 3109 bp, Zea Mays
acggtttccctccacaaccacttgctcctcatctacttttctcctccgccttaaactcatccttgctcctgcctgccgtcgtgcatcatcatctccggccagggccagggcattcgtctccgcctccggtccggcctcctccactccgcgcccccccagacgcgtcgctgcgtagctgctggccgccatggccaccgtcatggccgcggccgcgtccgccgtcgaggcgcccgccacggccaaggccaagaaggagtccaagaagcaggaggagggcgtcgtcaccaacctatacaagcccaaggagccgtacgtcggcaggtgcctcctcaacaccaagatcaccggcgacgacgcgccgggggagacgtggcacatggtcttcagcaccgaaggcccttctttgcctgcgcgaggtctcagaatccggggggaaaaagaaaagaaaagaaaagatgatgactgtctctacctcttgctacatgtgccgcttcctcgtccgggctcctccgctcaagtccaggagtgcagtgcgctgtccaagcgccgccccaccaggtgctagcggtgccacctccacctccaaggtaaacccacacctactacctgtgtgcttcgtaaggcctatctacacctgcaggctgcagccaccagcacagggatatgtaccagcctgctcgtttcagctggaacagtattctccagttttggattggaacatgcagccacagccaaaagtagctgaagcgattggagttgtagcttttcggggataatcaaatgataggagagtggaggtggtggatcatgtgtaagctttagactactgactgattcacttgtctatccggcgctggttgctttccctgtgtgaagcttgtcctagaggtgaaagaacggctagcaagggagcacccaggcctccccacgggcaggtacgggagggacgatgacgacatggtcctctggttcctaaaggaccgcaagttctccgtcgatgaagccgtctccaagctcaccaaggcgattaaatggcgtcaggactttggtgttgcagagttatcagaggaatcagtgaaaagcctgtaccaaactggcaaggcatatgtacatgattccttggacatttatggccgacctgtgctgattgtagtggcagccaaacattttccttcgacacaggatccagttgaaaaccagaagctatgtgcctatttggttgagaaggcagtcaacagacttccgccaggagcagagaatatacttgggatctttgatctgcgaggctttcgggttgaaaatggtgatctccagttcctaaagtttttgatggacgttttttactattactacccgaagcggcttggccaagttctttttgtcgatgctccatttgtttttcaaccaatgtggcaggttgttaaacctctattgaaatcatatgcctccctggtaagattttgtgatgccgagactgtgaggaaggaatacttcaaagaagaaacggtgcctcctgatttccgcgattagaaatgtgcaggtggtctcggaaacatgacctttaattgattcagaatcgattggcacccaggggggctggcgccttcctataccttttgattaacttctcaaaagttgctcagacggcagcaaacgattggagagtccagtaaaaaatgaccctgtacttgtataacttctgcgaagtagaatgctgagtttaggctggtgtctggagtgctcctgtaccatatttttctggttttggatgaagctatatggaccaaattcatctctgttgaacaattgccaattacataacttgtgtttgcccaattccatggtgtagtaccataacttctcagtgcagtgcagacaacacatggattccattttttgattaaagtatcatctgctacaaatatgaatcatggcttagtttgtagacttcataaagaaacacacagattaatcaaaccagtcttcgaagagtctctgtggataggaacgttccaaagcaaagtaagatgcaagttgtattgcataaaaaccaggtacacatcaatcagctgcattctggaagactaaactgcaacacaactacatctgcaatcacagagaaatcaggtcaacaacggagagggtcaagcgatccccacgtacagatgccagcatggtcttttacatggttccaagaggaggtaaatcgagtgtagccctaaaaagatctgccttgtgccacttcaacactttaacccagatgcaataaaaaaacactttaacccagatgctgcattgtggtgtggcaaaggcttgagaatatgacaataacagctgctcaaaaactgttggtaggaacatttatagcagcaaaagaacaaaatggaatgtgtggtttcttatctgccttagatgagataagatttcggacatgtgtattcatgttttcgagtgatttggcactatgaatgcgctagatggttggttgcttttttttgttaattgctcaggtgatatatgctgtatttctagtcactagtgttgtattgtttgtgcttgtgctaagatgatctcttttgcacttgtaacaggggctcattcaagtactctactgatcgaaaatggatggcgtctgtgatggttcattcttttgcacgtcttctacacgggtacattgacggttgatggagatggatggtggtgtagctgttttgtttagcaattagcactctaggtgttggaccactgttttgttaatggatgctatgtaacagtagtatgtaactaatgtgaacttgtttaggttgctgtgaaactgttatacaacacattgttatggggttgttacacagctgatatgttatgaacatgatatggagatatcttttcctttttggtttgggttttactgttgtgccattcgtctcataagttatgccattttattatttacttttggattgatatatattcgtctctgaagccttccttcactacaatatgtctctgtcatcaacgtatccactggctgagacacgaagccgtggatagcttcctttatggccgtgtccacgcttccgcatctcatattttttcttatcaaaagatg

SEQ ID NO: 79704 - DNA, 2181 bp, Zea Mays
acggtttccctccacaaccacttgctcctcatctacttttctcctccgccttaaactcatccttgctcctgcctgccgtcgtgcatcatcatctccggccagggccagggcattcgtctccgcctccggtccggcctcctccactccgcgcccccccagacgcgtcgctgcgtagctgctggccgccatggccaccgtcatggccgcggccgcgtccgccgtcgaggcgcccgccacggccaaggccaagaaggagtccaagaagcaggaggagggcgtcgtcaccaacctatacaagcccaaggagccgtacgtcggcaggtgcctcctcaacaccaagatcaccggcgacgacgcgccgggggagacgtggcacatggtcttcagcaccgaaggcccttctttgcctgcgcgaggtctcagaatccggggggaaaaagaaaagaaaagaaaagatgatgactgtctctacctcttgctacatgtgccgcttcctcgtccgggctcctccgctcaagtccaggagtgcagtgcgctgtccaagcgccgccccaccaggtgctagcggtgccacctccacctccaagacacaggatccagttgaaaaccagaagctatgtgcctatttggttgagaaggcagtcaacagacttccgccaggagcagagaatatacttgggatctttgatctgcgaggctttcgggttgaaaatggtgatctccagttcctaaagtttttgatggacgttttttactattactacccgaagcggcttggccaagttctttttgtcgatgctccatttgtttttcaaccaatgtggcaggttgttaaacctctattgaaatcatatgcctccctggtaagattttgtgatgccgagactgtgaggaaggaatacttcaaagaagaaacggtgcctcctgatttccgcgattaggtgacatgattatttcttcagtaattgcaaggcagttctacctctgcctttgtgtaacgattgaaattctaaattgtgcagattatttttagttcttccaatccctcctaaaagctattttgcagaaatgtgcaggtggtctcggaaacatgacctttaattgattcagaatcgattggcacccaggggggctggcgccttcctataccttttgattaacttctcaaaagttgctcagacggcagcaaacgattggagagtccagtaaaaaatgaccctgtacttgtataacttctgcgaagtagaatgctgagtttaggctggtgtctggagtgctcctgtaccatatttttctggttttggatgaagctatatggaccaaattcatctctgttgaacaattgccaattacataacttgtgtttgcccaattccatggtgtagtaccataacttctcagtgcagtgcagacaacacatggattccattttttgattaaagtatcatctgctacaaatatgaatcatggcttagtttgtagacttcataaagaaacacacagattaatcaaaccagtcttcgaagagtctctgtggataggaacgttccaaagcaaagtaagatgcaagttgtattgcataaaaaccaggtacacatcaatcagctgcattctggaagactaaactgcaacacaactacatctgcaatcacagagaaatcaggggctcattcaagtactctactgatcgaaaatggatggcgtctgtgatggttcattcttttgcacgtcttctacacgggtacattgacggttgatggagatggatggtggtgtagctgttttgtttagcaattagcactctaggtgttggaccactgttttgttaatggatgctatgtaacagtagtatgtaactaatgtgaacttgtttaggttgctgtgaaactgttatacaacacattgttatggggttgttacacagctgatatgttatgaacatgatatggagatatcttttcctttttggtttgggttttactgttgtgccattcgtctcataagttatgccattttattatttacttttggattgatatatattcgtctctgaagccttccttcactacaatatgtctctgtcatcaacgtatccactggctgagacacgaagccgtggatagcttcctttatggccgtgtccacgcttccgcatctcatattttttcttatcaaaagatg

SEQ ID NO: 79705 - DNA, 2131 bp, Zea Mays
acggtttccctccacaaccacttgctcctcatctacttttctcctccgccttaaactcatccttgctcctgcctgccgtcgtgcatcatcatctccggccagggccagggcattcgtctccgcctccggtccggcctcctccactccgcgcccccccagacgcgtcgctgcgtagctgctggccgccatggccaccgtcatggccgcggccgcgtccgccgtcgaggcgcccgccacggccaaggccaagaaggagtccaagaagcaggaggagggcgtcgtcaccaacctatacaagcccaaggagccgtacgtcggcaggtgcctcctcaacaccaagatcaccggcgacgacgcgccgggggagacgtggcacatggtcttcagcaccgaaggcccttctttgcctgcgcgaggtctcagaatccggggggaaaaagaaaagaaaagaaaagatgatgactgtctctacctcttgctacatgtgccgcttcctcgtccgggctcctccgctcaagtccaggagtgcagtgcgctgtccaagcgccgccccaccaggtgctagcggtgccacctccacctccaagcttgtcctagaggtgaaagaacggctagcaagggagcacccaggcctccccacgggcaggtacgggagggacgatgacgacatggtcctctggttcctaaaggaccgcaagttctccgtcgatgaagccgtctccaagctcaccaaggcgattaaatggcgtcaggactttggtgttgcagagttatcagaggaatcagtgaaaagcctgtaccaaactggcaaggcatatgtacatgattccttggacatttatggccgacctgtgctgattgtagtggcagccaaacattttccttcgacacaggatccagttgaaaaccagaagctatgtgcctatttggttgagaaggcagtcaacagacttccgccaggagcagagaatatacttgggatctttgatctgcgaggctttcgggttgaaaatggtgatctccagttcctaaagtttttggttgttaaacctctattgaaatcatatgcctccctggtacacatcaatcagctgcattctggaagactaaactgcaacacaactacatctgcaatcacagagaaatcaggtcaacaacggagagggtcaagcgatccccacgtacagatgccagcatggtcttttacatggttccaagaggaggtaaatcgagtgtagccctaaaaagatctgccttgtgccacttcaacactttaacccagatgcaataaaaaaacactttaacccagatgctgcattgtggtgtggcaaaggcttgagaatatgacaataacagctgctcaaaaactgttggtaggaacatttatagcagcaaaagaacaaaatggaatgtgtggtttcttatctgccttagatgagataagatttcggacatgtgtattcatgttttcgagtgatttggcactatgaatgcgctagatggttggttgcttttttttgttaattgctcaggtgatatatgctgtatttctagtcactagtgttgtattgtttgtgcttgtgctaagatgatctcttttgcacttgtaacaggggctcattcaagtactctactgatcgaaaatggatggcgtctgtgatggttcattcttttgcacgtcttctacacgggtacattgacggttgatggagatggatggtggtgtagctgttttgtttagcaattagcactctaggtgttggaccactgttttgttaatggatgctatgtaacagtagtatgtaactaatgtgaacttgtttaggttgctgtgaaactgttatacaacacattgttatggggttgttacacagctgatatgttatgaacatgatatggagatatcttttcctttttggtttgggttttactgttgtgccattcgtctcataagttatgccattttattatttacttttggattgatatatattcgtctctgaagccttccttcactacaatatgtctctgtcatcaacgtatccactggctgagacacgaagccgtggatagcttcctttatggccgtgtccacgcttccgcatctcatattttttcttatcaaaagatg

SEQ ID NO: 79706 - DNA, 1864 bp, Zea Mays
acggtttccctccacaaccacttgctcctcatctacttttctcctccgccttaaactcatccttgctcctgcctgccgtcgtgcatcatcatctccggccagggccagggcattcgtctccgcctccggtccggcctcctccactccgcgcccccccagacgcgtcgctgcgtagctgctggccgccatggccaccgtcatggccgcggccgcgtccgccgtcgaggcgcccgccacggccaaggccaagaaggagtccaagaagcaggaggagggcgtcgtcaccaacctatacaagcccaaggagccgtacgtcggcaggtgcctcctcaacaccaagatcaccggcgacgacgcgccgggggagacgtggcacatggtcttcagcaccgaaggcccttctttgcctgcgcgaggtctcagaatccggggggaaaaagaaaagaaaagaaaagatgatgactgtctctacctcttgctacatgtgccgcttcctcgtccgggctcctccgctcaagtccaggagtgcagtgcgctgtccaagcgccgccccaccaggtgctagcggtgccacctccacctccaagacacaggatccagttgaaaaccagaagctatgtgcctatttggttgagaaggcagtcaacagacttccgccaggagcagagaatatacttgggatctttgatctgcgaggctttcgggttgaaaatggtgatctccagttcctaaagtttttgatggacgttttttactattactacccgaagcggcttggccaagttctttttgtcgatgctccatttgtttttcaaccaatgtggcaggttgttaaacctctattgaaatcatatgcctccctggtaagattttgtgatgccgagactgtgaggaaggaatacttcaaagaagaaacggtgcctcctgatttccgcgattaggtggtctcggaaacatggcctttaatttattgagaatcgattggcacccagggggactggcgccttcccatacctttggattaacctctcaaaagttgctcagacggcagcaaatgattggagagtccagtaaaaaatgacccagtacttgtataactagtgcgaagtagaatgctgagtttaggctgctgtcttgagtgctcctataccatatttttctggttttggatgaagctatatggatcaaattcatctctgttgaacaattgccaattacataacttgtgtttgcccaattccatggtgtagtaccataacttctcagtgcagtgcagacaacacatggattccatttttttattaaagtaccatctgctacaaatatgaatcatggctttgtttgtagacttcataaagaaacacacagattaatcaaaccagtcttcgaagagtctgctatggataggaacgttccaaagcaaaataagatgcaagttgtattgcataaaaaccaggtacacatcaatcagctgcattctggaagactaaactgcaacacaactacatctgcaatcacagagaaatcaggtgctcattcaagtactctactgatcgaaaatggatggcgtctgtgatggttgattcttttgcacgtcttctacactggtacattgacggctgatggagatggatggtggtgtcgctgttttgtgttttgtttagcactctaggtgacacattgttatgggattgttacacagctgatatgttatgaacctgatatggagatctttttgcgtcctttgtttgggtgttactgttgtgccattcgtctcataagttatgccattttattacttgcttttggattgatatatattcgtctctgaagccttccttcaatacaaatacaagagtttttt

SEQ ID NO: 79707 - DNA, 2510 bp, Zea Mays
acggtttccctccacaaccacttgctcctcatctacttttctcctccgccttaaactcatccttgctcctgcctgccgtcgtgcatcatcatctccggccagggccagggcattcgtctccgcctccggtccggcctcctccactccgcgcccccccagacgcgtcgctgcgtagctgctggccgccatggccaccgtcatggccgcggccgcgtccgccgtcgaggcgcccgccacggccaaggccaagaaggagtccaagaagcaggaggagggcgtcgtcaccaacctatacaagcccaaggagccgtacgtcggcaggtgcctcctcaacaccaagatcaccggcgacgacgcgccgggggagacgtggcacatggtcttcagcaccgaaggcccttctttgcctgcgcgaggtctcagaatccggggggaaaaagaaaagaaaagaaaagatgatgactgtctctacctcttgctacatgtgccgcttcctcgtccgggctcctccgctcaagtccaggagtgcagtgcgctgtccaagcgccgccccaccaggtgctagcggtgccacctccacctccaaggtaaacccacacctactacctgtgtgcttcgtaaggcctatctacacctgcaggctgcagccaccagcacagggatatgtaccagcctgctcgtttcagctggaacagtattctccagttttggattggaacatgcagccacagccaaaagtagctgaagcgattggagttgtagcttttcggggataatcaaatgataggagagtggaggtggtggatcatgtgtaagctttagactactgactgattcacttgtctatccggcgctggttgctttccctgtgtgaagcttgtcctagaggtgaaagaacggctagcaagggagcacccaggcctccccacgggcaggtacgggagggacgatgacgacatggtcctctggttcctaaaggaccgcaagttctccgtcgatgaagccgtctccaagctcaccaaggcgattgtatcctctaattcactcgcttgtagcagtgaagctcacacctaatagcttctttactggctcactaaattcctgagttatcagaggaatcagtgaaaagcctgtaccaaactggcaaggcatatgtacatgattccttggacatttatggccgacctgtgctgattgtagtggcagccaaacattttccttcgacacaggatccagttggaaaccagaagttgtgtgcctatttggttgagaaggcagtcagcagacttccgccaggagtagagaatatacttgggatctttgatctgcgaggctttcgggttgaaaatggtgatctccagttcctaaagtttttgatggacgttttttactattactacccgaagcggcttggccaagttctttttgtcgatgctccttttgtttttcaaccaatgtggcaggttgttaaacctctgttgaaatcatatgcctccctggtaagattttgtgatgccgagactgtgaggaaggaatacttcaaagaagaaatcgtgcctcctgatttccgcgattagaaatgtgcaggtggtctcggaaacatggcctttaatttattgagaatcgattggcacccagggggactggcgccttcccatacctttggattaacctctcaaaagttgctcagacggcagcaaatgattggagagtccagtaaaaaatgacccagtacttgtataactagtgcgaagtagaatgctgagtttaggctgctgtcttgagtgctcctataccatatttttctggttttggatgaagctatatggatcaaattcatctctgttgaacaattgccaattacataacttgtgtttgcccaattccatggtgtagtaccataacttctcagtgcagtgcagacaacacatggattccatttttttattaaagtaccatctgctacaaatatgaatcatggctttgtttgtagacttcataaagaaacacacagattaatcaaaccagtcttcgaagagtctgctatggataggaacgttccaaagcaaaataagatgcaagttgtattgcataaaaaccaggtacacatcaatcagctgcattctggaagactaaactgcaacacaactacatctgcaatcacagagaaatcaggtgctcattcaagtactctactgatcgaaaatggatggcgtctgtgatggttgattcttttgcacgtcttctacactggtacattgacggctgatggagatggatggtggtgtcgctgttttgtgttttgtttagcactctaggtgacacattgttatgggattgttacacagctgatatgttatgaacctgatatggagatctttttgcgtcctttgtttgggtgttactgttgtgccattcgtctcataagttatgccattttattacttgcttttggattgatatatattcgtctctgaagccttccttcaatacaaatacaagagtttttt

SEQ ID NO: 79708 - DNA, 1282 bp, Zea Mays
ctaccacaccacccccgaccctgatggacgttttttactattactacccgaagcggcttggccaagttctttttgtcgatgctccttttgtttttcaaccaatgtggcaggttgttaaacctctgttgaaatcatatgcctccctggtaagattttgtgatgccgagactgtgaggaaggaatacttcaaagaagaaatcgtgcctcctgatttccgcgattaggtgacatgattatttcttcagtaattgcaagtcagttttacctctgcctttgtgtaacgattgaaattctaaattgtgcagattacttttagtttttccaatctctcctaaaagctattttgcagaaatgtgcaggtggtctcggaaacatggcctttaatttattgagaatcgattggcacccagggggactggcgccttcccatacctttggattaacctctcaaaagttgctcagacggcagcaaatgattggagagtccagtaaaaaatgacccagtacttgtataactagtgcgaagtagaatgctgagtttaggctgctgtcttgagtgctcctataccatatttttctggttttggatgaagctatatggatcaaattcatctctgttgaacaattgccaattacataacttgtgtttgcccaattccatggtgtagtaccataacttctcagtgcagtgcagacaacacatggattccatttttttattaaagtaccatctgctacaaatatgaatcatggctttgtttgtagacttcataaagaaacacacagattaatcaaaccagtcttcgaagagtctgctatggataggaacgttccaaagcaaaataagatgcaagttgtattgcataaaaaccaggtacacatcaatcagctgcattctggaagactaaactgcaacacaactacatctgcaatcacagagaaatcaggtgctcattcaagtactctactgatcgaaaatggatggcgtctgtgatggttgattcttttgcacgtcttctacactggtacattgacggctgatggagatggatggtggtgtcgctgttttgtgttttgtttagcactctaggtgacacattgttatgggattgttacacagctgatatgttatgaacctgatatggagatctttttgcgtcctttgtttgggtgttactgttgtgccattcgtctcataagttatgccattttattacttgcttttggattgatatatattcgtctctgaagccttccttcaatacaaatacaagagtttttt

SEQ ID NO: 79709 - DNA, 2194 bp, Zea Mays
cgctctttgcgcacaagatacgttctctccctccacaaccacttgctcctcatctacttttctcctccgccttccactcatccttgctcctgcctgccgtcgtgcatcatcatctccggccagggccagggcattcgtctccgcctccggtccggcctcctccacaccgcgccccccccccccccccagacgcgtcgctgcgtagctgctggccgccatggccaccgtcatggccgcggccgtctagtccttcccgtcctcctcgggcgtcgtcaccaacctatacaagcccaaggagccgtacgtcggcaggtgcctcctcaacaccaagatcaccggcgacgacgcgccgggggagacgtggcacatggtcttcagcaccgaaggcccttctttgcctgcgcgaggtctcagaatccggggggaaaagaaaagaaaagaaaagatgatgactgtctctacctcttgctacatgtgccgctccctcgtccgggctcctccgctcaagtccaggagtgcagtgcgctgtccaagcgccgccccgccaggtgctagcggtgccacctccacctccaagcttgtcctagaggtgaaagaacggctagcaagggagcacccaggcctccccacgggcaggaacgggagggacgatgacgacatggtcctctggttcctaaaggaccgcaagttctccgtcgatgaagccgtctccaagctcaccaaggcgattaaatggcgtcaggactttggtgttgcagagttatcagaggaatcagtgaaaagcctgtaccaaactggcaaggcatatgtacatgattccttggacatttatggccgacctgtgctgattgtagtggcagccaaacattttccttcgacacaggatccagttggaaaccagaagttgtgtgcctatttggttgagaaggcagtcagcagacttccgccaggagtagagaatatacttgggatctttgatctgcgaggctttcgggttgaaaatggtgatctccagttcctaaagtttttgatggacgttttttactattactacccgaagcggcttggccaagttctttttgtcgatgctccttttgtttttcaaccaatgtggcaggttgttaaacctctgttgaaatcatatgcctccctggtaagattttgtgatgccgagactgtgaggaaggaatacttcaaagaagaaatcgtgcctcctgatttccgcgattaggtgacatgattatttcttcagtaattgcaaaaatgtgcaggtggtctcggaaacatggcctttaatttattgagaatcgattggcacccagggggactggcgccttcccatacctttggattaacctctcaaaagttgctcagacggcagcaaatgattggagagtccagtaaaaaatgacccagtacttgtataactagtgcgaagtagaatgctgagtttaggctgctgtcttgagtgctcctataccatatttttctggttttggatgaagctatatggatcaaattcatctctgttgaacaattgccaattacataacttgtgtttgcccaattccatggtgtagtaccataacttctcagtgcagtgcagacaacacatggattccatttttttattaaagtaccatctgctacaaatatgaatcatggctttgtttgtagacttcataaagaaacacacagattaatcaaaccagtcttcgaagagtctgctatggataggaacgttccaaagcaaaataagatgcaagttgtattgcataaaaaccaggtacacatcaatcagctgcattctggaagactaaactgcaacacaactacatctgcaatcacagagaaatcaggtgctcattcaagtactctactgatcgaaaatggatggcgtctgtgatggttgattcttttgcacgtcttctacactggtacattgacggctgatggagatggatggtggtgtcgctgttttgtgttttgtttagcactctaggtgacacattgttatgggattgttacacagctgatatgttatgaacctgatatggagatctttttgcgtcctttgtttgggtgttactgttgtgccattcgtctcataagttatgccattttattacttgcttttggattgatatatattcgtctctgaagccttccttcaatacaaatacaagagtttttt

SEQ ID NO: 79710 - DNA, 1696 bp, Zea Mays
cgttctctccctccacaaccacttgctcctcatctacttttctcctccgccttccactcatccttgctcctgcctgccgtcgtgcatcatcatctccggccagggccagggcattcgtctccgcctccggtccggcctcctccacaccgcgccccccccccccccccagacgcgtcgctgcgtagctgctggccgccatggccaccgtcatggccgcggccgtctagtccttcccgtcctcctcggccgtcgtcgccaaggcgtcgccggcgtccccctgtgccgccccgcacttccgcccgagggccgtgcgggccgctatccgggcgcaggcgtccgccgtcgaggcgcccgccacggccaaggccaagaaggagtccaagaagcaggaggagggcgtcgtcaccaacctatacaagcccaaggagccgtacgtcggcaggtgcctcctcaacaccaagatcaccggcgacgacgcgccgggggagacgtggcacatggtcttcagcaccgaaggcccttctttgcctgcgcgaggtctcagaatccggggggaaaagaaaagaaaagaaaagatgatgactgtctctacctcttgctacatgtgccgctccctcgtccgggctcctccgctcaagtccaggagtgcagtgcgctgtccaagcgccgccccgccaggtgctagcggtgccacctccacctccaagcttgtcctagaggtgaaagaacggctagcaagggagcacccaggcctccccacgggcaggaacgggagggacgatgacgacatggtcctctggttcctaaaggaccgcaagttctccgtcgatgaagccgtctccaagctcaccaaggcgattaaatggcgtcaggactttggtgttgcagagttatcagaggaatcagtgaaaagcctgtaccaaactggcaaggcatatgtacatgattccttggacatttatggccgacctgtgctgattgtagtggcagccaaacattttccttcgacacaggatccagttggaaaccagaagttgtgtgcctatttggttgagaaggcagtcagcagacttccgccaggagtagagaatatacttgggatctttgatctgcgaggctttcgggttgaaaatggtgatctccagttcctaaagtttttgatggacgttttttactattactacccgaagcggcttggccaagttctttttgtcgatgctccttttgtttttcaaccaatgtggcaggttgttaaacctctgttgaaatcatatgcctccctggtaagattttgtgatgccgagactgtgaggaaggaatacttcaaagaagaaatcgtgcctcctgatttccgcgattaggtgctcattcaagtactctactgatcgaaaatggatggcgtctgtgatggttgattcttttgcacgtcttctacactggtacattgacggctgatggagatggatggtggtgtcgctgttttgtgttttgtttagcactctaggtgacacattgttatgggattgttacacagctgatatgttatgaacctgatatggagatctttttgcgtcctttgtttgggtgttactgttgtgccattcgtctcataagttatgccattttattacttgcttttggattgatatatattcgtctctgaagccttccttcaatacaaatacaagagtttttt

SEQ ID NO: 79711 - DNA, 2129 bp, Zea Mays
tctccctccacaaccacttgctcctcatctacttttctcctccgccttccactcatccttgctcctgcctgccgtcgtgcatcatcatctccggccagggccagggcattcgtctccgcctccggtccggcctcctccacaccgcgccccccccccccccccagacgcgtcgctgcgtagctgctggccgccatggccaccgtcatggccgcggccgtctagtccttcccgtcctcctcgggcgtcgtcaccaacctatacaagcccaaggagccgtacgtcggcaggtgcctcctcaacaccaagatcaccggcgacgacgcgccgggggagacgtggcacatggtcttcagcaccgaaggcccttctttgcctgcgcgaggtctcagaatccggggggaaaagaaaagaaaagaaaagatgatgactgtctctacctcttgctacatgtgccgctccctcgtccgggctcctccgctcaagtccaggagtgcagtgcgctgtccaagcgccgccccgccaggtgctagcggtgccacctccacctccaagcttgtcctagaggtgaaagaacggctagcaagggagcacccaggcctccccacgggcaggaacgggagggacgatgacgacatggtcctctggttcctaaaggaccgcaagttctccgtcgatgaagccgtctccaagctcaccaaggcgattaaatggcgtcaggactttggtgttgcagagttatcagaggaatcagtgaaaagcctgtaccaaactggcaaggcatatgtacatgattccttggacatttatggccgacctgtgctgattgtagtggcagccaaacattttccttcgacacaggatccagttggaaaccagaagttgtgtgcctatttggttgagaaggcagtcagcagacttccgccaggagtagagaatatacttgggatctttgatctgcgaggctttcgggttgaaaatggtgatctccagttcctaaagtttttgatggacgttttttactattactacccgaagcggcttggccaagttctttttgtcgatgctccttttgtttttcaaccaatgtggcaggttgttaaacctctgttgaaatcatatgcctccctggtaagattttgtgatgccgagactgtgaggaaggaatacttcaaagaagaaatcgtgcctcctgatttccgcgattaggtggtctcggaaacatggcctttaatttattgagaatcgattggcacccagggggactggcgccttcccatacctttggattaacctctcaaaagttgctcagacggcagcaaatgattggagagtccagtaaaaaatgacccagtacttgtataactagtgcgaagtagaatgctgagtttaggctgctgtcttgagtgctcctataccatatttttctggttttggatgaagctatatggatcaaattcatctctgttgaacaattgccaattacataacttgtgtttgcccaattccatggtgtagtaccataacttctcagtgcagtgcagacaacacatggattccatttttttattaaagtaccatctgctacaaatatgaatcatggctttgtttgtagacttcataaagaaacacacagattaatcaaaccagtcttcgaagagtctgctatggataggaacgttccaaagcaaaataagatgcaagttgtattgcataaaaaccaggtacacatcaatcagctgcattctggaagactaaactgcaacacaactacatctgcaatcacagagaaatcaggtgctcattcaagtactctactgatcgaaaatggatggcgtctgtgatggttgattcttttgcacgtcttctacactggtacattgacggctgatggagatggatggtggtgtcgctgttttgtgttttgtttagcactctaggtgacacattgttatgggattgttacacagctgatatgttatgaacctgatatggagatctttttgcgtcctttgtttgggtgttactgttgtgccattcgtctcataagttatgccattttattacttgcttttggattgatatatattcgtctctgaagccttccttcaatacaaatacaagagtttttt

SEQ ID NO: 79712 - DNA, 2284 bp, Zea Mays
tctccctccacaaccacttgctcctcatctacttttctcctccgccttccactcatccttgctcctgcctgccgtcgtgcatcatcatctccggccagggccagggcattcgtctccgcctccggtccggcctcctccacaccgcgccccccccccccccccagacgcgtcgctgcgtagctgctggccgccatggccaccgtcatggccgcggccgtctagtccttcccgtcctcctcggccgtcgtcgccaaggcgtcgccggcgtccccctgtgccgccccgcacttccgcccgagggccgtgcgggccgctatccgggcgcaggcgtccgccgtcgaggcgcccgccacggccaaggccaagaaggagtccaagaagcaggaggagggcgtcgtcaccaacctatacaagcccaaggagccgtacgtcggcaggtgcctcctcaacaccaagatcaccggcgacgacgcgccgggggagacgtggcacatggtcttcagcaccgaaggcccttctttgcctgcgcgaggtctcagaatccggggggaaaagaaaagaaaagaaaagatgatgactgtctctacctcttgctacatgtgccgctccctcgtccgggctcctccgctcaagtccaggagtgcagtgcgctgtccaagcgccgccccgccaggtgctagcggtgccacctccacctccaagcttgtcctagaggtgaaagaacggctagcaagggagcacccaggcctccccacgggcaggaacgggagggacgatgacgacatggtcctctggttcctaaaggaccgcaagttctccgtcgatgaagccgtctccaagctcaccaaggcgattaaatggcgtcaggactttggtgttgcagagttatcagaggaatcagtgaaaagcctgtaccaaactggcaaggcatatgtacatgattccttggacatttatggccgacctgtgctgattgtagtggcagccaaacattttccttcgacacaggatccagttggaaaccagaagttgtgtgcctatttggttgagaaggcagtcagcagacttccgccaggagtagagaatatacttgggatctttgatctgcgaggctttcgggttgaaaatggtgatctccagttcctaaagtttttgatggacgttttttactattactacccgaagcggcttggccaagttctttttgtcgatgctccttttgtttttcaaccaatgtggcaggttgttaaacctctgttgaaatcatatgcctccctgattttgtgatgccgagactgtgaggaaggaatacttcaaagaagaaatcgtgcctcctgatttccgcgattagaaatgtgcaggtggtctcggaaacatggcctttaatttattgagaatcgattggcacccagggggactggcgccttcccatacctttggattaacctctcaaaagttgctcagacggcagcaaatgattggagagtccagtaaaaaatgacccagtacttgtataactagtgcgaagtagaatgctgagtttaggctgctgtcttgagtgctcctataccatatttttctggttttggatgaagctatatggatcaaattcatctctgttgaacaattgccaattacataacttgtgtttgcccaattccatggtgtagtaccataacttctcagtgcagtgcagacaacacatggattccatttttttattaaagtaccatctgctacaaatatgaatcatggctttgtttgtagacttcataaagaaacacacagattaatcaaaccagtcttcgaagagtctgctatggataggaacgttccaaagcaaaataagatgcaagttgtattgcataaaaaccaggtacacatcaatcagctgcattctggaagactaaactgcaacacaactacatctgcaatcacagagaaatcaggtgctcattcaagtactctactgatcgaaaatggatggcgtctgtgatggttgattcttttgcacgtcttctacactggtacattgacggctgatggagatggatggtggtgtcgctgttttgtgttttgtttagcactctaggtgacacattgttatgggattgttacacagctgatatgttatgaacctgatatggagatctttttgcgtcctttgtttgggtgttactgttgtgccattcgtctcataagttatgccattttattacttgcttttggattgatatatattcgtctctgaagccttccttcaatacaaatacaagagtttttt

SEQ ID NO: 79713 - DNA, 2370 bp, Zea Mays
tctccctccacaaccacttgctcctcatctacttttctcctccgccttccactcatccttgctcctgcctgccgtcgtgcatcatcatctccggccagggccagggcattcgtctccgcctccggtccggcctcctccacaccgcgccccccccccccccccagacgcgtcgctgcgtagctgctggccgccatggccaccgtcatggccgcggccgtctagtccttcccgtcctcctcggccgtcgtcgccaaggcgtcgccggcgtccccctgtgccgccccgcacttccgcccgagggccgtgcgggccgctatccgggcgcaggcgtccgccgtcgaggcgcccgccacggccaaggccaagaaggagtccaagaagcaggaggagggcgtcgtcaccaacctatacaagcccaaggagccgtacgtcggcaggtgcctcctcaacaccaagatcaccggcgacgacgcgccgggggagacgtggcacatggtcttcagcaccgaaggcccttctttgcctgcgcgaggtctcagaatccggggggaaaagaaaagaaaagaaaagatgatgactgtctctacctcttgctacatgtgccgctccctcgtccgggctcctccgctcaagtccaggagtgcagtgcgctgtccaagcgccgccccgccaggtgctagcggtgccacctccacctccaagcttgtcctagaggtgaaagaacggctagcaagggagcacccaggcctccccacgggcaggaacgggagggacgatgacgacatggtcctctggttcctaaaggaccgcaagttctccgtcgatgaagccgtctccaagctcaccaaggcgattgtatcctctaattcactcgcttgtagcagtgaagctcacacctaatatatagcttctttactggctcactaaattcctgagttatcagaggaatcagtgaaaagcctgtaccaaactggcaaggcatatgtacatgattccttggacatttatggccgacctgtgctgattgtagtggcagccaaacattttccttcgacacaggatccagttggaaaccagaagttgtgtgcctatttggttgagaaggcagtcagcagacttccgccaggagtagagaatatacttgggatctttgatctgcgaggctttcgggttgaaaatggtgatctccagttcctaaagtttttgatggacgttttttactattactacccgaagcggcttggccaagttctttttgtcgatgctccttttgtttttcaaccaatgtggcaggttgttaaacctctgttgaaatcatatgcctccctggtaagattttgtgatgccgagactgtgaggaaggaatacttcaaagaagaaatcgtgcctcctgatttccgcgattaggtgacatgattatttcttcagtaattgcaaaaatgtgcaggtggtctcggaaacatggcctttaatttattgagaatcgattggcacccagggggactggcgccttcccatacctttggattaacctctcaaaagttgctcagacggcagcaaatgattggagagtccagtaaaaaatgacccagtacttgtataactagtgcgaagtagaatgctgagtttaggctgctgtcttgagtgctcctataccatatttttctggttttggatgaagctatatggatcaaattcatctctgttgaacaattgccaattacataacttgtgtttgcccaattccatggtgtagtaccataacttctcagtgcagtgcagacaacacatggattccatttttttattaaagtaccatctgctacaaatatgaatcatggctttgtttgtagacttcataaagaaacacacagattaatcaaaccagtcttcgaagagtctgctatggataggaacgttccaaagcaaaataagatgcaagttgtattgcataaaaaccaggtacacatcaatcagctgcattctggaagactaaactgcaacacaactacatctgcaatcacagagaaatcaggtgctcattcaagtactctactgatcgaaaatggatggcgtctgtgatggttgattcttttgcacgtcttctacactggtacattgacggctgatggagatggatggtggtgtcgctgttttgtgttttgtttagcactctaggtgacacattgttatgggattgttacacagctgatatgttatgaacctgatatggagatctttttgcgtcctttgtttgggtgttactgttgtgccattcgtctcataagttatgccattttattacttgcttttggattgatatatattcgtctctgaagccttccttcaatacaaatacaagagtttttt

SEQ ID NO: 79714 - DNA, 1470 bp, Zea Mays
ctctaattcactcgcttgtagcagtgaagctcacacctaatatatagcttctttactggctcactaaattcctgagttatcagaggaatcagtgaaaagcctgtaccaaactggcaaggcatatgtacatgattccttggacatttatggccgacctgtgctgattgtagtggcagccaaacattttccttcgacacaggatccagttggaaaccagaagttgtgtgcctatttggttgagaaggcagtcagcagacttccgccaggagtagagaatatacttgggatctttgatctgcgaggctttcgggttgaaaatggtgatctccagttcctaaagtttttgatggacgttttttactattactacccgaagcggcttggccaagttctttttgtcgatgctccttttgtttttcaaccaatgtggcaggttgttaaacctctgttgaaatcatatgcctccctggtaagattttgtgatgccgagactgtgaggaaggaatacttcaaagaagaaatcgtgcctcctgatttccgcgattaggtggtctcggaaacatggcctttaatttattgagaatcgattggcacccagggggactggcgccttcccatacctttggattaacctctcaaaagttgctcagacggcagcaaatgattggagagtccagtaaaaaatgacccagtacttgtataactagtgcgaagtagaatgctgagtttaggctgctgtcttgagtgctcctataccatatttttctggttttggatgaagctatatggatcaaattcatctctgttgaacaattgccaattacataacttgtgtttgcccaattccatggtgtagtaccataacttctcagtgcagtgcagacaacacatggattccatttttttattaaagtaccatctgctacaaatatgaatcatggctttgtttgtagacttcataaagaaacacacagattaatcaaaccagtcttcgaagagtctgctatggataggaacgttccaaagcaaaataagatgcaagttgtattgcataaaaaccaggtacacatcaatcagctgcattctggaagactaaactgcaacacaactacatctgcaatcacagagaaatcaggtgctcattcaagtactctactgatcgaaaatggatggcgtctgtgatggttgattcttttgcacgtcttctacactggtacattgacggctgatggagatggatggtggtgtcgctgttttgtgttttgtttagcactctaggtgacacattgttatgggattgttacacagctgatatgttatgaacctgatatggagatctttttgcgtcctttgtttgggtgttactgttgtgccattcgtctcataagttatgccattttattacttgcttttggattgatatatattcgtctctgaagccttccttcaatacaaatacaagagtttttt

SEQ ID NO: 79715 - DNA, 1513 bp, Zea Mays
cacacagccaaaccatcctcctctccgccgcccgccgcagcagcacccaccgggcaagatgaagacgatcctggcgtcggagacgatggacatcccggagggcgtcatggtcacggtggccgccaagctggtcacggtggagggcccccgcggcaagctcacccgcaacttcaagcacctcaacctcgacttccagctgcaggaggccggccgcaagctcaaggtggacgcctggttcggcacccgccgcaccatggccgccatccgcaccgccatctcccacgtccagaacctcatcaagggggtcaccaagggctaccgctacaagatgaggttcgtctacgcccacttccccatcaacgcctccatcaccaacagcaacacagccatcgagattaggaacttcctcggcgagaagaaggtcaggaaggtggacatgcttgatggcgtgaccatcctccggtccgagaaggtcaaggatgagctcatccttgacggaaacgacgtcgagctcgtatctcgctccgccgccctcatcaaccagaatgtcatgtgaagaagaaggatatccgaaagtttttggacggtatctatgtgagcgacaagggcgtcatcgaagaggagcagtgagcgacagagtagccgaaatgccaggagatgaatatgaatgtcgtttgagttgcaattttgtgagattggatgtgaacctttttctcattccttaaatagttgactgccagtgttcgtggtttcaaacgaaatttagtcttattaactgaatttgcgtattcaaatggattgcgtggctgcctggttatgttttgaattttgcgtcgcggtccaataattcgatggactggacccaaggaaatttgaatccgaatggactgatacgttgtattttacggttcctttcaaatttcaaattcacatcgaatgttttaacttatcgttagcagtcaggactaagtttaaatatcttttcaaaacccccacaagctgaactctagcgaaacctctttaattcagcagctctataaagcaagcattgttctatggtctagctagcgcgcgacagccacttaaggtcacatctcggaatcaagaagaaattgttcagccgcggatccttctgagcacgaacatgccatatccgatgccaagaaacgtggcaatggagatcccgaagatgccgacgaggatcccgggcacgacgagcgaggtccagcctttggccgtggccatggcggctgcggtggtggggccgcctatgttggcgttggaggcgatgagcagcggcttcctgtcgatcccaataaccctgccggcggcgagcaccacggccatgtggacggacacctgcacgagcgcgaaggcgaagacgctgggcgcccgggtgacggcgtccacgacgttgccgttggcaccgacgacggcgaagaagagctgcatgaggatgagcgccagggtctcgccggcaggcgccagcctgctgagcggcgccgggaacgcc

SEQ ID NO: 79716 - DNA, 784 bp, Zea Mays
tcctatcaacgaaggctttcatttcgtgacgggccgaaactcccagacaaaacacgggagagggagaatgcaagcccaaggcaggcaaagcaaaggctatgtggggccgcgtgctagagtgcgaagaagaaacttgtggccaggagaggagccgcgcgaccgcgaagtttagtcatcgtctccagctgctgtcttgctcttccccgccagcaccagcacgcagcacgcagcaccagccaccacaccacccgtcacgtcactactgctccttcctttgtcctctcctgcctcacgtctcacgccagcagaagcgccaaacaccagcagcggacgaccacgccaactctaggtctacgaggaaggggggggggagggaggagcagcgcagcggcagccgatggtgtcgacgagctcgacgccgcaccctctggatccgtccgtcccggccgtcgtggggggcggcaaggaggaggaggaggaggcggtggagtcttgtgccgccgccgccgccacgcccttgccgccggttgggatcgacgacgaggaggagggcccccggagagtgcgcaagccctacaccatcaccaagtcgcgcgagagctggaccgaccccgagcacgacaagttcctcgaggcactgcagctgtactctttcgaggaacctactggtgtcgtttctggggactactccaaaagcgtgaggaggacaccataaggattaaagatgcttgcagggtgctggaagccactacgatgcaaatcttcgcaatgcacggttggagct

SEQ ID NO: 79717 - DNA, 1737 bp, Zea Mays
tgccggctgccgcgtcacgtcacgtgcagcgcacacaccatccgccgccagggcggggcccatcgcggcatcgccgtcgagtcgcctctgcattccttttccttcccagttcactcccacttcccacttcactcccagtcccagctcccaaaccatctgatctgctctgctcccaccaatctccgtcgccgtcgctttcgccatggcttcccatcgccacttcctacgcctcctcgaagaccccttctcccccttcccaccgccgccaccttcctcctcctcctgcccgttcctccttgacggcgtctcagattacccgtccccgttccccgccgcctccccattccccgacctagatgatctcctcctgccccccgcgccggcgctcgaccccttcttggccttcacccccaccccgctcattctccgagacctcaccaaccgtgtcgccgcactcgaggtcgccgtcgccaccgcgcgccgccgccccggaccccccgccacccggaagcgcacctatgtcactgaggccggcggccgcaaggtcaagtggacttccgtcgagaagccgcgcgccggggagcggacgctcaagtgggaggccgagatcaagtcccccgacgacgacggcttcgaccgcaagtggaagtgggaggccaagggcggatcctccgcagccagcgccaggaagctcaagtggggtgccgcggtcaagggcaagggatgtctcgagccctggtcccaggcctacacctgggaggaggacttcaccgccagcgacagcgacaaagaagaggaggagcgcgcggccgacaagaacaaggccaagaagatcaccatgaacaagaatgagaagaaggaggtgaaggctgtcaagaaggagaagaaatgccccttcgccaccgtcaagatcgaggagatctcggaagacaatgatgctggatgcgtcgccatcaaaaaggcatttgctaagggcaacggcaagggaaagaggaaggagctctcaccgcaggacgctgcattgctcatccagatgacctacagggctcaccttgctcatcgctcccaggtgcttcgctgcctgcgtgacctagctgtggctaaagccaagctcaaggagctcaggtccctgttctataacatctcctacaggcaccgcattgcgcatgaccacgaagagcgccagaggttctctgagaagatcatcgtgctgctcatcaccgtagatgcactcgagggacctgactacatggtgaggaccgcgaagaaatctatgctagaggagctcgaagcaatgctggaggttgtggaccctcagcccccagggaagcagcgatcactgagccgcaggaaatttgatctcccagagggtggagccatccccgatgagaaaaccgctgctgtgaacaaagccatcaggatcatcgaggaaggagaagtttatatccgtgtgctttgctgacactcgagggaggagaactaatatctgcactttattgtaccttaaatgatagccatgtttttattgtgaacctgtagtatgttgctaggcagtcagtttgaacattacaaatagcgtaagggcctctagccgggttggttaggtagtctgagtagcacttcctcatgtcctggttgtgggagcgaatgtcagactgtggttaaaaaaatatcccatcgtttgtcccacgccaaagtacaggtctaaagcttagtctcagtcgcggtcattctcat

SEQ ID NO: 79718 - DNA, 2128 bp, Zea Mays
tgccggctgccgcgtcacgtcacgtgcagcgcacacaccatccgccgccagggcggggcccatcgcggcatcgccgtcgagtcgcctctgcattccttttccttcccagttcactcccacttcccacttcactcccagtcccagctcccaaaccatctgatctgctctgctcccaccaatctccgtcgccgtcgctttcgccatggcttcccatcgccacttcctacgcctcctcgaagaccccttctcccccttcccaccgccgccaccttcctcctcctcctgcccgttcctccttgacggcgtctcagattacccgtccccgttccccgccgcctccccattccccgacctagatgatctcctcctgccccccgcgccggcgctcgaccccttcttggccttcacccccaccccgctcattctccgagacctcaccaaccgtgtcgccgcactcgaggtcgccgtcgccaccgcgcgccgccgccccggaccccccgccacccggaagcgcacctatgtcactgaggccggcggccgcaaggtcaagtggacttccgtcgagaagccgcgcgccggggagcggacgctcaagtgggaggccgagatcaagtcccccgacgacgacggcttcgaccgcaagtggaagtgggaggccaagggcggatcctccgcagccagcgccaggaagctcaagtggggtgccgcggtcaagggcaagggatgtctcgagccctggtcccaggcctacacctgggaggaggacttcaccgccagcgacagcgacaaagaagaggaggagcgcgcggccgacaagaacaaggccaagaagatcaccatgaacaagaatgagaagaaggaggtgaaggctgtcaagaaggagaagaaatgccccttcgccaccgtcaagatcgaggagatctcggaagacaatgatgctggatgcgtcgccatcaaaaaggtcagaccatttcttttgcattcgtcattcccctcactggtgagtggtgactgcttgggtttccgcttctcacaggggttttgaacggtggttgggggccaaaaaggtttacttttatatttgttttgatctgaagaaacgctagttttctagcagcactaggactattggagagatccatacacttgatacttgatgtggttcgagaagagtttgatgatgctgtaccgttctagatccgcattcctggtcctggctgccactctttttgtactgacctgcattttcctctctgatcctgagtaaggcatttgctaagggcaacggcaagggaaagaggaaggagctctcaccgcaggacgctgcattgctcatccagatgacctacagggctcaccttgctcatcgctcccaggtgcttcgctgcctgcgtgacctagctgtggctaaagccaagctcaaggagctcaggtccctgttctataacatctcctacaggcaccgcattgcgcatgaccacgaagagcgccagaggttctctgagaagatcatcgtgctgctcatcaccgtagatgcactcgagggacctgactacatggtgaggaccgcgaagaaatctatgctagaggagctcgaagcaatgctggaggttgtggaccctcagcccccagggaagcagcgatcactgagccgcaggaaatttgatctcccagagggtggagccatccccgatgagaaaaccgctgctgtgaacaaagccatcaggatcatcgaggaaggcaagtgaagtgatgcaccaccaccttgttactggcaggattgaatcctgatgaaagctccatatctatccgtgtatcgtctaggagaagtttatatccgtgtgctttgctgacactcgagggaggagaactaatatctgcactttattgtaccttaaatgatagccatgtttttattgtgaacctgtagtatgttgctaggcagtcagtttgaacattacaaatagcgtaagggcctctagccgggttggttaggtagtctgagtagcacttcctcatgtcctggttgtgggagcgaatgtcagactgtggttaaaaaaatatcccatcgtttgtcccacgccaaagtacaggtctaaagcttagtctcagtcgcggtcattctcat

SEQ ID NO: 79719 - DNA, 887 bp, Zea Mays
cttttgcattcgtcattcccctcactggcatttgctaagggcaacggcaagggaaagaggaaggagctctcaccgcaggacgctgcattgctcatccagatgacctacagggctcaccttgctcatcgctcccaggtgcttcgctgcctgcgtgacctagctgtggctaaagccaagctcaaggagctcaggtccctgttctataacatctcctacaggcaccgcattgcgcatgaccacgaagagcgccagaggttctctgagaagatcatcgtgctgctcatcaccgtagatgcactcgagggacctgactacatggtgaggaccgcgaagaaatctatgctagaggagctcgaagcaatgctggaggttgtggaccctcagcccccagggaagcagcgatcactgagccgcaggaaatttgatctcccagagggtggagccatccccgatgagaaaaccgctgctgtgaacaaagccatcaggatcatcgaggaaggcaagtgaagtgatgcaccaccaccttgttactggcaggattgaatcctgatgaaagctccatatctatccgtgtatcgtctaggagaagtttatatccgtgtgctttgctgacactcgagggaggagaactaatatctgcactttattgtaccttaaatgatagccatgtttttattgtgaacctgtagtatgttgctaggcagtcagtttgaacattacaaatagcgtaagggcctctagccgggttggttaggtagtctgagtagcacttcctcatgtcctggttgtgggagcgaatgtcagactgtggttaaaaaaatatcccatcgtttgtcccacgccaaagtacaggtctaaagcttagtctcagtcgcggtcattctcat

SEQ ID NO: 79720 - DNA, 913 bp, Zea Mays
cttgggtttccgcttctcacaggggttttgaacggtggttgggggccaaaaaggcatttgctaagggcaacggcaagggaaagaggaaggagctctcaccgcaggacgctgcattgctcatccagatgacctacagggctcaccttgctcatcgctcccaggtgcttcgctgcctgcgtgacctagctgtggctaaagccaagctcaaggagctcaggtccctgttctataacatctcctacaggcaccgcattgcgcatgaccacgaagagcgccagaggttctctgagaagatcatcgtgctgctcatcaccgtagatgcactcgagggacctgactacatggtgaggaccgcgaagaaatctatgctagaggagctcgaagcaatgctggaggttgtggaccctcagcccccagggaagcagcgatcactgagccgcaggaaatttgatctcccagagggtggagccatccccgatgagaaaaccgctgctgtgaacaaagccatcaggatcatcgaggaaggcaagtgaagtgatgcaccaccaccttgttactggcaggattgaatcctgatgaaagctccatatctatccgtgtatcgtctaggagaagtttatatccgtgtgctttgctgacactcgagggaggagaactaatatctgcactttattgtaccttaaatgatagccatgtttttattgtgaacctgtagtatgttgctaggcagtcagtttgaacattacaaatagcgtaagggcctctagccgggttggttaggtagtctgagtagcacttcctcatgtcctggttgtgggagcgaatgtcagactgtggttaaaaaaatatcccatcgtttgtcccacgccaaagtacaggtctaaagcttagtctcagtcgcggtcattctcat

SEQ ID NO: 79721 - DNA, 2961 bp, Zea Mays
aaacatcagagaatttaaaactctgctataaacaggaatataattttaattatggtcaccaatatcagtagatactgatgcagtcagctcccctgtttccgcttcacacgctactgctgctctctcctctcctctttggcgctcccaacacacaagaagaaactgacggaggagcggagcggagccgagccacggccagtgccaggagcgaaaataaaaaggggtaggagttcctcctccccaacctcacaagtaaagcagcagcagcagaccttcttgacctagcaagcaatggggccgccgttcctcgccgtcgccgtcatcgtcgccttcctggccgccgccgcgcaggccgccgaccccttcgccttcttcgactgggacgtctcctacatcaccgcctcccctctcggcgtcccgcagcaggtcatcgcagtcaacaagcagttcccaggccctatcatgaacgtcactaccaactacaatgtggtcgtcaatgtgctcaacagcttagacgagcccctgctcatcacttgggatgggatccagcagcgcaagaattgctggcaggatggggttctcggcaccacctgccccataccgccaggttggaactggacctacaacttccaggtcaaggaccagattggcagcttcttctacttcccaccccttggtatgcagcgtgccgcgggggggttcggaggtatcactgtcaacaaccgcgcggtcatctcggtcccattcgacacgcccgatggggacatcacgctcttcatcggggactggtacaagatgaaccacacgcacctgaggaagatgctcgacgacggcaaggaactggggatgccagacggtgttttgatgaatggcaaggggccatataggtataatgactcgctagtgccagatggcattgagcacgagactatcaaagttgagccaggtggattacttttctcactttaagcatcgatcataggctgtctgtcacttcaaactgggatggctttttttccttattaaaatgttccactaatccatgtccaagttaaccaaaacaaatccggtctctacaagtccatatcttccatgtttttcaatctcaaaagttcatttgtgttgcttcgcatcaatgtcaccattgactgaaccacatacaatgttttccctacatgttggaaggatgagaaggtgataactcattatcactttcatgatggaaaaacataccgtttccgtgtccacaatgttggtgtctccacaagcttgaacttacggattcagaatcacaacatggcccttgttgaaacagaaggttcatacacgatgaagcagaattttactaatctcgacatccacgtgggccagtcttactcatttctggtcactatggatcagaacgcaagcagtgattattacatcgtggccagtgctaggtttgtgaacgaatcgctttggaccagagtcaccggtgttgcaattttgcaatattcaaattcaaagggaaaagcatctggtcctcttcctgatccaccaaatgatgagtatgacaaaactttttcaatgaaccaggcacgttccatcaggatgaacgtgagcactggtgctgctcgtccgaatcctcaaggatcatttcactatgggtctatcaatgtgagccaagtttacaagctgaggaatgaaccacctgttatcatcaatgggaagaaacggactacactgagtggtatctcttattccccacccgacactcctctaaggttggcagatctgtacgacaagaaggatgtctacacacttgacttccctacaatgccaattgatggaccgccagtgatcagaacatctgtcattaactccacatacaagaactttttggaaattgtatttcagaacaatgactcaactgtccagacctaccacattgatggatatgcattctgggttgtaggaatggactatggcgagtggactgagaatagccgtgggacttacaacaagtgggatggtgtttctcgttgcacgactcaggtgtttccgggagcatggactgctgtgatgctgtcacttgacagcccaggattttggaatgtacggacagaaaacctggacacgtggtatctgggtcaggagacttacatcagggtggtggatccaaatggaggctataatgttactgagatggtggctccagacaacatgctctactgtggcctcctcaaggataaacagaaggctcagaagcctcatggttcgaggtcatcagcctctgcagcaaaactgaactatcatgtgctcgcggctttggtctctttggtggtagccttggtgttgggccattgacaagaactgcctccagcttgtggtcagctgctgtttgcaggttgattaggcgtttgacagaaatactgttgagtaggtcagtcgaattcgtaggttccattcatgatttgtctggcaattgagaaaaaaaaatgctgtgccattgcgcatcttcgtccatcggaattgattaacatgctgaagaactgtgcagtagcttgagattgagcacaaatttgaagttgtcggcagctggcacccacaagcaaggcgtgtgctgtgctgcctgagtgtgttttcttgatcagtgaatttgtcgagagttggatattgttggttgtatcccatgcatcccattgcaattaccaaaccatggacaatcaaaggcactactgtacacaacagttggtgttactgtgtatctcatcagtttgagcctgttggattcaaaagccaattgttagctggctaaagaatagctacagttgatcttagtatatttagggtctgtttggttgggctgtggctgtgaaaaaagttgctgtaggctgtgagctgtggaaaaagctgctataggctgtaagctgttaaaaagctaaaaatcgtttggtgaaaaccactaaaagtagttaaaat

SEQ ID NO: 79722 - DNA, 2586 bp, Zea Mays
ctgctctctcctctcctctttggcgctcccaacacacaagaagaaactgacggaggagcggagcggagccgagccacggccagtgccaggagcgaaaataaaaaggggtaggagttcctcctccccaacctcacaagtaaagcagcagcagcagaccttcttgacctagcaagcaatggggccgccgttcctcgccgtcgccgtcatcgtcgccttcctggccgccgccgcgcaggccgccgaccccttcgccttcttcgactgggacgtctcctacatcaccgcctcccctctcggcgtcccgcagcaggtcatcgcagtcaacaagcagttcccaggccctatcatgaacgtcactaccaactacaatgtggtcgtcaatgtgctcaacagcttagacgagcccctgctcatcacttgggatgggatccagcagcgcaagaattgctggcaggatggggttctcggcaccacctgccccataccgccaggttggaactggacctacaacttccaggtcaaggaccagattggcagcttcttctacttcccaccccttggtatgcagcgtgccgcgggggggttcggaggtatcactgtcaacaaccgcgcggtcatctcggtcccattcgacacgcccgatggggacatcacgctcttcatcggggactggtacaagatgaaccacacgcacctgaggaagatgctcgacgacggcaaggaactggggatgccagacggtgttttgatgaatggcaaggggccatataggtataatgactcgctagtgccagatggcattgagcacgagactatcaaagttgagccagcttccattcctcaacaggaaaaacataccgtttccgtgtccacaatgttggtgtctccacaagcttgaacttacggattcagaatcacaacatggcccttgttgaaacagaaggttcatacacgatgaagcagaattttactaatctcgacatccacgtgggccagtcttactcatttctggtcactatggatcagaacgcaagcagtgattattacatcgtggccagtgctaggtttgtgaacgaatcgctttggaccagagtcaccggtgttgcaattttgcaatattcaaattcaaagggaaaagcatctggtcctcttcctgatccaccaaatgatgagtatgacaaaactttttcaatgaaccaggcacgttccatcaggatgaacgtgagcactggtgctgctcgtccgaatcctcaaggatcatttcactatgggtctatcaatgtgagccaagtttacaagctgaggaatgaaccacctgttatcatcaatgggaagaaacggactacactgagtggtatctcttattccccacccgacactcctctaaggttggcagatctgtacgacaagaaggatgtctacacacttgacttccctacaatgccaattgatggaccgccagtgatcagaacatctgtcattaactccacatacaagaactttttggaaattgtatttcagaacaatgactcaactgtccagacctaccacattgatggatatgcattctgggttgtaggaatggactatggcgagtggactgagaatagccgtgggacttacaacaagtgggatggtgtttctcgttgcacgactcaggtgtttccgggagcatggactgctgtgatgctgtcacttgacagcccaggattttggaatgtacggacagaaaacctggacacgtggtatctgggtcaggagacttacatcagggtggtggatccaaatggaggctataatgttactgagatggtggctccagacaacatgctctactgtggcctcctcaaggataaacagaaggctcagaagcctcatggttcgaggtcatcagcctctgcagcaaaactgaactatcatgtgctcgcggctttggtctctttggtggtagccttggtgttgggccattgacaagaactgcctccagcttgtggtcagctgctgtttgcaggttgattaggcgtttgacagaaatactgttgagtaggtcagtcgaattcgtaggttccattcatgatttgtctggcaattgagaaaaaaaaatgctgtgccattgcgcatcttcgtccatcggaattgattaacatgctgaagaactgtgcagtagcttgagattgagcacaaatttgaagttgtcggcagctggcacccacaagcaaggcgtgtgctgtgctgcctgagtgtgttttcttgatcagtgaatttgtcgagagttggatattgttggttgtatcccatgcatcccattgcaattaccaaaccatggacaatcaaaggcactactgtacacaacagttggtgttactgtgtatctcatcagtttgagcctgttggattcaaaagccaattgttagctggctaaagaatagctacagttgatcttagtatatttagggtctgtttggttgggctgtggctgtgaaaaaagttgctgtaggctgtgagctgtggaaaaagctgctataggctgtaagctgttaaaaagctaaaaatcgtttggtgaaaaccactaaaagtagttaaaat

SEQ ID NO: 79723 - DNA, 2310 bp, Zea Mays
cggccgcccgcatttccaaccgctgggggaacaaaagattcagttttcgatgtcatcgcagtcaacaagcagttcccaggccctatcatgaacgtcactaccaactacaatgtggtcgtcaatgtgctcaacagcttagacgagcccctgctcatcacttgggatgggatccagcagcgcaagaattgctggcaggatggggttctcggcaccacctgccccataccgccaggttggaactggacctacaacttccaggtcaaggaccagattggcagcttcttctacttcccaccccttggtatgcagcgtgccgcgggggggttcggaggtatcactgtcaacaaccgcgcggtcatctcggtcccattcgacacgcccgatggggacatcacgctcttcatcggggactggtacaagatgaaccacacgcacctgaggaagatgctcgacgacggcaaggaactggggatgccagacggtgttttgatgaatggcaaggggccatataggtataatgactcgctagtgccagatggcattgagcacgagactatcaaagttgagccaggaaaaacataccgtttccgtgtccacaatgttggtgtctccacaagcttgaacttacggattcagaatcacaacatggcccttgttgaaacagaaggttcatacacgatgaagcagaattttactaatctcgacatccacgtgggccagtcttactcatttctggtcactatggatcagaacgcaagcagtgattattacatcgtggccagtgctaggtttgtgaacgaatcgctttggaccagagtcaccggtgttgcaattttgcaatattcaaattcaaagggaaaagcatctggtcctcttcctgatccaccaaatgatgagtatgacaaaactttttcaatgaaccaggcacgttccatcaggatgaacgtgagcactggtgctgctcgtccgaatcctcaaggatcatttcactatgggtctatcaatgtgagccaagtttacaagctgaggaatgaaccacctgttatcatcaatgggaagaaacggactacactgagtggtatctcttattccccacccgacactcctctaaggttggcagatctgtacgacaagaaggatgtctacacacttgacttccctacaatgccaattgatggaccgccagtgatcagaacatctgtcattaactccacatacaagaactttttggaaattgtatttcagaacaatgactcaactgtccagacctaccacattgatggatatgcattctgggttgtaggaatggactatggcgagtggactgagaatagccgtgggacttacaacaagtgggatggtgtttctcgttgcacgactcaggtgtttccgggagcatggactgctgtgatgctgtcacttgacagcccaggattttggaatgtacggacagaaaacctggacacgtggtatctgggtcaggagacttacatcagggtggtggatccaaatggaggctataatgttactgagatggtggctccagacaacatgctctactgtggcctcctcaaggataaacagaaggctcagaagcctcatggttcgaggtcatcagcctctgcagcaaaactgaactatcatgtgctcgcggctttggtctctttggtggtagccttggtgttgggccattgacaagaactgcctccagcttgtggtcagctgctgtttgcaggttgattaggcgtttgacagaaatactgttgagtaggtcagtcgaattcgtaggttccattcatgatttgtctggcaattgagaaaaaaaaatgctgtgccattgcgcatcttcgtccatcggaattgattaacatgctgaagaactgtgcagtagcttgagattgagcacaaatttgaagttgtcggcagctggcacccacaagcaaggcgtgtgctgtgctgcctgagtgtgttttcttgatcagtgaatttgtcgagagttggatattgttggttgtatcccatgcatcccattgcaattaccaaaccatggacaatcaaaggcactactgtacacaacagttggtgttactgtgtatctcatcagtttgagcctgttggattcaaaagccaattgttagctggctaaagaatagctacagttgatcttagtatatttagggtctgtttggttgggctgtggctgtgaaaaaagttgctgtaggctgtgagctgtggaaaaagctgctataggctgtaagctgttaaaaagctaaaaatcgtttggtgaaaaccactaaaagtagttaaaat

SEQ ID NO: 79724 - DNA, 911 bp, Zea Mays
gttggacttcatgcataaaatctttgtagatcgagccagaattgaaatgactaatactatatatgtgatcagaaagatgagccatcgttctctgtatgcagggatcagctagctcattaagtagtaatcttctttccttctacgttactctcggaaaaagaaacaaaaagaaaatagctgtagagtacatgcctaattcttcatttctagaaacaagggcaaagcattggtacatttttgttttgtttccttagatgagcaactgtgcaaacagctaatttgctcaaataaaatgcagaattcagggattcaagcaggtcagctatgggttactgtttctgagtgcataggctatacacgtacgtattactgggagcataaaaatccatccattatctacaatcttaatgggctgggcaatgaatttcaggccaggatattagtggcaccgttattttgacttattagatagcacagtacttattgtatcacaagtaataccaataatggtcacatcaataagaaatcctagcacaaatcaaactcaatcacctggtgtgccctcgcccagtgtaaatgagcaatgcaaattaggacgtacgagagcctaattgataagaggcagaactcgacagcaggaatatcatagtaagcaactaataacaggtatttctagagtgggatgtacgcattacatttgtactagaaattaagatataagattagctcacatgtgattccaagtaaacaagaaaacgaaacagtatggagaatatcaaataataaagggtactgcgcatcgaaaacttgttcagatcgatcatcatgaacataacaggccaaagaaagaaaaccaactaaagctcggcttgatcatgcatatacagagttattagcacattcaatgtgtg

SEQ ID NO: 79725 - DNA, 1507 bp, Zea Mays
gaaaaaaagagaaaaatgatagtatgaacttttatttggtggcccatctcccccatctaattaattcagcgtaagcccaagttccaccagacccacacgtttctttacccagcgaaggcactgcatctcccatcttcgtcttccacgcagcgccggcgctccatcttccgcaggcgacggcggcggtgctcaggcgcgggctcttagccgcggcggcggtgctcaggctcgggctcgtagaggcggcgtcagcgtcttcccctcccgcctctcatcagtcacctcgcgccttcgcctccggtcctccgcacaccggccggtgttctgcggggagctccaaacagtttcttggtttcagtttcttcctatcgaacccgatgcaagtgcagcgtctgagaaaagttcaaaggtcgagcagaaagatgctcttaatagcattgtgctttcggcttatcttcacttacaaagtgaaggttttctaagtacttggactaattcctttgttggtccatgggatccatctcaaggagagcataaccctgatgagaagatcaagctctggctgtttcttcctggctgccactcatcggtatctgaaatcgcccaacctgctgtaaacaagctgagagttgcttcaaatggtttatgggtagccccaggcaactcggaagaggtagcagctgcactatcacaggctttaagaaattctttagaaagatcactgaaagggctttcatatgcaaggtttggtgatgtttttacaaaatacaacccccctacaagaaatcaaaacagctttaggagagcacagcctacagtcgagtttgtctttgctgccaccgaggaagcaatatttgttcacgttgtaatatctgctaggtatgttcggaacctttgtagtgatgacatagagaaagttctcgctcattctcctccctccatcggtgaaggtcttccagttgttgttgctcctagtgggatgctgggtaggcttgtcggttgttgtccaagtgatcttgtacgacaagtttattcaagcaaatcattgacgcctaatttaccaggttttagtcaacctactgtatgccagctgagaggccaaagttactatgttgaagttgcgcttggctttccagctgcttcagccaaaaaagtttctgagtttgagcatattcatataaaaaaagaattggatccagtgaaggatgctatggtcggttctgatggacagcgtaaggtagaatcacctgatggccttccaattcttgagaggacatttatttacccacctgaagctgttttggtacctatggtccatcaagcatttgttcgcttttcgagcaaacgaatgtgtttacagggctcgctgggaagttcatcatgggaggcatggccattctggaattttgctccgtcttcttactttcagaacaggtcagtctcaaattatttgtttctttggcatgctgtatcaacaatactaccaagaattgattattcgttgtaa

SEQ ID NO: 79726 - DNA, 1647 bp, Zea Mays
cgtttctttacccagcgaaggcactgcatctcccatcttcgtcttccacgcagcgccggcgctccatcttccgcaggcgacggcggcggtgctcaggcgcgggctcttagccgcggcggcggtgctcaggctcgggctcgtagaggcggcgtcagcgtcttcccctcccgcctctcatcagtcacctcgcgccttcgcctccggtcctccgcacaccggccggtgttctgcgtgcgtgcttctctctctcctcccgcctccggtggatcgtcaacggcgcccgacccctcaggctgcgccgcgcgcggcctgagggcagcgggagccagcagccgctgctccaacaaaggggttgcgccgctttgggagcgcttatgccccaaagcgaagcgttacacgtcctcttagcgcttcagcttgctgaagcgtgcgcttagtgccgctttttggaacctggcagtaactatgtggacgaacattttcaaaataggggagctccaaacagtttcttggtttcagtttcttcctatcgaacccgatgcaagtgcagcgtctgagaaaagttcaaaggtcgagcagaaagatgctcttaatagcattgtgctttcggcttatcttcacttacaaagtgaaggttttctaagtacttggactaattcctttgttggtccatgggatccatctcaaggagagcataaccctgatgagaagatcaagctctggctgtttcttcctggctgccactcatcggtatctgaaatcgcccaacctgctgtaaacaagctgagagttgcttcaaatggtttatgggtagccccaggcaactcggaagaggtagcagctgcactatcacaggctttaagaaattctttagaaagatcactgaaagggctttcatatgcaaggtttggtgatgtttttacaaaatacaacccccctacaagaaatcaaaacagctttaggagagcacagcctacagtcgagtttgtctttgctgccaccgaggaagcaatatttgttcacgttgtaatatctgctagtgatgacatagagaaagttctcgctcattctcctccctccatcggtgaaggtcttccagttgttgttgctcctagtgggatgctgggtaggcttgtcggttgttgtccaagtgatcttgtacgacaagtttattcaagcaaatcattgacgcctaatttaccaggttttagtcaacctactgtatgccagctgagaggccaaagttactatgttgaagttgcgcttggctttccagctgcttcagccaaaaaagtttctgagtttgagcatattcatataaaaaaagaattggatccagtgaaggatgctatggtcggttctgatggacagcgtaaggtagaatcacctgatggccttccaattcttgagaggacatttatttacccacctgaagctgttttggtacctatggtccatcaagcatttgttcgcttttcgagcaaacgaatgtgtttacagggctcgctgggaagttcatcatgggaggcatggccattctggaattttgctccgtcttcttactttcagaacaggtcagtctcaaattatttgtttctttggcatgctgtatcaacaatactaccaagaattgattattcgttgtaa

SEQ ID NO: 79727 - DNA, 1658 bp, Zea Mays
cgtttctttacccagcgaaggcactgcatctcccatcttcgtcttccacgcagcgccggcgctccatcttccgcaggcgacggcggcggtgctcaggcgcgggctcttagccgcggcggcggtgctcaggctcgggctcgtagaggcggcgtcagcgtcttcccctcccgcctctcatcagtcacctcgcgccttcgcctccggtcctccgcacaccggccggtgttctgcgtgcgtgcttctctctctcctcccgcctccggtggatcgtcaacggcgcccgacccctcaggctgcgccgcgcgcggcctgagggcagcgggagccagcagccgctgctccaacaaaggggttgcgccgctttgggagcgcttatgccccaaagcgaagcgttacacgtcctcttagcgcttcagcttgctgaagcgtgcgcttagtgccgctttttggaacctggcagtaactatgtggacgaacattttcaaaataggggagctccaaacagtttcttggtttcagtttcttcctatcgaacccgatgcaagtgcagcgtctgagaaaagttcaaaggtcgagcagaaagatgctcttaatagcattgtgctttcggcttatcttcacttacaaagtgaaggttttctaagtacttggactaattcctttgttggtccatgggatccatctcaaggagagcataaccctgatgagaagatcaagctctggctgtttcttcctggctgccactcatcggtatctgaaatcgcccaacctgctgtaaacaagctgagagttgcttcaaatggtttatgggtagccccaggcaactcggaagaggtagcagctgcactatcacaggctttaagaaattctttagaaagatcactgaaagggctttcatatgcaaggtttggtgatgtttttacaaaatacaacccccctacaagaaatcaaaacagctttagcctacagtcgagtttgtctttgctgccaccgaggaagcaatatttgttcacgttgtaatatctgctaggtatgttcggaacctttgtagtgatgacatagagaaagttctcgctcattctcctccctccatcggtgaaggtcttccagttgttgttgctcctagtgggatgctgggtaggcttgtcggttgttgtccaagtgatcttgtacgacaagtttattcaagcaaatcattgacgcctaatttaccaggttttagtcaacctactgtatgccagctgagaggccaaagttactatgttgaagttgcgcttggctttccagctgcttcagccaaaaaagtttctgagtttgagcatattcatataaaaaaagaattggatccagtgaaggatgctatggtcggttctgatggacagcgtaaggtagaatcacctgatggccttccaattcttgagaggacatttatttacccacctgaagctgttttggtacctatggtccatcaagcatttgttcgcttttcgagcaaacgaatgtgtttacagggctcgctgggaagttcatcatgggaggcatggccattctggaattttgctccgtcttcttactttcagaacaggtcagtctcaaattatttgtttctttggcatgctgtatcaacaatactaccaagaattgattattcgttgtaa

SEQ ID NO: 79728 - DNA, 1642 bp, Zea Mays
cgtttctttacccagcgaaggcactgcatctcccatcttcgtcttccacgcagcgccggcgctccatcttccgcaggcgacggcggcggtgctcaggcgcgggctcttagccgcggcggcggtgctcaggctcgggctcgtagaggcggcgtcagcgtcttcccctcccgcctctcatcagtcacctcgcgccttcgcctccggtcctccgcacaccggccggtgttctgcgtgcgtgcttctctctctcctcccgcctccggtggatcgtcaacggcgcccgacccctcaggctgcgccgcgcgcggcctgagggcagcgggagccagcagccgctgctccaacaaaggggttgcgccgctttgggagcgcttatgccccaaagcgaagcgttacacgtcctcttagcgcttcagcttgctgaagcgtgcgcttagtgccgctttttggaacctggcagtaactatgtggacgaacattttcaaaataggggagctccaaacagtttcttggtttcagtttcttcctatcgaacccgatgcaagtgcagcgtctgagaaaagttcaaaggtcgagcagaaagatgctcttaatagcattgtgctttcggcttatcttcacttacaaagtgaaggttttctaagtacttggactaattcctttgttggtccatgggatccatctcaaggagagcataaccctgatgagaagatcaagctctggctgtttcttcctggctgccactcatcggtatctgaaatcgcccaacctgctgtaaacaagctgagagttgcttcaaatggtttatgggtagccccaggcaactcggaagaggtagcagctgcactatcacaggctttaagaaattctttagaaagatcactgaaagggctttcatatgcaaggtttggtgatgtttttacaaaatacaacccccctacaagaaatcaaaacagctttaggagagcacagcctacagtcgagtttgtctttgctgccaccgaggaagcaatatttgttcacgttgtaatatctgctaggtatgttcggaacctttgtagtgatgacatagagaaagttctcgctcattctcctccctccatcggtgaaggtcttccagttgttgttgctcctagtgggatgctgggtaggcttgtcggttgttgtccaagtgatcttgtacgacaagtttattcaaggttttagtcaacctactgtatgccagctgagaggccaaagttactatgttgaagttgcgcttggctttccagctgcttcagccaaaaaagtttctgagtttgagcatattcatataaaaaaagaattggatccagtgaaggatgctatggtcggttctgatggacagcgtaaggtagaatcacctgatggccttccaattcttgagaggacatttatttacccacctgaagctgttttggtacctatggtccatcaagcatttgttcgcttttcgagcaaacgaatgtgtttacagggctcgctgggaagttcatcatgggaggcatggccattctggaattttgctccgtcttcttactttcagaacaggtcagtctcaaattatttgtttctttggcatgctgtatcaacaatactaccaagaattgattattcgttgtaa

SEQ ID NO: 79729 - DNA, 5280 bp, Zea Mays
acatgctttacctctgcttagataacgcggtggcccttgaccatgtctttgttccttcaatgctaaaaccatcagagttgtctgtaatttcttgcctttatggagctcatgtgccagatttctgtttgtgtgattcagtcacatctacacgttgcacttttgagactgttgagatgttaaccatttcttttttaggaaccggccttataagcaatattgtgatactctttacatgaatgtaggggtgtcagtataatcatgatgctttgtgtaattaggtatccaagcggcctcgttctgaattaacagaagtctcttctcatactggcaaagatgtttgtgaaaacatacaagacccgaatggtcaggttggacactcttggggctgggacgatgagggtgtcgttatggacatcaatatacttctgtcagagtttggagattttagtgacttctttcaacaagaggagttagattttggtgagcctccaggtactgctgaatcacatgctctagtaattcctgcttcagactgtggagatgtcacattcacagatagtccatcaacagcaatggatatccctgaacaaagactttctcctgttggtttcacaactttggatgcatttgaccatcaaattatggccccagctcaagatgttgttgctaaagttcaagaacctcataatgatactgcaacacctgcacagtcccactcgcaagttttatcatctggaagatttgattatcttaccaaagctgaagcaaagctcacatttgctccagaatatgcagctgttgaaattttgattgctgaggccccaacaccattgtttacaaatccatactttcctagatcaaagaaaccaggcagttctagttttagtgcaagagtttattcatatgatgttgcacaaagctctcaaattgaatccacaggagacaagccagataagacttctaaactaatatctggtaatcatttacatgatattagttcatcaaacttgtacacacttgtccaaggtgggaataaagggagtgataagatcttaaagagtactgatacacagccctctaagggagaattgtcaccacctatttctggtgtgacttcatttaatttttctcttgtttcacaaaagaagagtggcaacatgttcaatgctggctattttctgctgtctatgaagactgctttggcaactgaaattgaatgcatcacgttccaggctgccatgtgcagaattaggcatacactattgtctctgagaagcaaagcatctgccgagtttaacagtgcaacatccagcttcatacagacaaatgtcagcaacaaatcagatctcacccccagatccttaatggacaatgtgggagtttggaggcctgttgttacacctaaagggcctaaatctcttgagtctttgtctgctaacacattaactggtgcaagcccaagtctgtctatacaaagacaacctgttgtagatcttctctgtgccatgactctgcttgttcaacaatctacttcgtttgttgatatgtcacttgatatggatgacggggacggttcttttttctggctttccctggatgagcaaaagagacgtggattttcttgtgatccttctatggttcatgctggctgtggtggcctattaggaacatgccattcaaaggattgcgctggtgttgatttagtcgatccactttctgcagaggtttcagagccatccatgattagcttgttgcagtcagatataagagtagctcttaaagctgcctttgcaaacatggatggcccgttatcagtaattgattggtgcaggggtcgaggcaatgctgctgagtctgcaggtacgggagatgcatactcttttcagtactccagtggtgatatcctggagccgtcaagttcgttgtccattggtggagattcaatgagcccaccccagccaaccagtagcaatcgaggcatttcagaattagagttccaaaagggatatcaccgtgtcagaccaaccattgctgtcctcccttcaccttctatgctagtcggttaccaggatgattggttgaaggcctcggtgaatagtcttaaaacatgggagaaagctccttttgaaccttatgccttgccgaagcctgttacttactatgcactttgccctgatattgatatgttgacttcggcggtagctgattttttcatgcagcttggaacagtttatgaagtttgcaaactgggaactcattcgccccaaaacaatggaggacaaatggaactatctcctggaaaatatttgccttcaggacttgttctagttgattgtcctgagcagttgaagaaggttcgctgtggccacttaggtcccatcagttcaacaagtgactgtcttcaagctttttcaaaacattggagcgtgaaaagttttgtaacatctatttcaaggatacttaaggatataaagctgacttcaaacatatctacaaatcagaaagagagcagtagtggaccttgcacagtaatttatgtagtttgcccatttccagaaccttgtgcaattctacagacgctagtagaatgttctgttgctcttgggtatgttatttcatccccggaaagggaaagaaagttactatattcacaggttgccaaagccctaaacagcagtgcttctgtagatgaagcatcagcatcaaatgtcgttatgctatccgggttcagtatacccaagctcgtcttgcagattgttactattgaaactgtactgagaatggataagccaaacaaggagcttgctgttttgaaggacatagcattcacagtgtacaacaaggcacgacgaatcccacgggctgtctccacaagcgatatgttccagtcaccaacttatttgggtagatctcagtccacaatgatgcatgttacatctcctgctcctactctttggaaggaatgtttagttcctcgaatgtctgggccaactctctctcgagaaaccgattttgatgcatccatgaggtcggcaacatgggataactcatggcagcctgctcgttcgggaggacttctggacccaaatgcatctggcagcagggtatatggctcaatttcaggaagtaactctgatagtggagtgagccctctactcgacgtatctgagagtgacagtgcagcaagtcttcattgctgttatggttggactgaggactggcgatggctagtgtgcatttggacagatgctagaggagaattattggacagcttaatatttccttttggtggtattagtagccgccaagacactaaagttctccaaagccttttcatccaaattctacagcaaggctgtcaaataatgtcgtcttcacctgaggctagcaatatgagaccacgagatgtcataataactcgtatcggaggtttccttgagcttgaaatccaagaatggcagaaggcaatatactcttatggtggcaatgaagtgaagaagtggcctgtgcagttacggcgatccatacctgagggtattccacctagttcaaatggtcctacgctccagcagcagcagcagcaagacatggccttaattcaagatagaaacatgccttcctcaccaaaccctctgtatagccctcatccaaaatcaagcttcatgaaaggtgcacttggacaatctggcaacaaaaaacagatccttgtggaacaaagtggaatggacacttcaaggggatcactgcacttagttcgtagcatcagtttggttgcagtttcccaagatcattcgttgcatctcacatgccaagcagatctactgagcagacctgcttcagctggcgaagggagtcaaggcagcagtggcccttggagttacctggaaggtttcactccagtgaagtccattgggtcaatgtcagcgtcacactcgtaccttctagttccttcgccaagtatgagatacctctctcctgcaacattacagctcccgacatgcctcacatcggagtcaccgccgcttgcccatctactgcacagcaaagggactgcgattcctttagcgatgggctatgtcgtctcgaaagccgtcccacctgttaggagggactctgcacaactcaccaaggatgaacagccctctgttctctcagtcagcatcatcgatcactatggaggcagcagtgggactgttcaagagaagatgagccgaggcggcggcggcggcagcaaacaggcaaggaacttgagtcaggagacaacaggtcgtgagtgtgagatggagatgcatagtgtgctggaagctgtggccgcggagcttcactctctgtcttggttgacagtaagcccggtgtacacagaaaggcgcacagcactgccctttcactgtgacatggtcctaaggatgcggcggcttctacactacgcagataagtatctatctgaacctaagggagagacaactcactaattgtcatgtacaattaatatctagctaggtaggtatgtgagggcacatttgacgagctttgtagactgattttgcaataaccctgataacttacaggtggatgctgtaacctttttctctttttttaggtctgtattgtttgtcgacacaagatttgagatatgattccgtttgttgactgtattaatcagaattacaagtacagcgtttactgggattgccgtgccctactgcgacgacgtttttttttcctttaatcagaaatacttgtaaaatcaaaatcatctctccgctacggctattgctcacaccccctggctggaataggcagcttaaaacccaggtaaaactgacaggtccgcaatccccttgggcaaactctcaatcttcctcagcaacgttagccggttgttgcgaactctctcgtcttcctgcgcataatatacaccatcatcactctcactcatcagcacaagttaagtttttcaagggcctcacaaaactcaccgccatcacgaagacactattgaagaaatcttctaggggttgtatcaggataagagaagcatccacaaaggtcttaatatcaacacctacagaatgggtagttggaggaatcagacaaatgaacatttaaattgaaatgaaaaatggatatgaaaaacatgtaccaggatggatcttatcagcaacctccaagtaggcgctccacaaaactttctcttcatctttctcaaatacgtgtgggtcaacctacacataaaatcagaggcaggagagaaataccgcatagtcaagactggtgatg

SEQ ID NO: 79730 - DNA, 2227 bp, Zea Mays
ccttgaccatgtctttgttccttcaatgctaaaaccatcagagttgtctgtaatttcttgcctttatggagctcatgtgccagatttctgtttgtgtgattcagtcacatctacacgttgcacttttgagactgttgagatgttaaccatttcttttttaggaaccggccttataagcaatattgtgatactctttacatgaatgtaggggtgtcagtataatcatgatgctttgtgtaattaggtatccaagcggcctcgttctgaattaacagaagtctcttctcatactggcaaagatgtttgtgaaaacatacaagacccgaatggtcaggttggacactcttggggctgggacgatgagggtgtcgttatggacatcaatatacttctgtcagagtttggagattttagtgacttctttcaacaagaggagttagattttggtgagcctccaggtactgctgaatcacatgctctagtaattcctgcttcagactgtggagatgtcacattcacagatagtccatcaacagcaatggatatccctgaacaaagactttctcctgttggtttcacaactttggatgcatttgaccatcaaattatggccccagctcaagatgttgttgctaaagttcaagaacctcataatgatactgcaacacctgcacagtcccactcgcaagttttatcatctggaagatttgattatcttaccaaagctgaagcaaagctcacatttgctccagaatatgcagctgttgaaattttgattgctgaggccccaacaccattgtttacaaatccatactttcctagatcaaagaaaccaggcagttctagttttagtgcaagagtttattcatatgatgttgcacaaagctctcaaattgaatccacaggagacaagccagataagacttctaaactaatatctggtaatcatttacatgatattagttcatcaaacttgtacacacttgtccaaggtgggaataaagggagtgataagatcttaaagagtactgatacacagccctctaagggagaattgtcaccacctatttctggtgtgacttcatttaatttttctcttgtttcacaaaagaagagtggcaacatgttcaatgctggctattttctgctgtctatgaagactgctttggcaactgaaattgaatgcatcacgttccaggctgccatgtgcagaattaggcatacactattgtctctgagaagcaaagcatctgccgagtttaacagtgcaacatccagcttcatacagacaaatgtcagcaacaaatcagatctcacccccaggtatgacatgagaaaaaaagaaattatgactgtaaggttatctagtgatattgatcatgaaatgtttgacagatccttaatggacaatgtgggagtttggaggcctgttgttacacctaaagggcctaaatctcttgagtctttgtctgctaacacattaactggtgcaagcccaagtctgtctatacaaagacaacctgttgtagatcttctctgtgccatgactctgcttgttcaacaatctacttcgtttgttgatatgtcacttgatatggatgacggggacggttcttttttctggctttccctggatgagcaaaagagacgtggattttcttgtgatccttctatggttcatgctggctgtggtggcctattaggaacatgccattcaaaggattgcgctggtgttgatttagtcgatccactttctgcagaggtttcagagccatccatgattagcttgttgcagtcagatataagagtagctcttaaagctgcctttgcaaacatggatggcccgttatcagtaattgattggtgcaggggtcgaggcaatgctgctgagtctgcaggtacgggagatgcatactcttttcagtactccagtggtgatatcctggagccgtcaagttcgttgtccattggtggagattcaatgagcccaccccagccaaccagtagcaatcgaggcatttcagaattagagttccaaaagggatatcaccgtgtcagaccaaccattgctgtcctcccttcaccttctatgctagtcggttaccaggatgattggttgaaggcctcggtgaatagtcttaaaacatgggagaaagctccttttgaaccttatgccttgccgaagcctcactgcttttagccgggttcgtgaatatttttttgtaac

SEQ ID NO: 79731 - DNA, 5317 bp, Zea Mays
gtctgtaatttcttgcctttatggagctcatgtgccagatttctgtttgtgtgattcagtcacatctacacgttgcacttttgagactgttgagatgttaaccatttcttttttaggaaccggccttataagcaatattgtgatactctttacatgaatgtaggggtgtcagtataatcatgatgctttgtgtaattaggtatccaagcggcctcgttctgaattaacagaagtctcttctcatactggcaaagatgtttgtgaaaacatacaagacccgaatggtcaggttggacactcttggggctgggacgatgagggtgtcgttatggacatcaatatacttctgtcagagtttggagattttagtgacttctttcaacaagaggagttagattttggtgaggtactgctgaatcacatgctctagtaattcctgcttcagactgtggagatgtcacattcacagatagtccatcaacagcaatggatatccctgaacaaagactttctcctgttggtttcacaactttggatgcatttgaccatcaaattatggccccagctcaagatgttgttgctaaagttcaagaacctcataatgatactgcaacacctgcacagtcccactcgcaagttttatcatctggaagatttgattatcttaccaaagctgaagcaaagctcacatttgctccagaatatgcagctgttgaaattttgattgctgaggccccaacaccattgtttacaaatccatactttcctagatcaaagaaaccaggcagttctagttttagtgcaagagtttattcatatgatgttgcacaaagctctcaaattgaatccacaggagacaagccagataagacttctaaactaatatctggtaatcatttacatgatattagttcatcaaacttgtacacacttgtccaaggtgggaataaagggagtgataagatcttaaagagtactgatacacagccctctaagggagaattgtcaccacctatttctggtgtgacttcatttaatttttctcttgtttcacaaaagaagagtggcaacatgttcaatgctggctattttctgctgtctatgaagactgctttggcaactgaaattgaatgcatcacgttccaggctgccatgtgcagaattaggcatacactattgtctctgagaagcaaagcatctgccgagtttaacagtgcaacatccagcttcatacagacaaatgtcagcaacaaatcagatctcacccccagatccttaatggacaatgtgggagtttggaggcctgttgttacacctaaagggcctaaatctcttgagtctttgtctgctaacacattaactggtgcaagcccaagtctgtctatacaaagacaacctgttgtagatcttctctgtgccatgactctgcttgttcaacaatctacttcgtttgttgatatgtcacttgatatggatgacggggacggttcttttttctggctttccctggatgagcaaaagagacgtggattttcttgtgatccttctatggttcatgctggctgtggtggcctattaggaacatgccattcaaaggattgcgctggtgttgatttagtcgatccactttctgcagaggtttcagagccatccatgattagcttgttgcagtcagatataagagtagctcttaaagctgcctttgcaaacatggatggcccgttatcagtaattgattggtgcaggggtcgaggcaatgctgctgagtctgcaggtacgggagatgcatactcttttcagtactccagtggtgatatcctggagccgtcaagttcgttgtccattggtggagattcaatgagcccaccccagccaaccagtagcaatcgaggcatttcagaattagagttccaaaagggatatcaccgtgtcagaccaaccattgctgtcctcccttcaccttctatgctagtcggttaccaggatgattggttgaaggcctcggtgaatagtcttaaaacatgggagaaagctccttttgaaccttatgccttgccgaagcctgttacttactatgcactttgccctgatattgatatgttgacttcggcggtagctgattttttcatgcagcttggaacagtttatgaagtttgcaaactgggaactcattcgccccaaaacaatggaggacaaatggaactatctcctggaaaatatttgccttcaggacttgttctagttgattgtcctgagcagttgaagaaggttcgctgtggccacttaggtcccatcagttcaacaagtgactgtcttcaagctttttcaaaacattggagcgtgaaaagttttgtaacatctatttcaaggatacttaaggatataaagctgacttcaaacatatctacaaatcagaaagagagcagtagtggaccttgcacagtaatttatgtagtttgcccatttccagaaccttgtgcaattctacagacgctagtagaatgttctgttgctcttgggtatgttatttcatccccggaaagggaaagaaagttactatattcacaggttgccaaagccctaaacagcagtgcttctgtagatgaagcatcagcatcaaatgtcgttatgctatccgggttcagtatacccaagctcgtcttgcagattgttactattgaaactgtactgagaatggataagccaaacaaggagcttgctgttttgaaggacatagcattcacagtgtacaacaaggcacgacgaatcccacgggctgtctccacaagcgatatgttccagtcaccaacttatttgggtagatctcagtccacaatgatgcatgttacatctcctgctcctactctttggaaggaatgtttagttcctcgaatgtctgggccaactctctctcgagaaaccgattttgatgcatccatgaggtcggcaacatgggataactcatggcagcctgctcgttcgggaggacttctggacccaagtaagctgcctgatttatgtgctcaggatgataggaaatatgcctttgagccacttttcatactagcagaccctgggtctgccgatcttaatgctttaatggaaccatcaaaatctggagcagatgcatctggcagcagggtatatggctcaatttcaggaagtaactctgatagtggagtgagccctctactcgacgtatctgagagtgacagtgcagcaagtcttcattgctgttatggttggactgaggactggcgatggctagtgtgcatttggacagatgctagaggagaattattggacagcttaatatttccttttggtggtattagtagccgccaagacactaaagttctccaaagccttttcatccaaattctacagcaaggctgtcaaataatgtcgtcttcacctgaggctagcaatatgagaccacgagatgtcataataactcgtatcggaggtttccttgagcttgaaatccaagaatggcagaaggcaatatactcttatggtggcaatgaagtgaagaagtggcctgtgcagttacggcgatccatacctgagggtattccacctagttcaaatggtcctacgctccagcagcagcagcagcaagacatggccttaattcaagatagaaacatgccttcctcaccaaaccctctgtatagccctcatccaaaatcaagcttcatgaaaggtgcacttggacaatctggcaacaaaaaacagatccttgtggaacaaagtggaatggacacttcaaggggatcactgcacttagttcgtagcatcagtttggttgcagtttcccaagatcattcgttgcatctcacatgccaagcagatctactgagcagacctgcttcagctggcgaagggagtcaaggcagcagtggcccttggagttacctggaaggtttcactccagtgaagtccattgggtcaatgtcagcgtcacactcgtaccttctagttccttcgccaagtatgagatacctctctcctgcaacattacagctcccgacatgcctcacatcggagtcaccgccgcttgcccatctactgcacagcaaagggactgcgattcctttagcgatgggctatgtcgtctcgaaagccgtcccacctgttaggagggactctgcacaactcaccaaggatgaacagccctctgttctctcagtcagcatcatcgatcactatggaggcagcagtgggactgttcaagagaagatgagccgaggcggcggcggcggcagcaaacaggcaaggaacttgagtcaggagacaacaggtcgtgagtgtgagatggagatgcatagtgtgctggaagctgtggccgcggagcttcactctctgtcttggttgacagtaagcccggtgtacacagaaaggcgcacagcactgccctttcactgtgacatggtcctaaggatgcggcggcttctacactacgcagataagtatctatctgaacctaagggagagacaactcactaattgtcatgtacaattaatatctagctaggtaggtatgtgagggcacatttgacgagctttgtagactgattttgcaataaccctgataacttacaggtggatgctgtaacctttttctctttttttaggtctgtattgtttgtcgacacaagatttgagatatgattccgtttgttgactgtattaatcagaattacaagtacagcgtttactgggattgccgtgccctactgcgacgacgtttttttttcctttaatcagaaatacttgtaaaatcaaaatcatctctccgctacggctattgctcacaccccctggctggaataggcagcttaaaacccaggtaaaactgacaggtccgcaatccccttgggcaaactctcaatcttcctcagcaacgttagccggttgttgcgaactctctcgtcttcctgcgcataatatacaccatcatcactctcactcatcagcacaagttaagtttttcaagggcctcacaaaactcaccgccatcacgaagacactattgaagaaatcttctaggggttgtatcaggataagagaagcatccacaaaggtcttaatatcaacacctacagaatgggtagttggaggaatcagacaaatgaacatttaaattgaaatgaaaaatggatatgaaaaacatgtaccaggatggatcttatcagcaacctccaagtaggcgctccacaaaactttctcttcatctttctcaaatacgtgtgggtcaacctacacataaaatcagaggcaggagagaaataccgcatagtcaagactggtgatg

SEQ ID NO: 79732 - DNA, 5385 bp, Zea Mays
ctgtaatttcttgcctttatggagctcatgtgccagatttctgtttgtgtgattcagtcacatctacacgttgcacttttgagactgttgagatgttaaccatttcttttttaggaaccggccttataagcaatattgtgatactctttacatgaatgtaggggtgtcagtataatcatgatgctttgtgtaattaggtatccaagcggcctcgttctgaattaacagaagtctcttctcatactggcaaagatgtttgtgaaaacatacaagacccgaatggtcaggttggacactcttggggctgggacgatgagggtgtcgttatggacatcaatatacttctgtcagagtttggagattttagtgacttctttcaacaagaggagttagattttggtgagcctccaggtactgctgaatcacatgctctagtaattcctgcttcagactgtggagatgtcacattcacagatagtccatcaacagcaatggatatccctgaacaaagactttctcctgttggtttcacaactttggatgcatttgaccatcaaattatggccccagctcaagatgttgttgctaaagttcaagaacctcataatgatactgcaacacctgcacagtcccactcgcaagttttatcatctggaagatttgattatcttaccaaagctgaagcaaagctcacatttgctccagaatatgcagctgttgaaattttgattgctgaggccccaacaccattgtttacaaatccatactttcctagatcaaagaaaccaggcagttctagttttagtgcaagagtttattcatatgatgttgcacaaagctctcaaattgaatccacaggagacaagccagataagacttctaaactaatatctggtaatcatttacatgatattagttcatcaaacttgtacacacttgtccaaggtgggaataaagggagtgataagatcttaaagagtactgatacacagccctctaagggagaattgtcaccacctatttctggtgtgacttcatttaatttttctcttgtttcacaaaagaagagtggcaacatgttcaatgctggctattttctgctgtctatgaagactgctttggcaactgaaattgaatgcatcacgttccaggctgccatgtgcagaattaggcatacactattgtctctgagaagcaaagcatctgccgagtttaacagtgcaacatccagcttcatacagacaaatgtcagcaacaaatcagatctcacccccagatccttaatggacaatgtgggagtttggaggcctgttgttacacctaaagggcctaaatctcttgagtctttgtctgctaacacattaactggtgcaagcccaagtctgtctatacaaagacaacctgttgtagatcttctctgtgccatgactctgcttgttcaacaatctacttcgtttgttgatatgtcacttgatatggatgacggggacggttcttttttctggctttccctggatgagcaaaagagacgtggattttcttgtgatccttctatggttcatgctggctgtggtggcctattaggaacatgccattcaaaggattgcgctggtgttgatttagtcgatccactttctgcagaggtttcagagccatccatgattagcttgttgcagtcagatataagagtagctcttaaagctgcctttgcaaacatggatggcccgttatcagtaattgattggtgcaggggtcgaggcaatgctgctgagtctgcaggtacgggagatgcatactcttttcagtactccagtggtgatatcctggagccgtcaagttcgttgtccattggtggagattcaatgagcccaccccagccaaccagtagcaatcgaggagatttgcgtgtcactgcaggcatttcagaattagagttccaaaagggatatcaccgtgtcagaccaaccattgctgtcctcccttcaccttctatgctagtcggttaccaggatgattggttgaaggcctcggtgaatagtcttaaaacatgggagaaagctccttttgaaccttatgccttgccgaagcctcactgcttttagccgggttcgtgaatatttttttgtaacagcaaagccaccatagcgcaaatgccgcagcagcaccccccctccgacatatacactgattttttcatgcagcttggaacagtttatgaagtttgcaaactgggaactcattcgccccaaaacaatggaggacaaatggaactatctcctggaaaatatttgccttcaggacttgttctagttgattgtcctgagcagttgaagaaggttcgctgtggccacttaggtcccatcagttcaacaagtgactgtcttcaagctttttcaaaacattggagcgtgaaaagttttgtaacatctatttcaaggatacttaaggatataaagctgacttcaaacatatctacaaatcagaaagagagcagtagtggaccttgcacagtaatttatgtagtttgcccatttccagaaccttgtgcaattctacagacgctagtagaatgttctgttgctcttgggtatgttatttcatccccggaaagggaaagaaagttactatattcacaggttgccaaagccctaaacagcagtgcttctgtagatgaagcatcagcatcaaatgtcgttatgctatccgggttcagtatacccaagctcgtcttgcagattgttactattgaaactgtactgagaatggataagccaaacaaggagcttgctgttttgaaggacatagcattcacagtgtacaacaaggcacgacgaatcccacgggctgtctccacaagcgatatgttccagtcaccaacttatttgggtagatctcagtccacaatgatgcatgttacatctcctgctcctactctttggaaggaatgtttagttcctcgaatgtctgggccaactctctctcgagaaaccgattttgatgcatccatgaggtcggcaacatgggataactcatggcagcctgctcgttcgggaggacttctggacccaagtaagctgcctgatttatgtgctcaggatgataggaaatatgcctttgagccacttttcatactagcagaccctgggtctgccgatcttaatgctttaatggaaccatcaaaatctggagcagatgcatctggcagcagggtatatggctcaatttcaggaagtaactctgatagtggagtgagccctctactcgacgtatctgagagtgacagtgcagcaagtcttcattgctgttatggttggactgaggactggcgatggctagtgtgcatttggacagatgctagaggagaattattggacagcttaatatttccttttggtggtattagtagccgccaagacactaaagttctccaaagccttttcatccaaattctacagcaaggctgtcaaataatgtcgtcttcacctgaggctagcaatatgagaccacgagatgtcataataactcgtatcggaggtttccttgagcttgaaatccaagaatggcagaaggcaatatactcttatggtggcaatgaagtgaagaagtggcctgtgcagttacggcgatccatacctgagggtattccacctagttcaaatggtcctacgctccagcagcagcagcagcaagacatggccttaattcaagatagaaacatgccttcctcaccaaaccctctgtatagccctcatccaaaatcaagcttcatgaaaggtgcacttggacaatctggcaacaaaaaacagatccttgtggaacaaagtggaatggacacttcaaggggatcactgcacttagttcgtagcatcagtttggttgcagtttcccaagatcattcgttgcatctcacatgccaagcagatctactgagcagacctgcttcagctggcgaagggagtcaaggcagcagtggcccttggagttacctggaaggtttcactccagtgaagtccattgggtcaatgtcagcgtcacactcgtaccttctagttccttcgccaagtatgagatacctctctcctgcaacattacagctcccgacatgcctcacatcggagtcaccgccgcttgcccatctactgcacagcaaagggactgcgattcctttagcgatgggctatgtcgtctcgaaagccgtcccacctgttaggagggactctgcacaactcaccaaggatgaacagccctctgttctctcagtcagcatcatcgatcactatggaggcagcagtgggactgttcaagagaagatgagccgaggcggcggcggcggcagcaaacaggcaaggaacttgagtcaggagacaacaggtcgtgagtgtgagatggagatgcatagtgtgctggaagctgtggccgcggagcttcactctctgtcttggttgacagtaagcccggtgtacacagaaaggcgcacagcactgccctttcactgtgacatggtcctaaggatgcggcggcttctacactacgcagataagtatctatctgaacctaagggagagacaactcactaattgtcatgtacaattaatatctagctaggtaggtatgtgagggcacatttgacgagctttgtagactgattttgcaataaccctgataacttacaggtggatgctgtaacctttttctctttttttaggtctgtattgtttgtcgacacaagatttgagatatgattccgtttgttgactgtattaatcagaattacaagtacagcgtttactgggattgccgtgccctactgcgacgacgtttttttttcctttaatcagaaatacttgtaaaatcaaaatcatctctccgctacggctattgctcacaccccctggctggaataggcagcttaaaacccaggtaaaactgacaggtccgcaatccccttgggcaaactctcaatcttcctcagcaacgttagccggttgttgcgaactctctcgtcttcctgcgcataatatacaccatcatcactctcactcatcagcacaagttaagtttttcaagggcctcacaaaactcaccgccatcacgaagacactattgaagaaatcttctaggggttgtatcaggataagagaagcatccacaaaggtcttaatatcaacacctacagaatgggtagttggaggaatcagacaaatgaacatttaaattgaaatgaaaaatggatatgaaaaacatgtaccaggatggatcttatcagcaacctccaagtaggcgctccacaaaactttctcttcatctttctcaaatacgtgtgggtcaacctacacataaaatcagaggcaggagagaaataccgcatagtcaagactggtgatg

SEQ ID NO: 79733 - DNA, 2177 bp, Zea Mays
tgcctttatggagctcatgtgccagatttctgtttgtgtgattcagtcacatctacacgttgcacttttgagactgttgagatgttaaccatttcttttttaggaaccggccttataagcaatattgtgatactctttacatgaatgtaggggtgtcagtataatcatgatgctttgtgtaattaggtatccaagcggcctcgttctgaattaacagaagtctcttctcatactggcaaagatgtttgtgaaaacatacaagacccgaatggtcaggttggacactcttggggctgggacgatgagggtgtcgttatggacatcaatatacttctgtcagagtttggagattttagtgacttctttcaacaagaggagttagattttggtgagcctccaggtactgctgaatcacatgctctagtaattcctgcttcagactgtggagatgtcacattcacagatagtccatcaacagcaatggatatccctgaacaaagactttctcctgttggtttcacaactttggatgcatttgaccatcaaattatggccccagctcaagatgttgttgctaaagttcaagaacctcataatgatactgcaacacctgcacagtcccactcgcaagttttatcatctggaagatttgattatcttaccaaagctgaagcaaagctcacatttgctccagaatatgcagctgttgaaattttgattgctgaggccccaacaccattgtttacaaatccatactttcctagatcaaagaaaccaggcagttctagttttagtgcaagagtttattcatatgatgttgcacaaagctctcaaattgaatccacaggagacaagccagataagacttctaaactaatatctggtaatcatttacatgatattagttcatcaaacttgtacacacttgtccaaggtgggaataaagggagtgataagatcttaaagagtactgatacacagccctctaagggagaattgtcaccacctatttctggtgtgacttcatttaatttttctcttgtttcacaaaagaagagtggcaacatgttcaatgctggctattttctgctgtctatgaagactgctttggcaactgaaattgaatgcatcacgttccaggctgccatgtgcagaattaggcatacactattgtctctgagaagcaaagcatctgccgagtttaacagtgcaacatccagcttcatacagacaaatgtcagcaacaaatcagatctcacccccaggtatgacatgagaaaaaaagaaattatgactgtaaggttatctagtgatattgatcatgaaatgtttgacagatccttaatggacaatgtgggagtttggaggcctgttgttacacctaaagggcctaaatctcttgagtctttgtctgctaacacattaactggtgcaagcccaagtctgtctatacaaagacaacctgttgtagatcttctctgtgccatgactctgcttgttcaacaatctacttcgtttgttgatatgtcacttgatatggatgacggggacggttcttttttctggctttccctggatgagcaaaagagacgtggattttcttgtgatccttctatggttcatgctggctgtggtggcctattaggaacatgccattcaaaggattgcgctggtgttgatttagtcgatccactttctgcagaggtttcagagccatccatgattagcttgttgcagtcagatataagagtagctcttaaagctgcctttgcaaacatggatggcccgttatcagtaattgattggtgcaggggtcgaggcaatgctgctgagtctgcaggtacgggagatgcatactcttttcagtactccagtggtgatatcctggagccgtcaagttcgttgtccattggtggagattcaatgagcccaccccagccaaccagtagcaatcgaggagatttgcgtgtcactgcaggcatttcagaattagagttccaaaagggatatcaccgtgtcagaccaaccattgctgtcctcccttcaccttctatgctagtcggttaccaggatgattggttgaaggcctcggtgaatagtcttaaaacatgggagaaagctccttttgaaccttatgccttgccgaagcctcaaagccaccatagcgcaaatgccgc

SEQ ID NO: 79734 - DNA, 1970 bp, Zea Mays
ttcttttttaggaaccggccttataagcaatattgtgatactctttacatgaatgtaggggtgtcagtataatcatgatgctttgtgtaattaggtatccaagcggcctcgttctgaattaacagaagtctcttctcatactggcaaagatgtttgtgaaaacatacaagacccgaatggtcaggttggacactcttggggctgggacgatgagggtgtcgttatggacatcaatatacttctgtcagagtttggagattttagtgacttctttcaacaagaggagttagattttggtgagcctccaggtactgctgaatcacatgctctagtaattcctgcttcagactgtggagatgtcacattcacagatagtccatcaacagcaatggatatccctgaacaaagactttctcctgttggtttcacaactttggatgcatttgaccatcaaattatggccccagctcaagatgttgttgctaaagttcaagaacctcataatgatactgcaacacctgcacagtcccactcgcaagttttatcatctggaagatttgattatcttaccaaagctgaagcaaagctcacatttgctccagaatatgcagctgttgaaattttgattgctgaggccccaacaccattgtttacaaatccatactttcctagatcaaagaaaccaggcagttctagttttagtgcaagagtttattcatatgatgttgcacaaagctctcaaattgaatccacaggagacaagccagataagacttctaaactaatatctggtaatcatttacatgatattagttcatcaaacttgtacacacttgtccaaggtgggaataaagggagtgataagatcttaaagagtactgatacacagccctctaagggagaattgtcaccacctatttctggtgtgacttcatttaatttttctcttgtttcacaaaagaagagtggcaacatgttcaatgctggctattttctgctgtctatgaagactgctttggcaactgaaattgaatgcatcacgttccaggctgccatgtgcagaattaggcatacactattgtctctgagaagcaaagcatctgccgagtttaacagtgcaacatccagcttcatacagacaaatgtcagcaacaaatcagatctcacccccaggtatgacatgagaaaaaaagaaattatgactgtaaggttatctagtgatattgatcatgaaatgtttgacagatccttaatggacaatgtgggagtttggaggcctgttgttacacctaaagggcctaaatctcttgagtctttgtctgctaacacattaactggtgcaagcccaagtctgtctatacaaagacaacctgttgtagatcttctctgtgccatgactctgcttgttcaacaatctacttcgtttgttgatatgtcacttgatatggatgacggggacggttcttttttctggctttccctggatgagcaaaagagacgtggattttcttgtgatccttctatggttcatgctggctgtggtggcctattaggaacatgccattcaaaggattgcgctggtgttgatttagtcgatccactttctgcagaggggtcgaggcaatgctgctgagtctgcaggtacgggagatgcatactcttttcagtactccagtggtgatatcctggagccgtcaagttcgttgtccattggtggagattcaatgagcccaccccagccaaccagtagcaatcgaggcatttcagaattagagttccaaaagggatatcaccgtgtcagaccaaccattgctgtcctcccttcaccttctatgctagtcggttaccaggatgattggttgaaggcctcggtgaatagtcttaaaacatgggagaaagctccttttgaaccttatgccttgccgaagcctcactgcttttagccgggttcgtgaatatttttttgtaac

SEQ ID NO: 79735 - DNA, 5212 bp, Zea Mays
ttcttttttaggaaccggccttataagcaatattgtgatactctttacatgaatgtaggggtgtcagtataatcatgatgctttgtgtaattaggtatccaagcggcctcgttctgaattaacagaagtctcttctcatactggcaaagatgtttgtgaaaacatacaagacccgaatggtcaggttggacactcttggggctgggacgatgagggtgtcgttatggacatcaatatacttctgtcagagtttggagattttagtgacttctttcaacaagaggagttagattttggtgagcctccaggtactgctgaatcacatgctctagtaattcctgcttcagactgtggagatgtcacattcacagatagtccatcaacagcaatggatatccctgaacaaagactttctcctgttggtttcacaactttggatgcatttgaccatcaaattatggccccagctcaagatgttgttgctaaagttcaagaacctcataatgatactgcaacacctgcacagtcccactcgcaagttttatcatctggaagatttgattatcttaccaaagctgaagcaaagctcacatttgctccagaatatgcagctgttgaaattttgattgctgaggccccaacaccattgtttacaaatccatactttcctagatcaaagaaaccaggcagttctagttttagtgcaagagtttattcatatgatgttgcacaaagctctcaaattgaatccacaggagacaagccagataagacttctaaactaatatctggtaatcatttacatgatattagttcatcaaacttgtacacacttgtccaaggtgggaataaagggagtgataagatcttaaagagtactgatacacagccctctaagggagaattgtcaccacctatttctggtgtgacttcatttaatttttctcttgtttcacaaaagaagagtggcaacatgttcaatgctggctattttctgctgtctatgaagactgctttggcaactgaaattgaatgcatcacgttccaggctgccatgtgcagaattaggcatacactattgtctctgagaagcaaagcatctgccgagtttaacagtgcaacatccagcttcatacagacaaatgtcagcaacaaatcagatctcacccccagatccttaatggacaatgtgggagtttggaggcctgttgttacacctaaagggcctaaatctcttgagtctttgtctgctaacacattaactggtgcaagcccaagtctgtctatacaaagacaacctgttgtagatcttctctgtgccatgactctgcttgttcaacaatctacttcgtttgttgatatgtcacttgatatggatgacggggacggttcttttttctggctttccctggatgagcaaaagagacgtggattttcttgtgatccttctatggttcatgctggctgtggtggcctattaggaacatgccattcaaaggattgcgctggtgttgatttagtcgatccactttctgcagaggtttcagagccatccatgattagcttgttgcagtcagatataagagtagctcttaaagctgcctttgcaaacatggatggcccgttatcagtaattgattggtgcaggggtcgaggcaatgctgctgagtctgcaggtacgggagatgcatactcttttcagtactccagtggtgatatcctggagccgtcaagttcgttgtccattggtggagattcaatgagcccaccccagccaaccagtagcaatcgaggcatttcagaattagagttccaaaagggatatcaccgtgtcagaccaaccattgctgtcctcccttcaccttctatgctagtcgggatgattggttgaaggcctcggtgaatagtcttaaaacatgggagaaagctccttttgaaccttatgccttgccgaagcctgttacttactatgcactttgccctgatattgatatgttgacttcggcggtagctgattttttcatgcagcttggaacagtttatgaagtttgcaaactgggaactcattcgccccaaaacaatggaggacaaatggaactatctcctggaaaatatttgccttcaggacttgttctagttgattgtcctgagcagttgaagaaggttcgctgtggccacttaggtcccatcagttcaacaagtgactgtcttcaagctttttcaaaacattggagcgtgaaaagttttgtaacatctatttcaaggatacttaaggatataaagctgacttcaaacatatctacaaatcagaaagagagcagtagtggaccttgcacagtaatttatgtagtttgcccatttccagaaccttgtgcaattctacagacgctagtagaatgttctgttgctcttgggtatgttatttcatccccggaaagggaaagaaagttactatattcacaggttgccaaagccctaaacagcagtgcttctgtagatgaagcatcagcatcaaatgtcgttatgctatccgggttcagtatacccaagctcgtcttgcagattgttactattgaaactgtactgagaatggataagccaaacaaggagcttgctgttttgaaggacatagcattcacagtgtacaacaaggcacgacgaatcccacgggctgtctccacaagcgatatgttccagtcaccaacttatttgggtagatctcagtccacaatgatgcatgttacatctcctgctcctactctttggaaggaatgtttagttcctcgaatgtctgggccaactctctctcgagaaaccgattttgatgcatccatgaggtcggcaacatgggataactcatggcagcctgctcgttcgggaggacttctggacccaagtaagctgcctgatttatgtgctcaggatgataggaaatatgcctttgagccacttttcatactagcagaccctgggtctgccgatcttaatgctttaatggaaccatcaaaatctggagcagatgcatctggcagcagggtatatggctcaatttcaggaagtaactctgatagtggagtgagccctctactcgacgtatctgagagtgacagtgcagcaagtcttcattgctgttatggttggactgaggactggcgatggctagtgtgcatttggacagatgctagaggagaattattggacagcttaatatttccttttggtggtattagtagccgccaagacactaaagttctccaaagccttttcatccaaattctacagcaaggctgtcaaataatgtcgtcttcacctgaggctagcaatatgagaccacgagatgtcataataactcgtatcggaggtttccttgagcttgaaatccaagaatggcagaaggcaatatactcttatggtggcaatgaagtgaagaagtggcctgtgcagttacggcgatccatacctgagggtattccacctagttcaaatggtcctacgctccagcagcagcagcagcaagacatggccttaattcaagatagaaacatgccttcctcaccaaaccctctgtatagccctcatccaaaatcaagcttcatgaaaggtgcacttggacaatctggcaacaaaaaacagatccttgtggaacaaagtggaatggacacttcaaggggatcactgcacttagttcgtagcatcagtttggttgcagtttcccaagatcattcgttgcatctcacatgccaagcagatctactgagcagacctgcttcagctggcgaagggagtcaaggcagcagtggcccttggagttacctggaaggtttcactccagtgaagtccattgggtcaatgtcagcgtcacactcgtaccttctagttccttcgccaagtatgagatacctctctcctgcaacattacagctcccgacatgcctcacatcggagtcaccgccgcttgcccatctactgcacagcaaagggactgcgattcctttagcgatgggctatgtcgtctcgaaagccgtcccacctgttaggagggactctgcacaactcaccaaggatgaacagccctctgttctctcagtcagcatcatcgatcactatggaggcagcagtgggactgttcaagagaagatgagccgaggcggcggcggcggcagcaaacaggcaaggaacttgagtcaggagacaacaggtcgtgagtgtgagatggagatgcatagtgtgctggaagctgtggccgcggagcttcactctctgtcttggttgacagtaagcccggtgtacacagaaaggcgcacagcactgccctttcactgtgacatggtcctaaggatgcggcggcttctacactacgcagataagtatctatctgaacctaagggagagacaactcactaattgtcatgtacaattaatatctagctaggtaggtatgtgagggcacatttgacgagctttgtagactgattttgcaataaccctgataacttacaggtggatgctgtaacctttttctctttttttaggtctgtattgtttgtcgacacaagatttgagatatgattccgtttgttgactgtattaatcagaattacaagtacagcgtttactgggattgccgtgccctactgcgacgacgtttttttttcctttaatcagaaatacttgtaaaatcaaaatcatctctccgctacggctattgctcacaccccctggctggaataggcagcttaaaacccaggtaaaactgacaggtccgcaatccccttgggcaaactctcaatcttcctcagcaacgttagccggttgttgcgaactctctcgtcttcctgcgcataatatacaccatcatcactctcactcatcagcacaagttaagtttttcaagggcctcacaaaactcaccgccatcacgaagacactattgaagaaatcttctaggggttgtatcaggataagagaagcatccacaaaggtcttaatatcaacacctacagaatgggtagttggaggaatcagacaaatgaacatttaaattgaaatgaaaaatggatatgaaaaacatgtaccaggatggatcttatcagcaacctccaagtaggcgctccacaaaactttctcttcatctttctcaaatacgtgtgggtcaacctacacataaaatcagaggcaggagagaaataccgcatagtcaagactggtgatg

SEQ ID NO: 79736 - DNA, 845 bp, Zea Mays
ctagtactttaaaaacccagctggcagttgcccactcgcaaggcgcaacaacaactttgcgtcttcccgaatcggggcctccaccatctccaactgcaaccccaccccataccgccgccgcctccgctagggttttggagtgaggatcgccgatgtcgacggctcccaggcgccccttccgaggccgcggcgccccgccccctggcaccggctacgtccgccgcggccccgcccctgccccaggccccgccgacggcgccaagaccctgcgcaagcccgtcttcaccaccgtcgaccagctgcgcccccagacgcacggccacaccctcaccgcccgcgtcatctccgcccgcaccgtcctcgacaagccctccacgcacatcggccgcacccgcgtcgcagagtgcctcgtcggagacagcaccggcaccgtcctcgtcaccgcccgcaacgaacaggttgaccttctgaagccagatacaacagtgatcttccgcaacgctaagattgacatgttcaagggtaccatgaggctggtggtggacaagtgggggcggattgaggtgactcagcctgctgatttcaaggtgaaccaagacaacaacatgtcgctggtggagtacgagctggtggatgtggacgaagaggagtgaccagaaacgaagtcgggctgtggacatatattttggttatggaggcggtagcgttaggctcctatctagctattgttatcctggaccgctggcgattgggactttgttttaagtttatcttgaagaagcatgtcgaattatgtacagcagcagcaggaacagctctgggtataaggaaggaaagtgaaatgg

SEQ ID NO: 79737 - DNA, 1970 bp, Zea Mays
cggcaggaggcaagtcgtgccgtgccgtctgctccttgcctgctctgctggtctcgccgttgccggcttgccccgtccgtgcgtccatctgtttcctccttggatcctcgacaagcaatggccatggaggaggagcagacaccacccgagctgcgctacctctcgggcctgggcaacacctccttcaccaccccgcgcgcccggaacctgcgcacgtggctgtaccggatcaagccgtcggtgacccacgaacccttctatccgcggaaccccaccaacgagcgcctcgtcggcgagttcgaccgcaccaccaccgtcgccacgcccacgcagctgcgctggaggcccgccgacgtgcccctccacccgggcctcgacttcatcgacggactctacaccgtctgcggcgccggcagctcatgcctccgacacggatacgccatccacatgtatgctgctaacaagcccatggatggatgctccttgtgcaatgcggacggtgacttcctcattgttccccagcaaggaagtaagttcctcggctcggtcatcactcgccaccactcactccactaggctagtagtaatcacatcacatgcttctgttgcttggccaccaacaaaatgtcctgttcgcgtcgctttcagtgttccggcagtgccactccatgcccttcctgcctttattattgggatcaaagcgaaaagcaaatgggttgccccatcgctgttgcattcagcagcgcttacctttcttctttgtggaaatgatgcacatgttcactatctatcttcccagggttatttatcacaaccgagtgcggaaggctgctggtttcacccggcgagatcgtcgtgatccctcaaggtctccgatttgctgtcgacttgccggatggcccctcgcgtggctatgtctctgagatcttcggcgcccattttcagctccctgatcttggcccaattggtgccaatggcttggcttcgccgagggatttcctttccccgacagcatggtttgagcaggagcaccaccctggatacacaatagtgcacaagtatggtggcgagctgttcagcgccacgcaggatttctctccattcaacgtggtcgcgtggcatgggaattatgtcccttacaagtatgatctgagtaagttctgtccattcaacaccgtcctcttggatcatggcgacccgtcagtgaacacagttctaactgcgccaactgataagcctggcgtcgcgttgcttgattttgtaatattcccacccagatggctggttgctgagaatacattccgcccaccctactaccaccgcaactgcatgagcgaattcatgggcctcatctatgggatgtacgaggctaaggccgatggttttcttcctggtggcgccagccttcacagctgcatgacaccgcatgggccagacaccaagacgtacgaggcaacgatcagccgtgctgctgccaacgagccatccaggctcagtggtacgttggcgttcatgtttgagtcttggcttatccctcgcgtgtgcccatgggctctggattccccgtgtcgggacctcgactactaccagtgctggatcggattgaagtcacacttttcacctcctgctgctgctgttgatgatgagaacgagtagctgcttacagcagcagtcttggaacggacaggcagcgaactgaaactggggtggatatgctgtacgtcgtgtcctgcttgctgtcggtttctgaagcttttagctggcagggacaggcggctgttggctttgctgattgcccaaccctctcctgtaatattaatcctaccagagaaacttaaacttgactcaaccgatatgctattaaataaataaagcaagcaagttaggatacgagttaccagagttgtcacggttccagcaacccgtagccagtgctgtcacgtatcagtgagtacgtgattgcgacaaaa

SEQ ID NO: 79738 - DNA, 1735 bp, Zea Mays
aggaggcaagtcgtgccgtgccgtctgctccttgcctgctctgctggtctcgccgttgccggcttgccccgtccgtgcgtccatctgtttcctccttggatcctcgacaagcaatggccatggaggaggagcagacaccacccgagctgcgctacctctcgggcctgggcaacacctccttcaccaccccgcgcgcccggaacctgcgcacgtggctgtaccggatcaagccgtcggtgacccacgaacccttctatccgcggaaccccaccaacgagcgcctcgtcggcgagttcgaccgcaccaccaccgtcgccacgcccacgcagctgcgctggaggcccgccgacgtgcccctccacccgggcctcgacttcatcgacggactctacaccgtctgcggcgccggcagctcatgcctccgacacggatacgccatccacatgtatgctgctaacaagcccatggatggatgctccttgtgcaatgcggacggtgacttcctcattgttccccagcaaggaaggttatttatcacaaccgagtgcggaaggctgctggtttcacccggcgagatcgtcgtgatccctcaaggtctccgatttgctgtcgacttgccggatggcccctcgcgtggctatgtctctgagatcttcggcgcccattttcagctccctgatcttggcccaattggtgccaatggcttggcttcgccgagggatttcctttccccgacagcatggtttgagcaggagcaccaccctggatacacaatagtgcacaagtatggtggcgagctgttcagcgccacgcaggatttctctccattcaacgtggtcgcgtggcatgggaattatgtcccttacaagtatgatctgagtaagttctgtccattcaacaccgtcctcttggatcatggcgacccgtcagtgaacacagttctaactgcgccaactgataagcctggcgtcgcgttgcttgattttgtaatattcccacccagatggctggttgctgagaatacattccgcccaccctactaccaccgcaactgcatgagcgaattcatgggcctcatctatgggattggcagcagtcatgtgaagagatgtaaagacgatgcacatctgcaggctaaggccgatggttttcttcctggtggcgccagccttcacagctgcatgacaccgcatgggccagacaccaagacgtacgaggcaacgatcagccgtgctgctgccaacgagccatccaggctcagtggtacgttggcgttcatgtttgagtcttggcttatccctcgcgtgtgcccatgggctctggattccccgtgtcgggacctcgactactaccagtgctggatcggattgaagtcacacttttcacctcctgctgctgctgttgatgatgagaacgagtagctgcttacagcagcagtcttggaacggacaggcagcgaactgaaactggggtggatatgctgtacgtcgtgtcctgcttgctgtcggtttctgaagcttttagctggcagggacaggcggctgttggctttgctgattgcccaaccctctcctgtaatattaatcctaccagagaaacttaaacttgactcaaccgatatgctattaaataaataaagcaagcaagttaggatacgagttaccagagttgtcacggttccagcaacccgtagccagtgctgtcacgtatcagtgagtacgtgattgcgacaaaa

SEQ ID NO: 79739 - DNA, 3510 bp, Zea Mays
gtatattaaacgagaaaaaacagtttttgtacgtgtagcggctgccgtggagggagggagagcagcatcctcctccgctttcttccttctttctccttgtgtgttgtgttggggtgtctctcccctttataaaacccaactacgactagggaaacgaaaggaaaggaaaggaaaggaatgcaaggaaggagagacacaatcggcggcaacagcgattgatttcgtccgccgcacctctcctctctctccgccgccgtcgccgccgccaacaagggcgaaaccttccgatttcttccacttctgctgttagggttccgcctccacctgctctgctctggtcttgccgtgcctgccgcctcaaagccaccacagatggccgcaaataacaacccttggagggcccctctgccaccgctgctcaatgctcgcgctggttttggtggcgatacaagcctcttctcaacctcgctgccggttcttcctcatgaaaagttgatctttgctgattcttctcatggtaccccaccaatggatgacactttgaccaaaatgaaagtcctggctaatgatcctgatgagaaggactacaaatttgattttgatcttcggcagatagatgacttgttgccagatgaagatgagtttttcgcggggatcactgatgagactgagcccgttgcgcagacaaataccacggaggaattggaggagtttgatgtgtttggcaatggagggggcatggagctggacattgaccctgtggagagcatcacagttggttttgcaaattcaagtattgtcgacggggctagatgcaatagcatcaacccttttggtgtcccaagcactgtaggaactgtggctggggagcacccgtttggagagcacccttcgaggaccttgtttgtaaggaacatcaatagcaatgtcgaggactctgaactgcgatctttgtttgagcaatatggggacatccggaccctttacactgcaacaaagcacaggggctttgtaatgatatcttattttgatatcagagctgcacggaatgcaatgcgcgcattgcagaacaaacctctgaggaggagaaagctggacattcatttttccatcccaaaggagaatccatctgacaaagatttgaaccagggaactcttgttatttttaacttggatccgtcggtttctaatgaagaggttcgccagatttttggggcatatggtgaagtaaaggagataagagagacaccaaacaagaaacaccataagtttattgagttctatgatgtaagagcagcagaggctgctcttcggtcactgaataaaagtgagatagctggaaaacgaatcaagttggaaccaagtcgtcctggtggaacacgcagaaacttgatgcagcaacttggtcacgatttggaccaagaagagccaagaacctacagacattctcatgttggttcacctattgctaactctcctccaggggcatgggctcagtacagtagtccaacagatagcaatatgctgcaagctttcaccagatctccaactggaaatggaatgagtcctatcggaattccttccctgatttcaaatgctccaaagattgctcctattggcaaggatagcaaccggtctaagtatgatcaagtgttttcaaatggtaaccagtccgtgggagctgcatttcagcactcccactcataccaagatcacaacagtgaacacatgagttctagtcctgggactttatcagggccccagtttctctggggcagtccaaagccatattcagaacattcaaaatcccctatttggcatccaccaggaatcggatctgcattgtcatccagcagtcgcactcagggccaaggattcttgtacagtagccgtcaggcttcattatttggttcttcggatcagcaccatcatcatgttggctctgccccttcaggtgctccatttgagagccattttggcttcttacctgaatcgccagagacatcttttatgaagcaagccaggtttgggaacatgggtaattttggtactggccgaaacgggggaggtctcctgctgggcatggctaatcgtgcttctgtgaatcctggttcttctctaattggaagtctgacagataacagctctactaacttcagaccgatgttgtcgcctagattgggacagacattttacactaatcctccataccatgggattggtacattcggacttgacagctccattgaccgtgtccgcaaccgccgggttgacagcagtgtgttgcaggctgatagcaagaggcagtatcagcttgacttggagaagattcacagaggtgatgatactcggacaacattgatgattaagaacatcccaaacaagtatacatctaagatgctcctggctgcaattgatgagcttcacagaggaacttatgactttttctacctgccaattgatttcaagaacaaatgcaatgttggatacgcgttcgttaacatgatatcgccggtgcatattatatccttctaccaggcttttaatggtaagaaatgggaaaagttcaacagcgagaaggtagcctcgttggcttatgctagaattcaaggacggtctgcactgatatcacattttcaaaattcaagtttgatgaatgaggataagaggtgccgccccattctttttaatcccaatggtcaggagtctgtgcaccaggaagcatttccaatcaatggcatatgcatccacatgcttccggaagatgattaccttgacaatgaagatggcaagagtctgaacgagaagactggagagagctcgaccgatatggccgggagtttgtgacgtctgcgatgatagcagacaggatcagaatggccatacatataaatctaactgtctagagagagtatccaccccccaaattgtataaaaagcgaggaaggttgatggttagcgctgaattttgtggtctggtgtggcatggcacgtcttttggtttcagatgtcgccccggcagtggaaatgggagctgaagctcaagcgatcgagcttcgaactggagccgggagcttgcttgtagaatcccccccctctgtagatagagatgtgggggtggaaccgcccaaaccgctgcttctcatagtcgtgcttgtttttgattgcttgctgtaaaaaggtgaactgaactgaagaaaaaaaaagccaaactgtacagtttagaacttttgtgcatattttgcattctggcatcttaatgtgcagtgctgaagttggggcattgatcatgcaaagttatttgcatgattgtatccatggaatctgaccaaaatatagaaagctgcttgcgtgctttctctgttctgttcacaaggaaaagggatgtaaatccgacgttaattacagttttctcgtctagcagttgccccaattgcaatattggaacaatttgatgcaaactgtgccaatgcccaatggtcatcatgatttttcaaaacaatcattgtg

SEQ ID NO: 79740 - DNA, 3501 bp, Zea Mays
ccttctttctccttgtgtgttgtgttggggtgtctctcccctttataaaacccaactacgactagggaaacgaaaggaaaggaaaggaaaggaatgcaaggaaggagagacacaatcggcggcaacagcgattgatttcgtccgccgcacctctcctctctctccgccgccgtcgccgccgccaacaagggcgaaaccttccgatttcttccacttctgctgttagggttccgcctccacctgctctgctctggtatcttctgcgcaatgccaatgctgtaatggatcgatcgtcagattcttccaatccaccaggtcttgccgtgcctgccgcctcaaagccaccacagatggccgcaaataacaacccttggagggcccctctgccaccgctgctcaatgctcgcgctggttttggtggcgatacaagcctcttctcaacctcgctgccggttcttcctcatgaaaagtccatttctttcagtgatctttgctgattcttctcatggtaccccaccaatggatgacactttgaccaaaatgaaagtcctggctaatgatcctgatgagaaggactacaaatttgattttgatcttcggcagatagatgacttgttgccagatgaagatgagtttttcgcggggatcactgatgagactgagcccgttgcgcagacaaataccacggaggaattggaggagtttgatgtgtttggcaatggagggggcatggagctggacattgaccctgtggagagcatcacagttggttttgcaaattcaagtattgtcgacggggctagatgcaatagcatcaacccttttggtgtcccaagcactgtaggaactgtggctggggagcacccgtttggagagcacccttcgaggaccttgtttgtaaggaacatcaatagcaatgtcgaggactctgaactgcgatctttgtttgagcaatatggggacatccggaccctttacactgcaacaaagcacaggggctttgtaatgatatcttattttgatatcagagctgcacggaatgcaatgcgcgcattgcagaacaaacctctgaggaggagaaagctggacattcatttttccatcccaaaggagaatccatctgacaaagatttgaaccagggaactcttgttatttttaacttggatccgtcggtttctaatgaagaggttcgccagatttttggggcatatggtgaagtaaaggagataagagagacaccaaacaagaaacaccataagtttattgagttctatgatgtaagagcagcagaggctgctcttcggtcactgaataaaagtgagatagctggaaaacgaatcaagttggaaccaagtcgtcctggtggaacacgcagaaacttgatgcagcaacttggtcacgatttggaccaagaagagccaagaacctacagacattctcatgttggttcacctattgctaactctcctccaggggcatgggctcagtacagtagtccaacagatagcaatatgctgcaagctttcaccagatctccaactggaaatggaatgagtcctatcggaattccttccctgatttcaaatgctccaaagattgctcctattggcaaggatagcaaccggtctaagtatgatcaagtgttttcaaatggtaaccagtccgtgggagctgcatttcagcactcccactcataccaagatcacaacagtgaacacatgagttctagtcctgggactttatcagggccccagtttctctggggcagtccaaagccatattcagaacattcaaaatcccctatttggcatccaccaggaatcggatctgcattgtcatccagcagtcgcactcagggccaaggattcttgtacagtagccgtcaggcttcattatttggttcttcggatcagcaccatcatcatgttggctctgccccttcaggtgctccatttgagagccattttggcttcttacctgaatcgccagagacatcttttatgaagcaagccaggtttgggaacatgggtaattttggtactggccgaaacgggggaggtctcctgctgggcatggctaatcgtgcttctgtgaatcctggttcttctctaattggaagtctgacagataacagctctactaacttcagaccgatgttgtcgcctagattgggacagacattttacactaatcctccataccatgggattggtacattcggacttgacagctccattgaccgtgtccgcaaccgccgggttgacagcagtgtgttgcaggctgatagcaagaggcagtatcagcttgacttggagaagattcacagaggtgatgatactcggacaacattgatgattaagaacatcccaaacaagtatacatctaagatgctcctggctgcaattgatgagcttcacagaggaacttatgactttttctacctgccaattgatttcaagaacaaatgcaatgttggatacgcgttcgttaacatgatatcgccggtgcatattatatccttctaccaggcttttaatggtaagaaatgggaaaagttcaacagcgagaaggtagcctcgttggcttatgctagaattcaaggacggtctgcactgatatcacattttcaaaattcaagtttgatgaatgaggataagaggtgccgccccattctttttaatcccaatggtcaggagtctgtgcaccaggaagcatttccaatcaatggcatatgcatccacatgcttccggaagatgattaccttgacaatgaagatggcaagagtctgaacgagaagactggagagagctcgaccgatatggccgggagtttgtgacgtctgcgatgatagcagacaggatcagaatggccatacatataaatctaactgtctagagagagtatccaccccccaaattgtataaaaagcgaggaaggttgatggttagcgctgaattttgtggtctggtgtggcatggcacgtcttttggtttcagatgtcgccccggcagtggaaatgggagctgaagctcaagcgatcgagcttcgaactggagccgggagcttgcttgtagaatcccccccctctgtagatagagatgtgggggtggaaccgcccaaaccgctgcttctcatagtcgtgcttgtttttgattgcttgctgtaaaaaggtgaactgaactgaagaaaaaaaaagccaaactgtacagtttagaacttttgtgcatattttgcattctggcatcttaatgtgcagtgctgaagttggggcattgatcatgcaaagttatttgcatgattgtatccatggaatctgaccaaaatatagaaagctgcttgcgtgctttctctgttctgttcacaaggaaaagggatgtaaatccgacgttaattacagttttctcgtctagcagttgccccaattgcaatattggaacaatttgatgcaaactgtgccaatgcccaatggtcatcatgatttttcaaaacaatcattgtg

SEQ ID NO: 79741 - DNA, 3368 bp, Zea Mays
cttctttctccttgtgtgttgtgttggggtgtctctcccctttataaaacccaactacgactagggaaacgaaaggaaaggaaaggaaaggaatgcaaggaaggagagacacaatcggcggcaacagcgattgatttcgtccgccgcacctctcctctctctccgccgccgtcgccgccgccaacaagggcgaaaccttccgatttcttccacttctgctgttagggttccgcctccacctgctctgctctggtatcttctgcgcaatgccaatgctgtaatggatcgatcgtcagattcttccaatccaccaggtcttgccgtgcctgccgcctcaaagccaccacagatggccgcaaataacaacccttggagggcccctctgccaccgctgctcaatgctcgcgctggttttggtggcgatacaagcctcttctcaacctcgctgccggttcttcctcatgaaaagtatagatgacttgttgccagatgaagatgagtttttcgcggggatcactgatgagactgagcccgttgcgcagacaaataccacggaggaattggaggagtttgatgtgtttggcaatggagggggcatggagctggacattgaccctgtggagagcatcacagttggttttgcaaattcaagtattgtcgacggggctagatgcaatagcatcaacccttttggtgtcccaagcactgtaggaactgtggctggggagcacccgtttggagagcacccttcgaggaccttgtttgtaaggaacatcaatagcaatgtcgaggactctgaactgcgatctttgtttgagcaatatggggacatccggaccctttacactgcaacaaagcacaggggctttgtaatgatatcttattttgatatcagagctgcacggaatgcaatgcgcgcattgcagaacaaacctctgaggaggagaaagctggacattcatttttccatcccaaaggagaatccatctgacaaagatttgaaccagggaactcttgttatttttaacttggatccgtcggtttctaatgaagaggttcgccagatttttggggcatatggtgaagtaaaggagataagagagacaccaaacaagaaacaccataagtttattgagttctatgatgtaagagcagcagaggctgctcttcggtcactgaataaaagtgagatagctggaaaacgaatcaagttggaaccaagtcgtcctggtggaacacgcagaaacttgatgcagcaacttggtcacgatttggaccaagaagagccaagaacctacagacattctcatgttggttcacctattgctaactctcctccaggggcatgggctcagtacagtagtccaacagatagcaatatgctgcaagctttcaccagatctccaactggaaatggaatgagtcctatcggaattccttccctgatttcaaatgctccaaagattgctcctattggcaaggatagcaaccggtctaagtatgatcaagtgttttcaaatggtaaccagtccgtgggagctgcatttcagcactcccactcataccaagatcacaacagtgaacacatgagttctagtcctgggactttatcagggccccagtttctctggggcagtccaaagccatattcagaacattcaaaatcccctatttggcatccaccaggaatcggatctgcattgtcatccagcagtcgcactcagggccaaggattcttgtacagtagccgtcaggcttcattatttggttcttcggatcagcaccatcatcatgttggctctgccccttcaggtgctccatttgagagccattttggcttcttacctgaatcgccagagacatcttttatgaagcaagccaggtttgggaacatgggtaattttggtactggccgaaacgggggaggtctcctgctgggcatggctaatcgtgcttctgtgaatcctggttcttctctaattggaagtctgacagataacagctctactaacttcagaccgatgttgtcgcctagattgggacagacattttacactaatcctccataccatgggattggtacattcggacttgacagctccattgaccgtgtccgcaaccgccgggttgacagcagtgtgttgcaggctgatagcaagaggcagtatcagcttgacttggagaagattcacagaggtgatgatactcggacaacattgatgattaagaacatcccaaacaagtatacatctaagatgctcctggctgcaattgatgagcttcacagaggaacttatgactttttctacctgccaattgatttcaagaacaaatgcaatgttggatacgcgttcgttaacatgatatcgccggtgcatattatatccttctaccaggcttttaatggtaagaaatgggaaaagttcaacagcgagaaggtagcctcgttggcttatgctagaattcaaggacggtctgcactgatatcacattttcaaaattcaagtttgatgaatgaggataagaggtgccgccccattctttttaatcccaatggtcaggagtctgtgcaccaggaagcatttccaatcaatggcatatgcatccacatgcttccggaagatgattaccttgacaatgaagatggcaagagtctgaacgagaagactggagagagctcgaccgatatggccgggagtttgtgacgtctgcgatgatagcagacaggatcagaatggccatacatataaatctaactgtctagagagagtatccaccccccaaattgtataaaaagcgaggaaggttgatggttagcgctgaattttgtggtctggtgtggcatggcacgtcttttggtttcagatgtcgccccggcagtggaaatgggagctgaagctcaagcgatcgagcttcgaactggagccgggagcttgcttgtagaatcccccccctctgtagatagagatgtgggggtggaaccgcccaaaccgctgcttctcatagtcgtgcttgtttttgattgcttgctgtaaaaaggtgaactgaactgaagaaaaaaaaagccaaactgtacagtttagaacttttgtgcatattttgcattctggcatcttaatgtgcagtgctgaagttggggcattgatcatgcaaagttatttgcatgattgtatccatggaatctgaccaaaatatagaaagctgcttgcgtgctttctctgttctgttcacaaggaaaagggatgtaaatccgacgttaattacagttttctcgtctagcagttgccccaattgcaatattggaacaatttgatgcaaactgtgccaatgcccaatggtcatcatgatttttcaaaacaatcattgtg

SEQ ID NO: 79742 - DNA, 3598 bp, Zea Mays
aaaacccaactacgactagggaaacgaaaggaaaggaaaggaaaggaatgcaaggaaggagagacacaatcggcggcaacagcgattgatttcgtccgccgcacctctcctctctctccgccgccgtcgccgccgccaacaagggcgaaaccttccgatttcttccacttctgctgttagggttccgcctccacctgctctgctctggtatcttctgcgcaatgccaatgctgtaatggatcgatcgtcagattcttccaatccaccaggtcttgccgtgcctgccgcctcaaagccaccacagatggccgcaaataacaacccttggagggcccctctgccaccgctgctcaatgctcgcgctggttttggtggcgatacaagcctcttctcaacctcgctgccggttcttcctcatgaaaagttgatctttgctgattcttctcatggtaccccaccaatggatgacactttgaccaaaatgaaagtcctggctaatgatcctgatgagaaggactacaaatttgattttgatcttcggcagatagatgacttgttgccagatgaagatgagtttttcgcggggatcactgatgagactgagcccgttgcgcagacaaataccacggaggaattggaggagtttgatgtgtttggcaatggagggggcatggagctggacattgaccctgtggagagcatcacagttggttttgcaaattcaagtattgtcgacggggctagatgcaatagcatcaacccttttggtgtcccaagcactgtaggaactgtggctggggagcacccgtttggagagcacccttcgaggaccttgtttgtaaggaacatcaatagcaatgtcgaggactctgaactgcgatctttgtttgagcaatatggggacatccggaccctttacactgcaacaaagcacaggggctttgtaatgatatcttattttgatatcagagctgcacggaatgcaatgcgcgcattgcagaacaaacctctgaggaggagaaagctggacattcatttttccatcccaaaggagaatccatctgacaaagatttgaaccagggaactcttgttatttttaacttggatccgtcggtttctaatgaagaggttcgccagatttttggggcatatggtgaagtaaaggagataagagagacaccaaacaagaaacaccataagtttattgagttctatgatgtaagagcagcagaggctgctcttcggtcactgaataaaagtgagatagctggaaaacgaatcaagttggaaccaagtcgtcctggtggaacacgcagaaacaacttggtcacgatttggaccaagaagagccaagaacctacagacattctcatgttggttcacctattgctaactctcctccaggggcatgggctcagtacagtagtccaacagatagcaatatgctgcaagctttcaccagatctccaactggaaatggaatgagtcctatcggaattccttccctgatttcaaatgctccaaagattgctcctattggcaaggatagcaaccggtctaagtatgatcaagtgttttcaaatggtaaccagtccgtgggagctgcatttcagcactcccactcataccaagatcacaacagtgaacacatgagttctagtcctgggactttatcagggccccagtttctctggggcagtccaaagccatattcagaacattcaaaatcccctatttggcatccaccaggaatcggatctgcattgtcatccagcagtcgcactcagggccaaggattcttgtacagtagccgtcaggcttcattatttggttcttcggatcagcaccatcatcatgttggctctgccccttcaggtgctccatttgagagccattttggcttcttacctgaatcgccagagacatcttttatgaagcaagccaggtttgggaacatgggtaattttggtactggccgaaacgggggaggtctcctgctgggcatggctaatcgtgcttctgtgaatcctggttcttctctaattggaagtctgacagataacagctctactaacttcagaccgatgttgtcgcctagattgggacagacattttacactaatcctccataccatgggattggtacattcggacttgacagctccattgaccgtgtccgcaaccgccgggttgacagcagtgtgttgcaggctgatagcaagaggcagtatcagcttgacttggagaagattcacagaggtgatgatactcggacaacattgatgattaagaacatcccaaacaagtatacatctaagatgctcctggctgcaattgatgagcttcacagaggaacttatgactttttctacctgccaattgatttcaagaacaaatgcaatgttggatacgcgttcgttaacatgatatcgccggtgcatattatatccttctaccaggtgctttcctttcttggcctttgtcctgtgtttgcaatagttacctgcagagttaagaacttgttccctgtccagctgagttaatcagcaatacggattagcaatagtataattactctgaacagcttgtaatatttatgtactgatgtacatctataacctgcaggcttttaatggtaagaaatgggaaaagttcaacagcgagaaggtagcctcgttggcttatgctagaattcaaggacggtctgcactgatatcacattttcaaaattcaagtttgatgaatgaggataagaggtgccgccccattctttttaatcccaatggtcaggagtctgtgcaccaggaagcatttccaatcaatggcatatgcatccacatgcttccggaagatgattaccttgacaatgaagatggcaagagtctgaacgagaagactggagagagctcgaccgatatggccgggagtttgtgacgtctgcgatgatagcagacaggatcagaatggccatacatataaatctaactgtctagagagagtatccaccccccaaattgtataaaaagcgaggaaggttgatggttagcgctgaattttgtggtctggtgtggcatggcacgtcttttggtttcagatgtcgccccggcagtggaaatgggagctgaagctcaagcgatcgagcttcgaactggagccgggagcttgcttgtagaatcccccccctctgtagatagagatgtgggggtggaaccgcccaaaccgctgcttctcatagtcgtgcttgtttttgattgcttgctgtaaaaaggtgaactgaactgaagaaaaaaaaagccaaactgtacagtttagaacttttgtgcatattttgcattctggcatcttaatgtgcagtgctgaagttggggcattgatcatgcaaagttatttgcatgattgtatccatggaatctgaccaaaatatagaaagctgcttgcgtgctttctctgttctgttcacaaggaaaagggatgtaaatccgacgttaattacagttttctcgtctagcagttgccccaattgcaatattggaacaatttgatgcaaactgtgccaatgcccaatggtcatcatgatttttcaaaacaatcattgtg

SEQ ID NO: 79743 - DNA, 557 bp, Zea Mays
gagcaaccataacaatcccttcgccccctgtatctcccttcctccgtgataggccatgaatgcccacgacgacatcacctctgagatgattgtcttcctcaagacgacgctgaccgagacgatgcgtggtgccaagcaccgctccacgggtgcgtcaccgaatcatgggacgcggatggcttcgaacccatggaacatccgaatgggacaccaatcgatggtccaccggcgaactacagcctgggcgagagcggggcggatgcatgggggacgggacaacagatgcatggcggggaggggacgcatggtgacgtcggtgctcggggaagatggcgagggagccgtgcgacgaagcatctagcagggttgaggtctcagtcggcttgagcgctacggtttatctgttctatctaagcgccaggtgtagatttggaacagaaaatagcttaatcgactcaaaagcaatcgggtctatggtcatgccataatagcggcgttcgtgtgttgggagtgttatattatatatctattatctaatagaatttaatgtgagcacc

SEQ ID NO: 79744 - DNA, 445 bp, Zea Mays
cttcgccccctgtatctcccttcctccgtgataggccatgaatgcccacgacgacatcacctctgagatggtgcacttcatgatctgatacgcttattcattttggtttcctttggaatacgagatttttttccgtttcatatgtttttctgtggaaataaactgattcttatgaaattcttgtatgattcatatgaaatttctacattccaaaggaggccttcgtttttttaccgttcgatccacttattcacctcggttttgttgcttgctctttcatctaatgatattacacatgctttcttggaaattggaacatgtgctgcagagtatatgtaattattgtgctctaatatttttattgaataatttatgtaatatatgtaattatcgctgccaccttcgcgctgccctgaccgctatcctacctggcactggcctgtct

SEQ ID NO: 79745 - DNA, 4002 bp, Zea Mays
agaaccagctgcaagaacagagtattctgaggaacctttgttgaagtaaatgtcatcgagtttcctagcaatcttatttttgctggtatcatatttctttgagctaatcttgttcattagctttatatggcttttgctatgaacagaagctatgtacttgtctggattttgtatattataatgatgtttgcactcaccatccgttttcagttctattgttactttcgtcgcaacgcacgggcactcacctagtatatatatatatatatatatatatatatatatatatattcggacttcggagtacaagatcggtgttataatggcaaataattcgtgataagctaaacccaaggcggaccatggtcatggtcatgccttttactcctttctcgtctgccagcgcgcgggggaaggagggacgaaagtgatgcagccgccgccgcagctgccggcggctttgccggtagggttccgcttccgccctacggacgaggagctggtgctacactacctcaagcctaagatcgcgggtcgcgcgcacgcggatttgctcctcatccccgatgtcgacctctcggcgtgcgagccttgggagctgcccgctaaggccctcatcaggtccgacgatcccgagtggttcttcttcgcgcccctagaccgcaagtaccctggaggccaccgctccaaccgctccaccgcagccgggtactggaaggccacgggcaaggaccgcctcatccgctcgcgcccagcaggcaccctcatcggcgtcaagaagacgctcgtcttccacagaggcagggcaccccgaggacaccgcaccgcctggatcatgcacgagtaccgtacggccgagccccagctcccacaaggccaaaacggtagcttcgtgctctaccgcctattcaacaagaacgaggaggaatccgaagcctcagacgctgccgattcaccgtccacgtcgtctccgcccatcgcgccggaggtgaaaactgagaatttgagccaaccgacttctgccaaaatgtctccccatattgcaactgtcagtagcaatgagccaacgtctaatcagggagacgttaatcttctggatgtgttaacccagcttccagacctacatcctgagcaagcattcgatggattccctaccatcacctctcctatgcgcccttacactgatcatccattttttggcaatgctggcgaccaagatctttcagcgtatatagacagtatcatctctcatcaggatctggaaggcttgttggccagcccttctttggctgacatggttgagcaggctactgtaaatgttgagccccaccctattaatgtacccgttctagacaacagctcaaacagcaacagattggctgaaaacagccgtggaaaagttggttctgaaacgttgctcctaatcaagggtacagatggcacaggtgctgctgcttgctcttcttctgcaaccaaaatactccaagacaatactgatgatcacacaggagctcaaagtaacttggcttccagtgcatcagctcaagtgtctcacttttacaaccaatatgaactccaatcggcattcgtccctgaaatggaaccaccaaatagtggaaccttgtgctctgcagcctccccgactccccatccccagcacttgttcaacggtgtggtagcttcagatgtcttcaatggaatccaaggatggccagcggaacctttgacggatccacaccaagggaatgcaccaagaaggatccgccttgcgcactctattcagagggcatcagtcactgagcctgtactaacttctgatgtggaggatgaagatgaaccgggaatatgttatagcgcagacagttcatccgccagcaataccgaggattatgccaatgtgttctcccaaactatggctggagaaacaatgcgtattcaacgtggaggggtgatatctactcaagtagtttcgtcaacagaaaagctacaagatttcacatttgatgaaggtacactgctacatggtgagctgcatcatggaggcaatctcaggcagcggcgcacggaggagacgaggcaggatgttcgtgatggcatgcagcacagcgtccatgtgactagagtggcagtgccatccttgagaaggaaaggagaggctgcacagattggttcagtggtgcggttgctccttttggttctcctcctcgtcgtcatctttgtatttgtaggattatggaaatgtagctcgttcagattgttgcattagcagctactatttgtgattcaggggtatcagtgcattagtagctagtttgcctggttgtctgatctcgtgaaggagcaggggaaagtttatgcaggattcacaatgctcctcttgtctggcttgacatagaaatctaaaagttgtgacttgtgaggcaacctgttgccttgttcatataataatagaatgaaacttgtgttgcaagtagaaaatcaacacaaaaatagcagaaccaaatattcattcccagcagtcatctttcgtcttactattattattattagtacaataggataggagtacacggtactatgaagtagtgaccacaacaacatatgtcatccaattcattcagcagctaccgcttcttcctcttcttctcgtcttgggatttctcctgtgcattcttcatctgcaaaatcaaccaaggaatcaaccataccaatcatttcctgagacagcatgcccactcactcactcactcaccatgatgacaaggattcgaacaagaaccgcaacaaagtcggtgaagagagtcagcgcgtgcttgatgtagtccatgtccccacggtgcgccctctcgatgatctcctgggtgtcaaacaccatatatcccaggaaaaccaggaggccaaagtagagctgcagctagtagtcggtcagcttggttgcatgctttcttattacagcttcagatttgttcccatcacctcaaacatgaaggtcgcgctggtgtggccaaagattgaagtagcaaactgcagccagagaagaatggagaggccagatgaaagcagaccgccgaggtacaggtattccctgcgcttggcgatgatggcagcgccagagaagcatgcaaaagcaactgcggtcccgacgaacgcagtgacgagaatcctggtacatgagatgcagtttcatcaacaaagcagaccacagctcatcattcttgtgtaatgtaatggatgagtgacgacgattgacctcgaatccaagtcaataacaaggtcgacgagcggaccaacggacgcgccttgaaggagcgcggcagacatgagcagcgccaagcggttcctctcctggtcccgtgaagcgggcagggagatgaggaaggcgatggaggccacgcatcccacggtcgtgagggcgcctccgacgttgaggaggatgtggaggtacgcgccgagtgcagagaaggccagcgcggagcatagggtgaggtacacctgcagtcgggaacgggatcagctaaagccaagcgtgagaagagagccgggattggagaaggagacgaggggcttgcatgtttgaggtgggactgcacagcgggtgagatgtgacccagacgcttgagcgattcgaagccgctgccgcccgccctcctcctccgctgcgattggccgaacagagactccatcgcaggcgccaccgactgatgccgcaaactggaaagcaagcggaaagaaaccctaatttggagaattgcttgctactcagtcgggtcgggaggtggacgaagacgagcacgactatggaaaagtcgttggtcctggccacccggcccactctttgctttcaggcttggcccaacatcacactttccactacggcttatttgtatattcatatatcaatactaggtgagtgaccctacgttgcaacggaaacatataataccgtaacaactcatgtataaatgtgtgttatactgttatgagaaaatattttgtaattaa

SEQ ID NO: 79746 - DNA, 1291 bp, Zea Mays
aggccaccgctccaaccgctccaccgcagccgggtactggaaggccacgggcaaggaccgcctcatccgctcgcgcccagcaggcaccctcatcggcgtcaagaagacgctcgtcttccacagaggcagggcaccccgaggacaccgcaccgcctggatcatgcacgagtaccgtacggccgagccccagctcccacaaggccaaaacggtagcttcgtgctctaccgcctattcaacaagaacgaggaggaatccgaagcctcagacgctgccgattcaccgtccacgtcgtctccgcccatcgcgccggaggtgaaaactgagaatttgagccaaccgacttctgccaaaatgtctccccatattgcaactgtcagtagcaatgagccaacgtctaatcagggagacgttaatcttctggatgtgttaacccagcttccagacctacatcctgagcaagcattcgatggattccctaccatcacctctcctatgcgcccttacactgatcatccattttttggcaatgctggcgaccaagatctttcagcgtatatagacagtatcatctctcatcaggatctggaaggcttgttggccagcccttctttggctgacatggttgagcaggctactgtaaatgttgagccccaccctattaatgtacccgttctagacaacagctcaaacagcaacagattggctgaaaacagccgtggaaaagttggttctgaaacgttgctcctaatcaagggtacagatggcacaggtgctgctgcttgctcttcttctgcaaccaaaatactccaagacaatactgatgatcacacaggagctcaaagtaacttggcttccagtgcatcagctcaagtgtctcacttttacaaccaatatgaactccaatcggcattcgtccctgaaatggaaccaccaaatagtggaaccttgtgctctgcagcctccccgactccccatccccagcacttgttcaacggtgtggtagcttcagatgtcttcaatggaatccaaggatggccagcggaacctttgacggatccacaccaagggaatgcaccaagaaggatccgccttgcgcactctattcagagggcatcagtcactgagcctgtactaacttctgatgtggaggatgaagatgaaccgggaatatgttatagcgcagacagttcatccgccagcaataccgaggattatgccaatgctggagaaacaatgcgtattcaacgtggaggggtgatatctactcaagtagtttcgtcaacagaaaag

SEQ ID NO: 79747 - DNA, 1294 bp, Zea Mays
aggccaccgctccaaccgctccaccgcagccgggtactggaaggccacgggcaaggaccgcctcatccgctcgcgcccagcaggcaccctcatcggcgtcaagaagacgctcgtcttccacagaggcagggcaccccgaggacaccgcaccgcctggatcatgcacgagtaccgtacggccgagccccagctcccacaaggccaaaacggtagcttcgtgctctaccgcctattcaacaagaacgaggaggaatccgaagcctcagacgctgccgattcaccgtccacgtcgtctccgcccatcgcgccggaggtgaaaactgagaatttgagccaaccgacttctgccaaaatgtctccccatattgcaactgtcagtagcaatgagccaacgtctaatcagcagggagacgttaatcttctggatgtgttaacccagcttccagacctacatcctgagcaagcattcgatggattccctaccatcacctctcctatgcgcccttacactgatcatccattttttggcaatgctggcgaccaagatctttcagcgtatatagacagtatcatctctcatcaggatctggaaggcttgttggccagcccttctttggctgacatggttgagcaggctactgtaaatgttgagccccaccctattaatgtacccgttctagacaacagctcaaacagcaacagattggctgaaaacagccgtggaaaagttggttctgaaacgttgctcctaatcaagggtacagatggcacaggtgctgctgcttgctcttcttctgcaaccaaaatactccaagacaatactgatgatcacacaggagctcaaagtaacttggcttccagtgcatcagctcaagtgtctcacttttacaaccaatatgaactccaatcggcattcgtccctgaaatggaaccaccaaatagtggaaccttgtgctctgcagcctccccgactccccatccccagcacttgttcaacggtgtggtagcttcagatgtcttcaatggaatccaaggatggccagcggaacctttgacggatccacaccaagggaatgcaccaagaaggatccgccttgcgcactctattcagagggcatcagtcactgagcctgtactaacttctgatgtggaggatgaagatgaaccgggaatatgttatagcgcagacagttcatccgccagcaataccgaggattatgccaatgctggagaaacaatgcgtattcaacgtggaggggtgatatctactcaagtagtttcgtcaacagaaaag

SEQ ID NO: 79748 - DNA, 244 bp, Zea Mays
aagaaggacctaacggaggttacccacaaggtctacttcgatgtcgagattgacggcaagcccgtaggtcggattgtcatggggctttttgggaagactgttcctaagacagcagagaacttccgagctctttgcacaggtatgttttatgctattattacccttgttatagttttccaatgactaaactcatggtaggtttaaggtttggcagtcttaaattgagattgttttgtcatgcagc

SEQ ID NO: 79749 - DNA, 1131 bp, Zea Mays
caaagtaaaagagctatgtttagagaacatttttggttaaaggaactgggtctcttgccatgtgaatctgtgaaataaaagggcaccaaacagtgaggagagaaaggggagcagcaggactagtgaagtaaattcagatttgggatgaccaactgaagactgaaattcagaaaagtgaaatggtaccagtgttttgcagctgatttttgagcaccataacttgtaatccataaggattaggtccaagagacttataataaatttataaacccttgatatgggaacaagttctattaacagtaactggtctgtcttaattgaaaatcaagagaacagactaattgaagttgggtgggtcagtccagagctgtagattccaaatacagaaatatctagctgtgatctttttcctccttgccgtgtcctactttggtatgatgggggagagcaaagatattcagatttaggcacatctctgaattatcatctgtaagaaatatctggctctaatattttcttcccctgtcgtgtcccactgtgaaatagagcggtggttgggataagaaggagcagaaatatccagactcgtgcatagctgaaatatcatcagtggaaaaatctgctacagtgcgctccacccttaccccctcctttttccatggataatcgtcaccctgcatggctgtattctgtgaatctgcgtggatcttcttgagtaagccacgactgcatcccatgctcacagttatccttgctgcaagttccagaatccaaccccccttgatcttttccctgcctatataaagagcaacaggggagggaaagaaagcagaggctagttcagtgatccgtgcttcgatcatcaaccatagtgagtagcttcagtcagcagtattgctcttccttcccaaaatcataccctggacgcgcccaattccatcgattaaggcactgaacgtgtctggtgaccacacctgcagatattccacttcaccgtggccagaagagatagaagtcaccgaagacaggacaccaccaccttcggaatcccaggccgggaattgtttctactttgatatctgcggatccgagcctgattcacctgtgaacgaaggcaagccccggtgcatg

SEQ ID NO: 79750 - DNA, 2144 bp, Zea Mays
gtcagactcagagagatggtttgatttgatttggtgtccgtccctcacctcttgcagtcttgcttgcttgtcgtctccatccgtgcatcgtcttcctcctctacctcctctcttctccttcggctgggtttgggttaacaaaggcagagggaccagcggcagcgaaggtcaattgcatcgcatcggatcagatctcgactcaattcccgcggttaatccacatatcgactcaattcccgcggttaatccaccgccaacacctaagttaaaaccacggcggcggaggcatcggccatgctggcgcgtgtggctgcggagatagccgcgctcccggagccgcgcgggcccatgcgccgcctctgcggggacctcgcgcgccgcatccgcctcctcgcgcccctactccagcacctccaagacagggacctggacgacgccttgcgtctcgcagacgcgctgggggccgcgcgcgacctcctccgcgcagttcacgacggcagcaagatctaccagccacattcacttggccttggatgccttgccgtacaagaccttcgacttgcctgaagaagtgctggagcaggtcgatcttgtgcattctcagttcaaaagggctgcaaccacagctgctccaccagatgcacagctgtcaaaggacatatgctttgctcttgctgacaaggcctttgaccctcgggtcctcacgaggatctctgataagctgcaactgcacagcatggccgatatcaagaaagaatccctcgccctgcatgagatggtcatctccagcggcggcgaacctgatgcctgcgtcgacgagatgtcctccttgctcaagaagcttaaagactgcgtcgtcactgaagcccccaccacagagacgcccaacgcccagtctacctccataaagcatacatctcctatcatccctgatgaattcagatgcccgatatccctcgagctcatgcaagaccctgtcatcgtttccagcgggcagacatacgagcgatctggcatccagaaatggcttgattctggacacaagacatgccctaagacgcagcagctcctctcccatacatcactgacaccaaactttgtcctaaaaagcttaatagctcagtggtgtgaggccaacggcattgagcttcctaagaacaaggcaaactcgcgagataagaaagcagcaaaaagctctgactatgaccatgctggtttagtatccctaatgaacaggctgaggagtgggagccaagatgagcaacgtgcagctgctggtgagatccgtttgcttgcaaagagaaatgtcaacaaccggatatgcattgctgatgcaggagctatccccttgctagtcaatctgctttcctctacagatccaagaacgcaggaacatgctgtcacagcgctccttaacctctccatccatgagaacaacaaggcaagcattgtaagctctcatgctatccctaagattgtggaagtgctcaaaactgggagcatggaggctagagagaatgcagcagccacactgtttagcttgtcagttgtagatgaaaacaaggttacaattggtggcgctggtgcaatacctccactcattaatctcctgtgcgatgggagcccaagaggcaagaaagatgctgcaacggcaatttttaatctgtgcatataccagggaaataagattcgagcagtgaaagctggaatcgtcatccatctgatgaacttcttggtggatcctactggcggaatgatcgatgaggcactcactcttttggctattcttgcgggtaaccctgaagccaaggctgtaatttcgcaatcggatcccatcccaccacttgtcgaggtcattaaaactgggtctcctcgcaacagagagaatgctgcagccattctatggtcactttgttgcactgatattgaccaaacgagggctgcaaaagctgctggagcggaggatgcactcaaggaactgtcagattctggcacagaacgtgcaaagagaaaagcttctagcattctggaactcatgcggcaagctgaagaagcatgaagctgaccgtagtagatttgcgaggttgtggttttgttatattgtactcttagacactaaatgtttctggatagtgttggtattt

SEQ ID NO: 79751 - DNA, 2166 bp, Zea Mays
gtcagactcagagagatggtttgatttgatttggtgtccgtccctcacctcttgcagtcttgcttgcttgtcgtctccatccgtgcatcgtcttcctcctctacctcctctcttctccttcggctgggtttgggttaacaaaggcagagggaccagcggcagcgaaggtcaattgcatcgcatcggatcagatctcgactcaattcccgcggttaatccacatatcgactcaattcccgcggttaatccaccgccaacacctaagttaaaaccacggcggcggaggcatcggccatgctggcgcgtgtggctgcggagatagccgcgctcccggagccgcgcgggcccatgcgccgcctctgcggggacctcgcgcgccgcatccgcctcctcgcgcccctactccagcacctccaagacagggacctggacgacgccttgcgtctcgcagacgcgctgggggccgcgcgcgacctcctccgcgcagttcacgacggcagcaagatctaccaggccatgcaaggggatgccgtgctccaacgctttgcaactgtcaacagccacattcacttggccttggatgccttgccgtacaagaccttcgacttgcctgaagaagtgctggagcaggtcgatcttgtgcattctcagttcaaaagggctgcaaccacagctgctccaccagatgcacagctgtcaaaggacatatgctttgctcttgctgacaaggcctttgaccctcgggtcctcacgaggatctctgataagctgcaactgcacagcatggccgatatcaagaaagaatccctcgccctgcatgagatggtcatctccagcggcggcgaacctgatgcctgcgtcgacgagatgtcctccttgctcaagaagcttaaagactgcgtcgtcactgaagcccccaccacagagacgcccaacgcccagtctacctccataaagcatacatctcctatcatccctgatgaattcagatgcccgatatccctcgagctcatgcaagaccctgtcatcgtttccagcgggcagacatacgagcgatctggcatccagaaatggcttgattctggacacaagacatgccctaagacgcagcagctcctctcccatacatcactgacaccaaactttgtcctaaaaagcttaatagctcagtggtgtgaggccaacggcattgagcttcctaagaacaaggcaaactcgcgagataagaaagcagcaaaaagctctgactatgaccatgctggtttagtatccctaatgaacaggctgaggagtgggagccaagatgagcaacgtgcagctgctggtgagatccgtttgcttgcaaagagaaatgtcaacaaccggatatgcattgctgatgcaggagctatccccttgctagtcaatctgctttcctctacagatccaagaacgcaggaacatgctgtcacagcgctccttaacctctccatccatgagaacaacaaggcaagcattgtaagctctcatgctatccctaagattgtggaagtgctcaaaactgggagcatggaggctagagagaatgcagcagccacactgtttagcttgtcagttgtagatgaaaacaaggttacaattggtggcgctggtgcaatacctccactcattaatctcctgtgcgatgggagcccaagaggcaagaaagatgctgcaacggcaatttttaatctgtgcatataccagggaaataagattcgagcagtgaaagctggaatcgtcatccatctgatgaacttcttggtggatcctactggcggaatgatcgatgaggcactcactcttttggctattcttgcgggtaaccctgaagccaaggctgtaatttcgcaatcggatcccatcccaccacttgtcgaggtcattaaaactgggtctcctcgcaacagagagaatgctgcagccattctatggtcactttgttgcactgatattgaccaaacgagggctgcaaaagctgctggagcggaggatgcactcaaggaactgtcagattctggcacagaacgtgcaaagagaaaagcttctagcattctggaactcatgcggcaagctgaagaagcatgaagctgaccgtagtagatttgcgagaacatttcaataagtttaagagaaaggaaaccataa

SEQ ID NO: 79752 - DNA, 3509 bp, Zea Mays
gtcagactcagagagatggtttgatttgatttggtgtccgtccctcacctcttgcagtcttgcttgcttgtcgtctccatccgtgcatcgtcttcctcctctacctcctctcttctccttcggctgggtttgggttaacaaaggcagagggaccagcggcagcgaaggtcaattgcatcgcatcggatcagatctcgactcaattcccgcggttaatccacatatcgactcaattcccgcggttaatccaccgccaacacctaagttaaaaccacggcggcggaggcatcggccatgctggcgcgtgtggctgcggagatagccgcgctcccggagccgcgcgggcccatgcgccgcctctgcggggacctcgcgcgccgcatccgcctcctcgcgcccctactccagcacctccaagacagggacctggacgacgccttgcgtctcgcagacgcgctgggggccgcgcgcgacctcctccgcgcagttcacgacggcagcaagatctaccaggccatgcaaggggatgccgtgctccaacgctttgcaactgtcaacagccacattcacttggccttggatgccttgccgtacaagaccttcgacttgcctgaagaagtgctggagcaggtcgatcttgtgcattctcagttcaaaagggctgcaaccacagctgctccaccagatgcacagctgtcaaaggacatatgctttgctcttgctgacaaggcctttgaccctcgggtcctcacgaggatctctgataagctgcaactgcacagcatggccgatatcaagaaagaatccctcgccctgcatgagatggtcatctccagcggcggcgaacctgatgcctgcgtcgacgagatgtcctccttgctcaagaagcttaaagactgcgtcgtcactgaagcccccaccacagagacgcccaacgcccagtctacctccataaagcatacatctcctatcatccctgatgaattcagatgcccgatatccctcgagctcatgcaagaccctgtcatcgtttccagcgggcagacatacgagcgatctggcatccagaaatggcttgattctggacacaagacatgccctaagacgcagcagctcctctcccatacatcactgacaccaaactttgtcctaaaaagcttaatagctcagtggtgtgaggccaacggcattgagcttcctaagaacaaggcaaactcgcgagataagaaagcagcaaaaagctctgactatgaccatgctggtttagtatccctaatgaacaggctgaggagtgggagccaagatgagcaacgtgcagctgctggtgagatccgtttgcttgcaaagagaaatgtcaacaaccggatatgcattgctgatgcaggagctatccccttgctagtcaatctgctttcctctacagatccaagaacgcaggaacatgctgtcacagcgctccttaacctctccatccatgagaacaacaaggcaagcattgtaagctctcatgctatccctaagattgtggaagtgctcaaaactgggagcatggaggctagagagaatgcagcagccacactgtttagcttgtcagttgtagatgaaaacaaggttacaattggtggcgctggtgcaatacctccactcattaatctcctgtgcgatgggagcccaagaggcaagaaagatgctgcaacggcaatttttaatctgtgcatataccagggaaataagattcgagcagtgaaagctggaatcgtcatccatctgatgaacttcttggtggatcctactggcggaatgatcgatgaggcactcactcttttggctattcttgcgggtaaccctgaagccaaggctgtaatttcgcaatcggatcccatcccaccacttgtcgaggtcattaaaactgggtctcctcgcaacagagagaatgctgcagccattctatggtcactttgttgcactgatattgaccaaacgagggctgcaaaagctgctggagcggaggatgcactcaaggaactgtcagattctggcacagaacgtgcaaagagaaaagcttctagcattctggaactcatgcggcaagctgaagaagcatgaagctgaccgtagtagatttgcgaggtttcatgcttgcaaatttcatttggccttgcagaacatttcaataagtttaagagaaaggaaaccataaagttgcctgatggttctgctctatggttggtacttttggtggcttcatgttgaaatccttataaagactgcccatatgcaggggatacaatgaaggcctggggttgcagcaacaagcctctgccctgagctgaggatggggcacattgctgagcctaccggcactgttgtgattggctgcaaagtgctgccgatcttcaccgagcatggcattgttgacagtgcaatgaagaagatgatggcgcataggattgacggcaagaaggcagttgctcgggttaaggagcttctgaagcgggctgcccaggccaagcctcacagcgtcactgtcagtggaaagaaatggaagaaggttctgagcttccacgcaagggatagcgctgcggccacaaagggagggcggcaacagaagcagcaggaagaggcgataagctgcagctcgggcaagctgagcttcaagtgggacgtgggcagctgctcctcggcatcgtcggttgcgtattcgccgctgtcgttgatgtcggcaccggcaaagtcctcggagcagacgctgctgacgccactgaggaaagactattgcatgtcaaggctgtcgtccataagccagcagagtatgttgaagaacatggaaggagacgaggaggaggaggaagcctgctgctgcaggacggcgcagtggatcaccaccgattcagactttgtggtgttggaactgtaaactaatggtcatcaagacatcaattacactagtgtatctatggtaaggtctgtgtctgtatcagatcagataccccgacggacttcgctgcattacacttacagttgccccggcattgcttcctatgtactcgtatatgtattatatgtgtcttgaatacaatcctaaggataggaaaggtattcatataaattctagtacatcaaatgtgacaccagggtacctaaggttccggtgattgattgatcaggagagcagtgccgtagagtttgtctaccaaggcatgacacactaactcaatagataactctagagaggttcggactgcgtaaaagcagtgtacgggtttacaagcctaggagagaagagatcctcctaaccaccttctctacagccttggatgattttcttgtattgtggttggttgtgtggatctatcttgagtgctgctctaccgtctccttttttttagttcaaggaggtgatagtgttacatgtataccatttttgcgggcttggcttgttatatcacatccgtcgatctatgtggtgtatcttgctgaggcgtgcttccaagtaatcataccatttt

SEQ ID NO: 79753 - DNA, 4143 bp, Zea Mays
aacacccctggtgttacattaactaaaactctgacatgtcatcataagcatttgcattatcttgtttgatatacctagaatgcattcactaggtcaaattttttttcaaaagtgcgataatatgagtggagtataaaacttagtttaaggacttggctcaagttaaacaggagtaagtcatcccttgagcatgtaacaaattgacttggagtcttgaagtgctaaaggaaattcctagagtctatagaaaatttgttttcaaaggtagatcaagtggaagaaatacttggaccgaaggagtaacttcaaaatcctaaggcttgaaaaccttgattggaattgagtgtaagcaaacaactcctaaatcaaggatactttgggcctgagttctataagccaaaggtgaatttgagattaaggagtaactttgttttaggaggatggagaagtttgattttgatatgtggattagaagtagtgaagtacttagggtggttgagtatctctaaactctaaactggagcccaaaagttgatttggagatttagccacattttgcaagaggtcgaaataccaaggtggtaggatttccaaagttgcacaatttcgttatttggagatttccatgttgtgtggagaaatttagagtaatttgcaaaagttcagcttaggttcatttttggagttcctgaaaatagcagcaactaggcaattttagtcctttgtaacttttgatctagaactattttgaagatgatcattataacaaagttataaagctacatgaggagtataagtttggttaagtcatatagctctaaaactatttggaactttgagtaaaactggtccaaagtaaagctgtcaaaaattgtggatttcagactttagtgaaattcagagcctgaatttcagcatttggagcaaactttgggctagtgtagtttggaatccaagaggttttggttattgatcactataccaaacttgtagaggaactatagtagtataaactttattaagcaattgtcgcctagaaacatttggaacccaggaaaaagagtggttcaaagtggtgctgctgtgtttctgaattttcagattggaaacagtaactgaatttcagtgttgatagcagttttggagctggtttgtggctgttctgtaatgttttgtgctggggtgtttatagagaagttgaagcctatgcgatagtgaacaaatctactaaagtgtctttgacttgatcccacataaaaagtggagtaaaacttgctcaaggttggactgacaggttttatttcagacttagtctatggctgattgagacctgaatttcagataaaagtgtcaagtttggagctccttggtggtcaatccctttgtttttaggctataatttctatagcaaacttggagaccaatgttgggggagtaatccctagtgagggacatacccttgaaactgcttagaaatgagagaaaacactgcacaaagttgtgctgtcagataaaagagtattgactgttgtgcagtagcctaagtctgaaatatgtgtgtctggttaaactttggagctttgtggtgcttgatctatatggttttggactgaagttattgtgaaaagtttgaataccatatgttagtgaataagtttctttaagtgtgttaggcgtgaccctacacaaaaagtggtgtaaatactgcccaaagtgggactgtcagtcacacaaactgaatttcattcagtccaatgaaaactgaatttcagtgcaatttgttgaacttcagagctcttttgtggctaatccataaagtgttggaccatggtgtctatagtgaagtggtaaaccataaaaagatgaacaaatctcttaaagagagtttgtcctagtgctatacagaaattggagtaaagcgtgcccaaaaacctactgtcagatatatggtgaccagcttaatattcagttagctgcagctgaattcagtatttttgtcccactttggagcaccataatttttgatctgtgagccttcagccttgggttactgcagcaggtttgtagtgctttgtttggtgagcaagttttattaacgaaggtcggcatgtattacttggaatcgagagaaacagaggggttaaaagtagggtttcagtttggtgccaagtgctgtttcagaatctgaaacgagtttcagtgttgctgaaattttgaaaacagtgtattcctctccactttggacccatttaggttctaattcttaagctttcggtggataatcattatatcaaatttggagatctattgtaggggaacacttcttatgaacaaggatctctctgttcttattcggtttggaaaaaaggatttgctccaagtcaagttgtttggcgtgttgtgagctgaacatttattcagttagctgaaacttggaatgtttattattgtgttaaaaatatgattcgtgtagacgattacatatgtatctcacgctctttcttatccaatatccacgccggctccctgttatattcttagcgtactctttttgctagtgagggaagccacctacgtctcctctcctcatcttgatgtttctcctaggttccagccgacactagcctcttggaaattttgccagcactcatccttatccccaccacaagcactgggaacgctcatctccctgtgattatctcaatctgccacgtccaagatctctccatccttccaggttccagcacatatcggcttcctgaaaaaggggtcacgtacgcttctcctaattcaagctacctgatccttatcccatgccatcaggctgcaagctccttcacgccacctcacattccacgcacaggtttacttcttgctcttcacaccatgcggcttccaagactccgctcatcacagcgcttggagcttgccggttgccgagatgaaccctgtgcttagtccatcagcaccctagcctcccattcacagttcctccctgacctcccttacgctattgcagcagcagcacttgactccagtgccctcaacacccagccatagtctacctctgcgctcgtcacgaagccgcttgccctacagtcctgtcatgtcaccgtcctacaagcactgagctccgtccatctcgttgaacgccatcgtccccttcttcactgtaggctcgacatctgccttctggtgcacaccgacgctgcgctctggccctcgccctccatcgcgcgctcggacactttgtcacctccagacttcgccgtcactgagcttctccctcgctctcagatcgaggtcgcccgaccccagcgcgctcgccctggtgcccagcacctcttcaatcccgatgcatccccaactgaactcgtcggactcgccttggtttggacttcgccaagttggtgagcagccgtgaactgcaccatgctcaggccctgcccgcttcctttccatctgggttgatcctacttcgtcagaacagcagcagcgccagcgtcctctcctagcttgtgttcgtgaattttctcgtcgaaccggcatcgtatcatcatccgaacacgtagaagaagtgatgtttgaagaaggagttcacttcagtgcatgttgatccagcggtggagtttcatctaactacttaccagagtagaataaggttttgaatcttctctgcaacaaggcaagccccggtgcatttgccacctcccttgtgtttacaaaattttatcacttatatgctgcattaggtgataggagttgattgattaaacaattgatgcattaccatccttgaaagattgattaccataccttatcacctgttttataaaagctagagatgcttagtcatgctgatagactaagaaaaatgtttttcatctatgactcatgtttttacaaaaagaaaatgggcttgggataatgaaggcatcaagacgttgataaattcattatccaggcatggcccctctgtcaggcgccaaaattttaaaatagtttaaaatgggaccagacgctgagcaggaaaggtcgcccgtctgtgtcgattaaggaccgtaccgattgttggcctgatgatctaggaccttttaactagccacatacctcgtcatgggtaagcctgaacccggctattcc

SEQ ID NO: 79754 - DNA, 1662 bp, Zea Mays
ctcacgctctttcttatccaatatccacgccggctccctgttatattcttagcgtactctttttgctagtgagggaagccacctacgtctcctctcctcatcttgatgtttctcctaggttccagccgacactagcctcttggaaattttgccagcactcatccttatccccaccacaagcactgggaacgctcatctccctgtgattatctcaatctgccacgtccaagatctctccatccttccaggttccaggcttccagcacatatcggcttcctgaaaaaggggtcacgtacgcttctcctaattcaagctacctgatccttatcccatgccatcaggctgcaagctccttcacgccacctcacattccacgcacaggtttacttcttgctcttcacaccatgcggcttccaagactccgctcatcacagcgcttggagcttgccggttgccgagatgaaccctgtgcttagtccatcagcaccctagcctcccattcacagttcctccctgacctcccttacgctattgcagcagcagcacttgactccagtgccctcaacacccagccatagtctacctctgcgctcgtcacgaagccgcttgccctacagtcctgtcatgtcaccgtcctacaagcactgagctccgtccatctcgttgaacgccatcgtccccttcttcactgtaggctcgacatctgccttctggtgcacaccgacgctgcgctctggccctcgccctccatcgcgcgctcggacactttgtcacctccagacttcgccgtcactgagcttctccctcgctctcagatcgaggtcgcccgaccccagcgcgctcgccctggtgcccagcacctcttcaatcccgatgcatccccaactgaactcgtcggactcgccttggtttggacttcgccaagttggtgagcagccgtgaactgcaccatgctcaggccctgcccgcttcctttccatctgggttgatcctacttcgtcagaacagcagcagcgccagcgtcctctcctagcttgtgttcgtgaattttctcgtcgaaccggcatcgtatcatcatccgaacacgtagaagaagtgatgtttgaagaaggagttcacttcagtgcatgttgatccagcggtggagtttcatctaactacttaccagagtagaataaggttttgaatcttctctgcaacaaggcaagccccggtgcatttgccacctcccttgtgtttacaaaattttatcacttatatgctgcattaggtgataggagttgattgattaaacaattgatgcattaccatccttgaaagattgattaccataccttatcacctgttttataaaagctagagatgcttagtcatgctgatagactaagaaaaatgtttttcatctatgactcatgtttttacaaaaagaaaatgggcttgggataatgaaggcatcaagacgttgataaattcattatccaggcatggcccctctgtcaggcgccaaaattttaaaatagtttaaaatgggaccagacgctgagcaggaaaggtcgcccgtctgtgtcgattaaggaccgtaccgattgttggcctgatgatctaggaccttttaactagccacatacctcgtcatgggtaagcctgaacccggctattcc

SEQ ID NO: 79755 - DNA, 1310 bp, Zea Mays
aaatcagcttaccgttccaacagctgttccaacagctgacacgaatccgcgagatcggtaatgattttctgattcaaacaatttgtcgagcgcttggcaggtgccacacgaacttcacgcggctaacttcgtcttcgcccgattcttgtgatttcttgatgacacacggaacgacgataagatcgagtctggagcgagctggcgaggtgtgggtcgagcaggggatgacaggttcgatgactcgacggtaaacgcgaacatgccgaaacccgatgcatgaggagcgagcgcacaagggcaagcagcacgaattgaaacgtggagaaattgcccactacgaaacaaactgagcaaggagcgctcgtgaactttatggtggaatcggcggtagccgatgccagagcgcacggcaaggaagcttcacaatttgacgagaccgtggccgagcgaattttatggcgcggactagagaaggactcggcgagcagaggggcgagcaggacgcgagctacgcgcaggcacgcgcgcaggggacatcggctgggcgcgcggccgactagagggagccggcgcggccatgcgagcagggtggagggagcagaggcgctcgcatgggagagggagagcctggcgagctgcgcgcaggagactccgagcagaggtagcagcgacaccgtggatgggaagagcagagcaccgggccaacagagaaccgagagggagaggaaggagctggagggagtgccgcgtagggagatggagctcgaagccgagctcgaggacgcggctgccatgggcgggtgctccatggaggagaagcaggggaaggggcgagcatagggagatggacgccatgggagggaaggtagagcgtgcagtaacatgggaaggaagagtagcgcgcgcacaaggagcttgggaccgagcagaaggacatgcgcagggaggaagacgcgtcatggctgagggagctcagggggagggaagccgcggcgctgcagagaaaaaggagactggaggcggcggcgagatttttacacgagcaggccaggcacgcacggcagaggatagagctgagaaaaaagatatctaggcccatgggcggtggaaaaaaatcagggagaatggctgcagaggataggaaagagcgatgatatttttctctcttttttatttctttctctctttttataatagaaaatcacagatatttttggatcgaggtttttagcgataacaaaagggtcgacggtacttgcgaaacagtttgattcgattcgaaatctgataaatttacctgtggtctgaac

SEQ ID NO: 79756 - DNA, 7877 bp, Zea Mays
gagtgagcgaagagccacagagaggagagagcacaccatccgatcacgcctttctccgtcttcctttggtcggtggggtcgactccgcctcctcacccgcaaaacccctcgtgttcgcgagacgatcagacgaggcggtcagggagggggaggtagaatagggtttcggcagggccgtgccgggccgcctcctgctgaccttcctcctccagcgccgtgcaagcactcccgtccctgccaagccctagctagggtagctggtgcagcggattccaggacccacaaatctcttcttctcaacccattgccggtggagcgtggctgatttctttctgacgactgatcgcgcgctcgcagaggtagtggcctcgggttgttggggttcgggctcgccggcgattttgggggacgagttcgctgccggtgccgcgggcgggggcgtgattcgcacctcggaggaacaaacggttgaactgacccaggtgttgatctgctgctgctactactgatccatggctaatacccggtcaggaggaggaggagatgcccctccccccccttcttctcctccagctgctgcttctgcaactgccacaaggaagcttgccgatggaagggagaccaggaacaccgcagctgccagtgctcacacaccaaacctcaggaggtccactcgagaaaacaaaggaaagcacaaatctagacttgctgacacaccaccccttcacagatctgctaaaacgcccaccaaggatgccactgcaattgctacccccaaatccacacccttgccaaacaaccccaaagactcaacaaaaaagccctccagagttaggaacacaagtgtttcaccttctccttcaaaacaagaacctaatgaaacctcaacgcccgcctccaccaaaagaaaaacccaagatgatgctctgactgcctctacaccgtccaagaagcagaaaaggctcctgcatgcgaagagctacattgcactcttcaatataggagaagaatctgtgcttgctaccctcagggaggatgaggaaaaagcttctgaggtgcaaccggaaggagatggtgctgttttggtgcatgaagaaagtaatgcaccggaacaacccaaccaggaagcttcaaatgttgttgctagtgaggtcttgggaggtcactcttctgacttgcatgaaattgaggtgatattggagggagatggattgaagattggatcccatcagtctgatgttgttttagagcgttgcattcttactgagacgcgctcactaaataaggcagtggaaagcatccccatgttggaaactggagagcaagctactggtggttcaaaccagaaacctctactagaattgccaaatagcgcttgctctactgctcatcatgaagaggccagcaagtcggtggaagatggtaattctattgggattcaaggtgcatgcacttcaaggaatactgaagctatccaatgtgatgaaacatggtatgatgacaacatttgtgttgtttgcagaagtagggaaatctcagatatcctgaagtcttgtggtggaaaaggatgtaaacgacattaccatctttcgtgtatggatccttccttggacgtgtccctaggaatatggctttgcataatgtgtatgaaaaagaggattcagtttggtgtatattcagtcagcgagggaattgaatctttatgggatgtcaaggaaggagtggtgaacagcaagcaatatttcgttaagtataaaaatcttgctcatgtacataaccagtgggtttcagaaagtgatatagttgatagcaccccgcaaggttctgatcttatctccaaagttagcaagaagattcataaagaaaagacaataaggtggaagcaggaatgggctgaaccacaccgtctgttgaagagaagattgcttatgcctcaaaaagaagccgaagttttttttaattcactaggtgataaatttgtatactgtaatgtcgagtggctagtgaaatggaaggatctgggctatgaacatgctacatgggaactcgagtcctcatcctttttatgtactcctgaggccgaggagcttaaaaggagctatgaggaccgctttaaaactgcaagaaaagcatctgatccttcaaaagtagacaaggctaagggggggatatttcagcaactcgagagactgccagatggttgccctcctggtttagacgatgaccatttgagatcacttaaccagcttcgtgagttctggcacaattcttgtggtgctattttcatcgatgatcaggagcgagtaattaagaccattctttttgtggcatccatactgcctcacatctgtcaaccactcctcattgtgtctactactactactctctccttgtgggagactaaattcaatcgcttggcagcatccatcaatgttgttgtgtacaatggagagaaagatgtacgcaaatcaatacaagatctggagttttatcaggatggttctgtgatgttgcaagttctcttgtcccaccctgatgccatcttagaggacatcgaagtgattgaacgaattaactgggaagcagttatagtcgatgattgccaaaactctagagtttcaaaatggcttgaacaacttaggagacttcctaccaattttaggatggttctattgagttcctcactaaaggaaagtattgctgagcacatcagtctgctgtcttttctcaaccctgaagaaaatggtacattgagtgtttcaaatggtgtttcttttgatacagctggcactctagttgttctgaaagaaaaacttgcacgttatgttgcctttgagcggaagacagattcatcaaagcttttagagtattgggttcctgcccgcctttcaccagtgcaactagagatgtactgttacatattactatcaaactccccagcccttagatcacattctaaaacagatagtgttggtgctcttcgcaacattcttatatctcttcggaagtgttgtgatcacccttatcttgttgatcaatcgctgcaaagcacacttaccaaggatcaccctgtaactgatatccttgatattggagtgcgttcatgtggcaagttgctgcttcttgacagaatgctccaacagatcaggattcaaggtcttagagttcttattctttcgcagtctggtggtgaatctggcaagcctatgggtgacattttggatgactttgttcgtcagagatttggttatgagtcatatgaacgtgttgaacgtggattgctactgcaaaagaaacagacagcaatgaatatgttcaatgacaaaactaaggggcgatttatttttttaattgatagtcgtgcatgtggtccaagcatcaaactatcatctgttgatgccatcatcatatattgtagtgactggaatcccatgaatgacttgagagcccttcagagggtcagcatggagtcacagtctgaacctgtgcctatttttcgtttgtactcgtcttttacagtggaggaaaaagctcttattcttgcaaagcatgaccatattttggatagtaatattgtgaatataacccctagcctgagccattgtctgctcagttggggcgcatcatttctcttcaatagacttgaggagttgcagcaacatagctactcaaatgtctctggtgatgagcttttcatggataatgtagatttggagtttttgacaaaattactcagcaaggttgaactcagaactgaatcaggcaatacagccatatcacaagcttatctgtgtggatctttctattctagggctattgttgtagcgggtgagagggagggaattccatcagttgatggtgacctgccaaagttctgggcctactggttaagtttacttaatgggaggtctcctcagtggcagtatatatctgagccagtacaaagaagccgtagaaagataaataacatggaacaacaattgaaaaacacagacaaacagttgaaaataactactgaagaaactgatgaagccagagtaaagcgtagaagaattggtgaaatcatggattcatctgcaatagactcacctggcaaaaacaaggacaccatattgccaggaaacaataccccacctagttctcatcaaatatcagttgaagatacatggcaggaactagagcgaagcaatcttcatgccacacaaaaaggtctacacgttcaactcaagccagagatttcgaagttatataagttgctgcaactgccggagaaggtgaaatccttatgtgaggaatttcttgagtatattttgaagaatcaccaaatcagccaggagcctaagggcatactgcatgcattcaatttggctctgtgttggcgtgctgcttctctctcaaagcataagatcaatcacacagaatcactcgcacttgctgtaaaaaacttaaactatgagtgcaaagaagaacttgttgattttgtttatgggaagctaaagatccttaagaagaagtttgcacgtagagcaggggaagtgagcaagcaaaactatatggtttcagtgagcgacatatcaacttgtgaacaggtcacttctgttagattgagaaatgatgagttagtccctagccaggtaactttaactgatggtaactttgagaatggttcacatcacgaggctacaggtgacttttggaccgaggagatggtttcgggagagaaagaactgctacctgacccagtaactcatgaaggggaacacttattgagggatgaacttctcagcaaaataatggacaaaagaattaaattagttgacaaagttttctctctgagaggaaggagtatctatgataagcattcaaatcaggtttcatttttagacatgcataggcaaaaggtagtggataaactcagaagagcatgcagtttagttgtggagcatctacgtagtagtcaaaatcacattgctcaagaggacagagatgggaaaataaagctaataattgaatggtttactatgctgctgtatgcttttctggaacacatgaaatgccaacgtaacaggcttgatatgcagcaatcagcttccaggatcaaggagtctcaattgaaggaagaaacccttcaggcagcaagatgtggccaattagatcaaaattttgatcaacatattccttcaccagattttgaatttgctatggaagaatttaggcacttcagggaagtagttggtagctgctatgttgatccagctgctctggtaccagagtctttggatgacaattcagcaatggaaattatgttggttcaaagcgcaactgatgctgaagtcatcgaagaagtgctaaatcgacctactgaagttcttgttcaaggtccagcatcagaagttgttggtccatcagttgatgtgatttgcaattgttctgatggcatcaactcccaaagagatgcatctctggctgttcattcattggaaccttcaagtgacgaccttagaagtactgaccatgttgaggagaacacagttggctcacaaatacagggtggtacaagcaaacatttaggtgatgctgcaatggaagttgaaactggaaacaggaacactgctttggctgattcacctcactttgacaaaccagctttgactgctccatccaggcaggcaacattgctggtttctcgagaaaccgagatgctgagcaatcttgtggaccaatgtgcacaacagagtttagtgtcagcacaacctttgcaggatgagtcggaacaagcagatttgtctagtgcagcatcaactcaacccttgcaatctgagaggcaacaattaatctctgtttccaataatctgcttgaaagagcacagcttgatcagagtcaaccaaattatcagacagatgcggcacctggttgtgcgcagtctacagaactctttccagtgacgtcaatgatgtttaatcacgcacctattgattctgaaccactgaaaaatgagttgcacaaattacgattacacatggacacactcaataaagtccatgaaatgaagaaaacccaacttcagaccgcatgtagccaagaactagagaaggtaaagagaaaatatgatttgttaattaaagaacatgattccactcatcttcagcaaaagaaggcacttggtgatttttatgagaaagttcagcgcaaccaatcgctggctgaggattttcgggccaaattcatatcactgtctgcagcacaaggtgcagcaaaaggccatacccctccagttcgtcacacacctcaggctacccaagtggtgtcctccacatcatcaattgccctgtcatcagcttgtcgaccaccagtgccgaggcctagggttcaagctccacaggtggaccaaccattattgtcattgtcgcagttctcccgtccgtctttgcaagtggtccaacctcccaacctggaactaggcaatcttttcagagcaacgtcaacgactcttagtcatatgccacctcaacgtgggagctatggagttcagagtgaattggctcctcgctcacctgctcctcatcttcagttcagatcgccacgggcacattccatggcacctggaaatcagcagcaatcgccagcaattagtgtggatgcaatgtcctcaaggacacaaccagtgctggcggcaagcacatccccatcagatatacatgtgggacccctagcagcctcagccttgtcaagtttacactctgttctcccttcaacctcattaccctcaagcttgcatcctagtcacctggcacaacgtgtgccaccaactcctaacccaactttacaagccggggcaccgaaaggctcgaatgcaacaatgccttccatccctacaggcatgcagctgccagattctggttccctatcgctggatgcatggcttacagctaatcttgggttgaatgatgcgtctacagctcctgctaaggatacagccagtcttgggttgagcagtgatgcccctagggcagctcctgatacaaatacggccagtcttgggttgagcagtgatgtgcctaggggtacggctcctgctacaaatacagccagtcttgggttgagcagtgatgtgcctaggggaacgactcctgctacaactacaaccagtcttgggttgatcagtgattcacctagggtgattgctcctgccagcagtaattcgcctggggcgattgcttctgctacaaatggtggttccgagatagatgtggtatgcctgtcagatgatgaatgatgctagcacgtgtacaaggctgacagttatagatgactgcttgaaaggactaggcattattttacggctcccttgagtccgttctgacaaggtgggaatgttgtttgtgctgtgaatggctggtaacagcaatgacagttttattaagttcattgtaaatgtgtattatgacaaatgcctgccaacgtttgctgtaaatcgctaacctctggggaatgtggatattaacctctgagatggagttgggtttcaagcgctatgaggtttctgtacatgtttgtcattgattagttccctgaggtgttcgttgtaggccggagtgctagctccgtgtatcgttttggttctacgtatgtttcttttttttagtttgacttaaaaaaacagtagcaacaaaaaacagtagcaacatctccatgatagttattatgtataataaatgctgaaattttcttgtatatatttgattgaaacggcgggagtatgtaacagagcaatttagaccaaggcggtcacttcaacgttgtattgtatttctcttcttggtgaaatacggcagcactgtcctatgttaagttttatatctatatagctagctat

SEQ ID NO: 79757 - DNA, 6704 bp, Zea Mays
caccatccgatcacgcctttctccgtcttcctttggtcggtggggtcgactccgcctcctcacccgcaaaacccctcgtgttcgcgagacgatcagacgaggcggtcagggagggggaggtagaatagggtttcggcagggccgtgccgggccgcctcctgctgaccttcctcctccagcgccgtgcaagcactcccgtccctgccaagccctagctagggtagctggtgcagcggattccaggacccacaaatctcttcttctcaacccattgccggtggagcgtggctgaggtagtggcctcgggttgttggggttcgggctcgccggcgattttgggggacgagttcgctgccggtgccgcgggcgggggcgtgattcgcacctcggaggaacaaacggttgaactgacccaggtgttgatctgctgctgctactactgatccatggctaatacccggtcaggaggaggaggagatgcccctccccccccttcttctcctccagctgctgcttctgcaactgccacaaggaagcttgccgatggaagggagaccaggaacaccgcagctgccagtgctcacacaccaaacctcaggaggtccactcgagaaaacaaaggaaagcacaaatctagacttgctgacacaccaccccttcacagatctgctaaaacgcccaccaaggatgccactgcaattgctacccccaaatccacacccttgccaaacaaccccaaagactcaacaaaaaagccctccagagttaggaacacaagtgtttcaccttctccttcaaaacaagaacctaatgaaacctcaacgcccgcctccaccaaaagaaaaacccaagatgatgctctgactgcctctacaccgtccaagaagcagaaaaggctcctgcatgcgaagagctacattgcactcttcaatataggagaagaatctgtgcttgctaccctcagggaggatgaggaaaaagcttctgaggtgcaaccggaaggagatggtgctgttttggtgcatgaagaaagtaatgcaccggaacaacccaaccaggaagcttcaaatgttgttgctagtgaggtcttgggaggtcactcttctgacttgcatgaaattgaggtgatattggagggagatggattgaagattggatcccatcagtctgatgttgttttagagcgttgcattcttactgagacgcgctcactaaataaggcagtggaaagcatccccatgttggaaactggagagcaagctactggtggttcaaaccagaaacctctactagaattgccaaatagcgcttgctctactgctcatcatgaagaggccagcaagtcggtggaagatggtaattctattgggattcaaggtgcatgcacttcaaggaatactgaagctatccaatgtgatgaaacatggtatgatgacaacatttgtgttgtttgcagaagtagggaaatctcagatatcctgaagtcttgtggtggaaaaggatgtaaacgacattaccatctttcgtgtatggatccttccttggacgtgtccctaggaatatggctttgcataatgtgtatgaaaaagaggattcagtttggtgtatattcagtcagcgagggaattgaatctttatgggatgtcaaggaaggagtggtgaacagcaagcaatatttcgttaagtataaaaatcttgctcatgtacataaccagtgggtttcagaaagtgatatagttgatagcaccccgcaaggttctgatcttatctccaaagttagcaagaagattcataaagaaaagacaataaggtggaagcaggaatgggctgaaccacaccgtctgttgaagagaagattgcttatgcctcaaaaagaagccgaagttttttttaattcactaggtgataaatttgtatactgtaatgtcgagtggctagtgaaatggaaggatctgggctatgaacatgctacatgggaactcgagtcctcatcctttttatgtactcctgaggccgaggagcttaaaaggagctatgaggaccgctttaaaactgcaagaaaagcatctgatccttcaaaagtagacaaggctaagggggggatatttcagcaactcgagagactgccagatggttgccctcctggtttagacgatgaccatttgagatcacttaaccagcttcgtgagttctggcacaattcttgtggtgctattttcatcgatgatcaggagcgagtaattaagaccattctttttgtggcatccatactgcctcacatctgtcaaccactcctcattgtgtctactactactactctctccttgtgggagactaaattcaatcgcttggcagcatccatcaatgttgttgtgtacaatggagagaaagatgtacgcaaatcaatacaagatctggagttttatcaggatggttctgtgatgttgcaagttctcttgtcccaccctgatgccatcttagaggacatcgaagtgattgaacgaattaactgggaagcagttatagtcgatgattgccaaaactctagagtttcaaaatggcttgaacaacttaggagacttcctaccaattttaggatggttctattgagttcctcactaaaggaaagtattgctgagcacatcagtctgctgtcttttctcaaccctgaagaaaatggtacattgagtgtttcaaatggtgtttcttttgatacagctggcactctagttgttctgaaagaaaaacttgcacgttatgttgcctttgagcggaagacagattcatcaaagcttttagagtattgggttcctgcccgcctttcaccagtgcaactagagatgtactgttacatattactatcaaactccccagcccttagatcacattctaaaacagatagtgttggtgctcttcgcaacattcttatatctcttcggaagtgttgtgatcacccttatcttgttgatcaatcgctgcaaagcacacttaccaaggatcaccctgtaactgatatccttgatattggagtgcgttcatgtggcaagttgctgcttcttgacagaatgctccaacagatcaggattcaaggtcttagagttcttattctttcgcagtctggtggtgaatctggcaagcctatgggtgacattttggatgactttgttcgtcagagatttggttatgagtcatatgaacgtgttgaacgtggattgctactgcaaaagaaacagacagcaatgaatatgttcaatgacaaaactaaggggcgatttatttttttaattgatagtcgtgcatgtggtccaagcatcaaactatcatctgttgatgccatcatcatatattgtagtgactggaatcccatgaatgacttgagagcccttcagagggtcagcatggagtcacagtctgaacctgtgcctatttttcgtttgtactcgtcttttacagtggaggaaaaagctcttattcttgcaaagcatgaccatattttggatagtaatattgtgaatataacccctagcctgagccattgtctgctcagttggggcgcatcatttctcttcaatagacttgaggagttgcagcaacatagctactcaaatgtctctggtgatgagcttttcatggataatgtagatttggagtttttgacaaaattactcagcaaggttgaactcagaactgaatcaggcaatacagccatatcacaagcttatctgtgtggatctttctattctagggctattgttgtagcgggtgagagggagggaattccatcagttgatggtgacctgccaaagttctgggcctactggttaagtttacttaatgggaggtctcctcagtggcagtatatatctgagccagtacaaagaagccgtagaaagataaataacatggaacaacaattgaaaaacacagacaaacagttgaaaataactactgaagaaactgatgaagccagagtaaagcgtagaagaattggtgaaatcatggattcatctgcaatagactcacctggcaaaaacaaggacaccatattgccaggaaacaataccccacctagttctcatcaaatatcagttgaagatacatggcaggaactagagcgaagcaatcttcatgccacacaaaaaggtctacacgttcaactcaagccagagatttcgaagttatataagttgctgcaactgccggagaaggtgaaatccttatgtgaggaatttcttgagtatattttgaagaatcaccaaatcagccaggagcctaagggcatactgcatgcattcaatttggctctggaaccttcaagtgacgaccttagaagtactgaccatgttgaggagaacacagttggctcacaaatacagggtggtacaagcaaacatttaggtgatgctgcaatggaagttgaaactggaaacaggaacactgctttggctgattcacctcactttgacaaaccagctttgactgctccatccaggcaggcaacattgctggtttctcgagaaaccgagatgctgagcaatcttgtggaccaatgtgcacaacagagtttagtgtcagcacaacctttgcaggatgagtcggaacaagcagatttgtctagtgcagcatcaactcaacccttgcaatctgagaggcaacaattaatctctgtttccaataatctgcttgaaagagcacagcttgatcagagtcaaccaaattatcagacagatgcggcacctggttgtgcgcagtctacagaactctttccagtgacgtcaatgatgtttaatcacgcacctattgattctgaaccactgaaaaatgagttgcacaaattacgattacacatggacacactcaataaagtccatgaaatgaagaaaacccaacttcagaccgcatgtagccaagaactagagaaggtaaagagaaaatatgatttgttaattaaagaacatgattccactcatcttcagcaaaagaaggcacttggtgatttttatgagaaagttcagcgcaaccaatcgctggctgaggattttcgggccaaattcatatcactgtctgcagcacaaggtgcagcaaaaggccatacccctccagttcgtcacacacctcaggctacccaagtggtgtcctccacatcatcaattgccctgtcatcagcttgtcgaccaccagtgccgaggcctagggttcaagctccacaggtggaccaaccattattgtcattgtcgcagttctcccgtccgtctttgcaagtggtccaacctcccaacctggaactaggcaatcttttcagagcaacgtcaacgactcttagtcatatgccacctcaacgtgggagctatggagttcagagtgaattggctcctcgctcacctgctcctcatcttcagttcagatcgccacgggcacattccatggcacctggaaatcagcagcaatcgccagcaattagtgtggatgcaatgtcctcaaggacacaaccagtgctggcggcaagcacatccccatcagatatacatgtgggacccctagcagcctcagccttgtcaagtttacactctgttctcccttcaacctcattaccctcaagcttgcatcctagtcacctggcacaacgtgtgccaccaactcctaacccaactttacaagccggggcaccgaaaggctcgaatgcaacaatgccttccatccctacaggcatgcagctgccagattctggttccctatcgctggatgcatggcttacagctaatcttgggttgaatgatgcgtctacagctcctgctaaggatacagccagtcttgggttgagcagtgatgcccctagggcagctcctgatacaaatacggccagtcttgggttgagcagtgatgtgcctaggggtacggctcctgctacaaatacagccagtcttgggttgagcagtgatgtgcctaggggaacgactcctgctacaactacaaccagtcttgggttgatcagtgattcacctagggtgattgctcctgccagcagtaattcgcctggggcgattgcttctgctacaaatggtggttccgagatagatgtggtatgcctgtcagatgatgaatgatgctagcacgtgtacaaggctgacagttatagatgactgcttgaaaggactaggcattattttacggctcccttgagtccgttctgacaaggtgggaatgttgtttgtgctgtgaatggctggtaacagcaatgacagttttattaagttcattgtaaatgtgtattatgacaaatgcctgccaacgtttgctgtaaatcgctaacctctggggaatgtggatattaacctctgagatggagttgggtttcaagcgctatgaggtttctgtacatgtttgtcattgattagttccctgaggtgttcgttgtaggccggagtgctagctccgtgtatcgttttggttctacgtatgtttcttttttttagtttgacttaaaaaaacagtagcaacaaaaaacagtagcaacatctccatgatagttattatgtataataaatgctgaaattttcttgtatatatttgattgaaacggcgggagtatgtaacagagcaatttagaccaaggcggtcacttcaacgttgtattgtatttctcttcttggtgaaatacggcagcactgtcctatgttaagttttatatctatatagctagctat

SEQ ID NO: 79758 - DNA, 7805 bp, Zea Mays
caccatccgatcacgcctttctccgtcttcctttggtcggtggggtcgactccgcctcctcacccgcaaaacccctcgtgttcgcgagacgatcagacgaggcggtcagggagggggaggtagaatagggtttcggcagggccgtgccgggccgcctcctgctgaccttcctcctccagcgccgtgcaagcactcccgtccctgccaagccctagctagggtagctggtgcagcggattccaggacccacaaatctcttcttctcaacccattgccggtggagcgtggctgtggcctcgggttgttggggttcgggctcgccggcgattttgggggacgagttcgctgccggtgccgcgggcgggggcgtgattcgcacctcggaggaacaaacggttgaactgacccaggtgttgatctgctgctgctactactgatccatggctaatacccggtcaggaggaggaggagatgcccctccccccccttcttctcctccagctgctgcttctgcaactgccacaaggaagcttgccgatggaagggagaccaggaacaccgcagctgccagtgctcacacaccaaacctcaggaggtccactcgagaaaacaaaggaaagcacaaatctagacttgctgacacaccaccccttcacagatctgctaaaacgcccaccaaggatgccactgcaattgctacccccaaatccacacccttgccaaacaaccccaaagactcaacaaaaaagccctccagagttaggaacacaagtgtttcaccttctccttcaaaacaagaacctaatgaaacctcaacgcccgcctccaccaaaagaaaaacccaagatgatgctctgactgcctctacaccgtccaagaagcagaaaaggctcctgcatgcgaagagctacattgcactcttcaatataggagaagaatctgtgcttgctaccctcagggaggatgaggaaaaagcttctgaggtgcaaccggaaggagatggtgctgttttggtgcatgaagaaagtaatgcaccggaacaacccaaccaggaagcttcaaatgttgttgctagtgaggtcttgggaggtcactcttctgacttgcatgaaattgaggtgatattggagggagatggattgaagattggatcccatcagtctgatgttgttttagagcgttgcattcttactgagacgcgctcactaaataaggcagtggaaagcatccccatgttggaaactggagagcaagctactggtggttcaaaccagaaacctctactagaattgccaaatagcgcttgctctactgctcatcatgaagaggccagcaagtcggtggaagatggtaattctattgggattcaaggtgcatgcacttcaaggaatactgaagctatccaatgtgatgaaacatggtatgatgacaacatttgtgttgtttgcagaagtagggaaatctcagatatcctgaagtcttgtggtggaaaaggatgtaaacgacattaccatctttcgtgtatggatccttccttggacgtgtccctaggaatatggctttgcataatgtgtatgaaaaagaggattcagtttggtgtatattcagtcagcgagggaattgaatctttatgggatgtcaaggaaggagtggtgaacagcaagcaatatttcgttaagtataaaaatcttgctcatgtacataaccagtgggtttcagaaagtgatatagttgatagcaccccgcaaggttctgatcttatctccaaagttagcaagaagattcataaagaaaagacaataaggtggaagcaggaatgggctgaaccacaccgtctgttgaagagaagattgcttatgcctcaaaaagaagccgaagttttttttaattcactaggtgataaatttgtatactgtaatgtcgagtggctagtgaaatggaaggatctgggctatgaacatgctacatgggaactcgagtcctcatcctttttatgtactcctgaggccgaggagcttaaaaggagctatgaggaccgctttaaaactgcaagaaaagcatctgatccttcaaaagtagacaaggctaagggggggatatttcagcaactcgagagactgccagatggttgccctcctggtttagacgatgaccatttgagatcacttaaccagcttcgtgagttctggcacaattcttgtggtgctattttcatcgatgatcaggagcgagtaattaagaccattctttttgtggcatccatactgcctcacatctgtcaaccactcctcattgtgtctactactactactctctccttgtgggagactaaattcaatcgcttggcagcatccatcaatgttgttgtgtacaatggagagaaagatgtacgcaaatcaatacaagatctggagttttatcaggatggttctgtgatgttgcaagttctcttgtcccaccctgatgccatcttagaggacatcgaagtgattgaacgaattaactgggaagcagttatagtcgatgattgccaaaactctagagtttcaaaatggcttgaacaacttaggagacttcctaccaattttaggatggttctattgagttcctcactaaaggaaagtattgctgagcacatcagtctgctgtcttttctcaaccctgaagaaaatggtacattgagtgtttcaaatggtgtttcttttgatacagctggcactctagttgttctgaaagaaaaacttgcacgttatgttgcctttgagcggaagacagattcatcaaagcttttagagtattgggttcctgcccgcctttcaccagtgcaactagagatgtactgttacatattactatcaaactccccagcccttagatcacattctaaaacagatagtgttggtgctcttcgcaacattcttatatctcttcggaagtgttgtgatcacccttatcttgttgatcaatcgctgcaaagcacacttaccaaggatcaccctgtaactgatatccttgatattggagtgcgttcatgtggcaagttgctgcttcttgacagaatgctccaacagatcaggattcaaggtcttagagttcttattctttcgcagtctggtggtgaatctggcaagcctatgggtgacattttggatgactttgttcgtcagagatttggttatgagtcatatgaacgtgttgaacgtggattgctactgcaaaagaaacagacagcaatgaatatgttcaatgacaaaactaaggggcgatttatttttttaattgatagtcgtgcatgtggtccaagcatcaaactatcatctgttgatgccatcatcatatattgtagtgactggaatcccatgaatgacttgagagcccttcagagggtcagcatggagtcacagtctgaacctgtgcctatttttcgtttgtactcgtcttttacagtggaggaaaaagctcttattcttgcaaagcatgaccatattttggatagtaatattgtgaatataacccctagcctgagccattgtctgctcagttggggcgcatcatttctcttcaatagacttgaggagttgcagcaacatagctactcaaatgtctctggtgatgagcttttcatggataatgtagatttggagtttttgacaaaattactcagcaaggttgaactcagaactgaatcaggcaatacagccatatcacaagcttatctgtgtggatctttctattctagggctattgttgtagcgggtgagagggagggaattccatcagttgatggtgacctgccaaagttctgggcctactggttaagtttacttaatgggaggtctcctcagtggcagtatatatctgagccagtacaaagaagccgtagaaagataaataacatggaacaacaattgaaaaacacagacaaacagttgaaaataactactgaagaaactgatgaagccagagtaaagcgtagaagaattggtgaaatcatggattcatctgcaatagactcacctggcaaaaacaaggacaccatattgccaggaaacaataccccacctagttctcatcaaatatcagttgaagatacatggcaggaactagagcgaagcaatcttcatgccacacaaaaaggtctacacgttcaactcaagccagagatttcgaagttatataagttgctgcaactgccggagaaggtgaaatccttatgtgaggaatttcttgagtatattttgaagaatcaccaaatcagccaggagcctaagggcatactgcatgcattcaatttggctctgtgttggcgtgctgcttctctctcaaagcataagatcaatcacacagaatcactcgcacttgctgtaaaaaacttaaactatgagtgcaaagaagaacttgttgattttgtttatgggaagctaaagatccttaagaagaagtttgcacgtagagcaggggaagtgagcaagcaaaactatatggtttcagtgagcgacatatcaacttgtgaacaggtcacttctgttagattgagaaatgatgagttagtccctagccaggtaactttaactgatggtaactttgagaatggttcacatcacgaggctacaggtgacttttggaccgaggagatggtttcgggagagaaagaactgctacctgacccagtaactcatgaaggggaacacttattgagggatgaacttctcagcaaaataatggacaaaagaattaaattagttgacaaagttttctctctgagaggaaggagtatctatgataagcattcaaatcaggtttcatttttagacatgcataggcaaaaggtagtggataaactcagaagagcatgcagtttagttgtggagcatctacgtagtagtcaaaatcacattgctcaagaggacagagatgggaaaataaagctaataattgaatggtttactatgctgctgtatgcttttctggaacacatgaaatgccaacgtaacaggcttgatatgcagcaatcagcttccaggatcaaggagtctcaattgaaggaagaaacccttcaggcagcaagatgtggccaattagatcaaaattttgatcaacatattccttcaccagattttgaatttgctatggaagaatttaggcacttcagggaagtagttggtagctgctatgttgatccagctgctctggtaccagagtctttggatgacaattcagcaatggaaattatgttggttcaaagcgcaactgatgctgaagtcatcgaagaagtgctaaatcgacctactgaagttcttgttcaaggtccagcatcagaagttgttggtccatcagttgatgtgatttgcaattgttctgatggcatcaactcccaaagagatgcatctctggctgttcattcattggaaccttcaagtgacgaccttagaagtactgaccatgttgaggagaacacagttggctcacaaatacagggtggtacaagcaaacatttaggtgatgctgcaatggaagttgaaactggaaacaggaacactgctttggctgattcacctcactttgacaaaccagctttgactgctccatccaggcaggcaacattgctggtttctcgagaaaccgagatgctgagcaatcttgtggaccaatgtgcacaacagagtttagtgtcagcacaacctttgcaggatgagtcggaacaagcagatttgtctagtgcagcatcaactcaacccttgcaatctgagaggcaacaattaatctctgtttccaataatctgcttgaaagagcacagcttgatcagagtcaaccaaattatcagacagatgcggcacctggttgtgcgcagtctacagaactctttccagtgacgtcaatgatgtttaatcacgcacctattgattctgaaccactgaaaaatgagttgcacaaattacgattacacatggacacactcaataaagtccatgaaatgaagaaaacccaacttcagaccgcatgtagccaagaactagagaaggtaaagagaaaatatgatttgttaattaaagaacatgattccactcatcttcagcaaaagaaggcacttggtgatttttatgagaaagttcagcgcaaccaatcgctggctgaggattttcgggccaaattcatatcactgtctgcagcacaaggtgcagcaaaaggccatacccctccagttcgtcacacacctcaggctacccaagtggtgtcctccacatcatcaattgccctgtcatcagcttgtcgaccaccagtgccgaggcctagggttcaagctccacaggtggaccaaccattattgtcattgtcgcagttctcccgtccgtctttgcaagtggtccaacctcccaacctggaactaggcaatcttttcagagcaacgtcaacgactcttagtcatatgccacctcaacgtgggagctatggagttcagagtgaattggctcctcgctcacctgctcctcatcttcagttcagatcgccacgggcacattccatggcacctggaaatcagcagcaatcgccagcaattagtgtggatgcaatgtcctcaaggacacaaccagtgctggcggcaagcacatccccatcagatatacatgtgggacccctagcagcctcagccttgtcaagtttacactctgttctcccttcaacctcattaccctcaagcttgcatcctagtcacctggcacaacgtgtgccaccaactcctaacccaactttacaagccggggcaccgaaaggctcgaatgcaacaatgccttccatccctacaggcatgcagctgccagattctggttccctatcgctggatgcatggcttacagctaatcttgggttgaatgatgcgtctacagctcctgctaaggatacagccagtcttgggttgagcagtgatgcccctagggcagctcctgatacaaatacggccagtcttgggttgagcagtgatgtgcctaggggtacggctcctgctacaaatacagccagtcttgggttgagcagtgatgtgcctaggggaacgactcctgctacaactacaaccagtcttgggttgatcagtgattcacctagggtgattgctcctgccagcagtaattcgcctggggcgattgcttctgctacaaatggtggttccgagatagatgtggtatgcctgtcagatgatgaatgatgctagcacgtgtacaaggctgacagttatagatgactgcttgaaaggactaggcattattttacggctcccttgagtccgttctgacaaggtgggaatgttgtttgtgctgtgaatggctggtaacagcaatgacagttttattaagttcattgtaaatgtgtattatgacaaatgcctgccaacgtttgctgtaaatcgctaacctctggggaatgtggatattaacctctgagatggagttgggtttcaagcgctatgaggtttctgtacatgtttgtcattgattagttccctgaggtgttcgttgtaggccggagtgctagctccgtgtatcgttttggttctacgtatgtttcttttttttagtttgacttaaaaaaacagtagcaacaaaaaacagtagcaacatctccatgatagttattatgtataataaatgctgaaattttcttgtatatatttgattgaaacggcgggagtatgtaacagagcaatttagaccaaggcggtcacttcaacgttgtattgtatttctcttcttggtgaaatacggcagcactgtcctatgttaagttttatatctatatagctagctat

SEQ ID NO: 79759 - DNA, 6593 bp, Zea Mays
ccgatcacgcctttctccgtcttcctttggtcggtggggtcgactccgcctcctcacccgcaaaacccctcgtgttcgcgagacgatcagacgaggcggtcagggagggggaggtagaatagggtttcggcagggccgtgccgggccgcctcctgctgaccttcctcctccagcgccgtgcaagcactcccgtccctgccaagccctagctagggtagctggtgcagcggattccaggacccacaaatctcttcttctcaacccattgccggtggagcgtggctgaggtagtggcctcgggttgttggggttcgggctcgccggcgattttgggggacgagttcgctgccggtgccgcgggcgggggcgtgattcgcacctcggaggaacaaacggttgaactgacccaggtgttgatctgctgctgctactactgatccatggctaatacccggtcaggaggaggaggagatgcccctccccccccttcttctcctccagctgctgcttctgcaactgccacaaggaagcttgccgatggaagggagaccaggaacaccgcagctgccagtgctcacacaccaaacctcaggaggtccactcgagaaaacaaaggaaagcacaaatctagacttgctgacacaccaccccttcacagatctgctaaaacgcccaccaaggatgccactgcaattgctacccccaaatccacacccttgccaaacaaccccaaagactcaacaaaaaagccctccagagttaggaacacaagtgtttcaccttctccttcaaaacaagaacctaatgaaacctcaacgcccgcctccaccaaaagaaaaacccaagatgatgctctgactgcctctacaccgtccaagaagcagaaaaggctcctgcatgcgaagagctacattgcactcttcaatataggagaagaatctgtgcttgctaccctcagggaggatgaggaaaaagcttctgaggtgcaaccggaaggagatggtgctgttttggtgcatgaagaaagtaatgcaccggaacaacccaaccaggaagcttcaaatgttgttgctagtgaggtcttgggaggtcactcttctgacttgcatgaaattgaggtgatattggagggagatggattgaagattggatcccatcagtctgatgttgttttagagcgttgcattcttactgagacgcgctcactaaataaggcagtggaaagcatccccatgttggaaactggagagcaagctactggtggttcaaaccagaaacctctactagaattgccaaatagcgcttgctctactgctcatcatgaagaggccagcaagtcggtggaagatggtaattctattgggattcaaggtgcatgcacttcaaggaatactgaagctatccaatgtgatgaaacatggtatgatgacaacatttgtgttgtttgcagaagtagggaaatctcagatatcctgaagtcttgtggtggaaaaggatgtaaacgacattaccatctttcgtgtatggatccttccttggacgtgtccctaggaatatggctttgcataatgtgtatgaaaaagaggattcagtttggtgtatattcagtcagcgagggaattgaatctttatgggatgtcaaggaaggagtggtgaacagcaagcaatatttcgttaagtataaaaatcttgctcatgtacataaccagtgggtttcagaaagtgatatagttgatagcaccccgcaaggttctgatcttatctccaaagttagcaagaagattcataaagaaaagacaataaggtggaagcaggaatgggctgaaccacaccgtctgttgaagagaagattgcttatgcctcaaaaagaagccgaagttttttttaattcactaggtgataaatttgtatactgtaatgtcgagtggctagtgaaatggaaggatctgggctatgaacatgctacatgggaactcgagtcctcatcctttttatgtactcctgaggccgaggagcttaaaaggagctatgaggaccgctttaaaactgcaagaaaagcatctgatccttcaaaagtagacaaggctaagggggggatatttcagcaactcgagagactgccagatggttgccctcctggtttagacgatgaccatttgagatcacttaaccagcttcgtgagttctggcacaattcttgtggtgctattttcatcgatgatcaggagcgagtaattaagaccattctttttgtggcatccatactgcctcacatctgtcaaccactcctcattgtgtctactactactactctctccttgtgggagactaaattcaatcgcttggcagcatccatcaatgttgttgtgtacaatggagagaaagatgtacgcaaatcaatacaagatctggagttttatcaggatggttctgtgatgttgcaagttctcttgtcccaccctgatgccatcttagaggacatcgaagtgattgaacgaattaactgggaagcagttatagtcgatgattgccaaaactctagagtttcaaaatggcttgaacaacttaggagacttcctaccaattttaggatggttctattgagttcctcactaaaggaaagtattgctgagcacatcagtctgctgtcttttctcaaccctgaagaaaatggtacattgagtgtttcaaatggtgtttcttttgatacagctggcactctagttgttctgaaagaaaaacttgcacgttatgttgcctttgagcggaagacagattcatcaaagcttttagagtattgggttcctgcccgcctttcaccagtgcaactagagatgtactgttacatattactatcaaactccccagcccttagatcacattctaaaacagatagtgttggtgctcttcgcaacattcttatatctcttcggaagtgttgtgatcacccttatcttgttgatcaatcgctgcaaagcacacttaccaaggatcaccctgtaactgatatccttgatattggagtgcgttcatgtggcaagttgctgcttcttgacagaatgctccaacagatcaggattcaaggtcttagagttcttattctttcgcagtctggtggtgaatctggcaagcctatgggtgacattttggatgactttgttcgtcagagatttggttatgagtcatatgaacgtgttgaacgtggattgctactgcaaaagaaacagacagcaatgaatatgttcaatgacaaaactaaggggcgatttatttttttaattgatagtcgtgcatgtggtccaagcatcaaactatcatctgttgatgccatcatcatatattgtagtgactggaatcccatgaatgacttgagagcccttcagagggtcagcatggagtcacagtctgaacctgtgcctatttttcgtttgtactcgtcttttacagtggaggaaaaagctcttattcttgcaaagcatgaccatattttggatagtaatattgtgaatataacccctagcctgagccattgtctgctcagttggggcgcatcatttctcttcaatagacttgaggagttgcagcaacatagctactcaaatgtctctggtgatgagcttttcatggataatgtagatttggagtttttgacaaaattactcagcaaggttgaactcagaactgaatcaggcaatacagccatatcacaagcttatctgtgtggatctttctattctagggctattgttgtagcgggtgagagggagggaattccatcagttgatggtgacctgccaaagttctgggcctactggttaagtttacttaatgggaggtctcctcagtggcagtatatatctgagccagtacaaagaagccgtagaaagataaataacatggaacaacaattgaaaaacacagacaaacagttgaaaataactactgaagaaactgatgaagccagagtaaagcgtagaagaattggtgaaatcatggattcatctgcaatagactcacctggcaaaaacaaggacaccatattgccaggaaacaataccccacctagttctcatcaaatatcagttgaagatacatggcaggaactagagcgaagcaatcttcatgccacacaaaaaggtctacacgttcaactcaagccagagatttcgaagttatataagttgctgcaactgccggaaccttcaagtgacgaccttagaagtactgaccatgttgaggagaacacagttggctcacaaatacagggtggtacaagcaaacatttaggtgatgctgcaatggaagttgaaactggaaacaggaacactgctttggctgattcacctcactttgacaaaccagctttgactgctccatccaggcaggcaacattgctggtttctcgagaaaccgagatgctgagcaatcttgtggaccaatgtgcacaacagagtttagtgtcagcacaacctttgcaggatgagtcggaacaagcagatttgtctagtgcagcatcaactcaacccttgcaatctgagaggcaacaattaatctctgtttccaataatctgcttgaaagagcacagcttgatcagagtcaaccaaattatcagacagatgcggcacctggttgtgcgcagtctacagaactctttccagtgacgtcaatgatgtttaatcacgcacctattgattctgaaccactgaaaaatgagttgcacaaattacgattacacatggacacactcaataaagtccatgaaatgaagaaaacccaacttcagaccgcatgtagccaagaactagagaaggtaaagagaaaatatgatttgttaattaaagaacatgattccactcatcttcagcaaaagaaggcacttggtgatttttatgagaaagttcagcgcaaccaatcgctggctgaggattttcgggccaaattcatatcactgtctgcagcacaaggtgcagcaaaaggccatacccctccagttcgtcacacacctcaggctacccaagtggtgtcctccacatcatcaattgccctgtcatcagcttgtcgaccaccagtgccgaggcctagggttcaagctccacaggtggaccaaccattattgtcattgtcgcagttctcccgtccgtctttgcaagtggtccaacctcccaacctggaactaggcaatcttttcagagcaacgtcaacgactcttagtcatatgccacctcaacgtgggagctatggagttcagagtgaattggctcctcgctcacctgctcctcatcttcagttcagatcgccacgggcacattccatggcacctggaaatcagcagcaatcgccagcaattagtgtggatgcaatgtcctcaaggacacaaccagtgctggcggcaagcacatccccatcagatatacatgtgggacccctagcagcctcagccttgtcaagtttacactctgttctcccttcaacctcattaccctcaagcttgcatcctagtcacctggcacaacgtgtgccaccaactcctaacccaactttacaagccggggcaccgaaaggctcgaatgcaacaatgccttccatccctacaggcatgcagctgccagattctggttccctatcgctggatgcatggcttacagctaatcttgggttgaatgatgcgtctacagctcctgctaaggatacagccagtcttgggttgagcagtgatgcccctagggcagctcctgatacaaatacggccagtcttgggttgagcagtgatgtgcctaggggtacggctcctgctacaaatacagccagtcttgggttgagcagtgatgtgcctaggggaacgactcctgctacaactacaaccagtcttgggttgatcagtgattcacctagggtgattgctcctgccagcagtaattcgcctggggcgattgcttctgctacaaatggtggttccgagatagatgtggtatgcctgtcagatgatgaatgatgctagcacgtgtacaaggctgacagttatagatgactgcttgaaaggactaggcattattttacggctcccttgagtccgttctgacaaggtgggaatgttgtttgtgctgtgaatggctggtaacagcaatgacagttttattaagttcattgtaaatgtgtattatgacaaatgcctgccaacgtttgctgtaaatcgctaacctctggggaatgtggatattaacctctgagatggagttgggtttcaagcgctatgaggtttctgtacatgtttgtcattgattagttccctgaggtgttcgttgtaggccggagtgctagctccgtgtatcgttttggttctacgtatgtttcttttttttagtttgacttaaaaaaacagtagcaacaaaaaacagtagcaacatctccatgatagttattatgtataataaatgctgaaattttcttgtatatatttgattgaaacggcgggagtatgtaacagagcaatttagaccaaggcggtcacttcaacgttgtattgtatttctcttcttggtgaaatacggcagcactgtcctatgttaagttttatatctatatagctagctat

SEQ ID NO: 79760 - DNA, 7670 bp, Zea Mays
cgcctttctccgtcttcctttggtcggtggggtcgactccgcctcctcacccgcaaaacccctcgtgttcgcgagacgatcagacgaggcggtcagggagggggaggtagaatagggtttcggcagggccgtgccgggccgcctcctgctgaccttcctcctccagcgccgtgcaagcactcccgtccctgccaagccctagctagggtagctggtgcagcggattccaggacccacaaatctcttcttctcaacccattgccggtggagcgtggctgaggtagtggcctcgggttgttggggttcgggctcgccggcgattttgggggacgagttcgctgccggtgccgcgggcgggggcgtgattcgcacctcggaggaacaaacggttgaactgacccaggtgttgatctgctgctgctactactgatccatggctaatacccggtcaggaggaggaggagatgcccctccccccccttcttctcctccagctgctgcttctgcaactgccacaaggaagcttgccgatggaagggagaccaggaacaccgcagctgccagtgctcacacaccaaacctcaggaggtccactcgagaaaacaaaggaaagcacaaatctagacttgctgacacaccaccccttcacagatctgctaaaacgcccaccaaggatgccactgcaattgctacccccaaatccacacccttgccaaacaaccccaaagactcaacaaaaaagccctccagagttaggaacacaagtgtttcaccttctccttcaaaacaagaacctaatgaaacctcaacgcccgcctccaccaaaagaaaaacccaagatgatgctctgactgcctctacaccgtccaagaagcagaaaaggctcctgcatgcgaagagctacattgcactcttcaatataggagaagaatctgtgcttgctaccctcagggaggatgaggaaaaagcttctgaggtgcaaccggaaggagatggtgctgttttggtgcatgaagaaagtaatgcaccggaacaacccaaccaggaagcttcaaatgttgttgctagtgaggtcttgggaggtcactcttctgacttgcatgaaattgaggtgatattggagggagatggattgaagattggatcccatcagtctgatgttgttttagagcgttgcattcttactgagacgcgctcactaaataaggcagtggaaagcatccccatgttggaaactggagagcaagctactggtggttcaaaccagaaacctctactagaattgccaaatagcgcttgctctactgctcatcatgaagaggccagcaagtcggtggaagatggtaattctattgggattcaaggtgcatgcacttcaaggaatactgaagctatccaatgtgatgaaacatggtcttgtggtggaaaaggatgtaaacgacattaccatctttcgtgtatggatccttccttggacgtgtccctaggaatatggctttgcataatgtgtatgaaaaagaggattcagtttggtgtatattcagtcagcgagggaattgaatctttatgggatgtcaaggaaggagtggtgaacagcaagcaatatttcgttaagtataaaaatcttgctcatgtacataaccagtgggtttcagaaagtgatatagttgatagcaccccgcaaggttctgatcttatctccaaagttagcaagaagattcataaagaaaagacaataaggtggaagcaggaatgggctgaaccacaccgtctgttgaagagaagattgcttatgcctcaaaaagaagccgaagttttttttaattcactaggtgataaatttgtatactgtaatgtcgagtggctagtgaaatggaaggatctgggctatgaacatgctacatgggaactcgagtcctcatcctttttatgtactcctgaggccgaggagcttaaaaggagctatgaggaccgctttaaaactgcaagaaaagcatctgatccttcaaaagtagacaaggctaagggggggatatttcagcaactcgagagactgccagatggttgccctcctggtttagacgatgaccatttgagatcacttaaccagcttcgtgagttctggcacaattcttgtggtgctattttcatcgatgatcaggagcgagtaattaagaccattctttttgtggcatccatactgcctcacatctgtcaaccactcctcattgtgtctactactactactctctccttgtgggagactaaattcaatcgcttggcagcatccatcaatgttgttgtgtacaatggagagaaagatgtacgcaaatcaatacaagatctggagttttatcaggatggttctgtgatgttgcaagttctcttgtcccaccctgatgccatcttagaggacatcgaagtgattgaacgaattaactgggaagcagttatagtcgatgattgccaaaactctagagtttcaaaatggcttgaacaacttaggagacttcctaccaattttaggatggttctattgagttcctcactaaaggaaagtattgctgagcacatcagtctgctgtcttttctcaaccctgaagaaaatggtacattgagtgtttcaaatggtgtttcttttgatacagctggcactctagttgttctgaaagaaaaacttgcacgttatgttgcctttgagcggaagacagattcatcaaagcttttagagtattgggttcctgcccgcctttcaccagtgcaactagagatgtactgttacatattactatcaaactccccagcccttagatcacattctaaaacagatagtgttggtgctcttcgcaacattcttatatctcttcggaagtgttgtgatcacccttatcttgttgatcaatcgctgcaaagcacacttaccaaggatcaccctgtaactgatatccttgatattggagtgcgttcatgtggcaagttgctgcttcttgacagaatgctccaacagatcaggattcaaggtcttagagttcttattctttcgcagtctggtggtgaatctggcaagcctatgggtgacattttggatgactttgttcgtcagagatttggttatgagtcatatgaacgtgttgaacgtggattgctactgcaaaagaaacagacagcaatgaatatgttcaatgacaaaactaaggggcgatttatttttttaattgatagtcgtgcatgtggtccaagcatcaaactatcatctgttgatgccatcatcatatattgtagtgactggaatcccatgaatgacttgagagcccttcagagggtcagcatggagtcacagtctgaacctgtgcctatttttcgtttgtactcgtcttttacagtggaggaaaaagctcttattcttgcaaagcatgaccatattttggatagtaatattgtgaatataacccctagcctgagccattgtctgctcagttggggcgcatcatttctcttcaatagacttgaggagttgcagcaacatagctactcaaatgtctctggtgatgagcttttcatggataatgtagatttggagtttttgacaaaattactcagcaagggctattgttgtagcgggtgagagggagggaattccatcagttgatggtgacctgccaaagttctgggcctactggttaagtttacttaatgggaggtctcctcagtggcagtatatatctgagccagtacaaagaagccgtagaaagataaataacatggaacaacaattgaaaaacacagacaaacagttgaaaataactactgaagaaactgatgaagccagagtaaagcgtagaagaattggtgaaatcatggattcatctgcaatagactcacctggcaaaaacaaggacaccatattgccaggaaacaataccccacctagttctcatcaaatatcagttgaagatacatggcaggaactagagcgaagcaatcttcatgccacacaaaaaggtctacacgttcaactcaagccagagatttcgaagttatataagttgctgcaactgccggagaaggtgaaatccttatgtgaggaatttcttgagtatattttgaagaatcaccaaatcagccaggagcctaagggcatactgcatgcattcaatttggctctgtgttggcgtgctgcttctctctcaaagcataagatcaatcacacagaatcactcgcacttgctgtaaaaaacttaaactatgagtgcaaagaagaacttgttgattttgtttatgggaagctaaagatccttaagaagaagtttgcacgtagagcaggggaagtgagcaagcaaaactatatggtttcagtgagcgacatatcaacttgtgaacaggtcacttctgttagattgagaaatgatgagttagtccctagccaggtaactttaactgatggtaactttgagaatggttcacatcacgaggctacaggtgacttttggaccgaggagatggtttcgggagagaaagaactgctacctgacccagtaactcatgaaggggaacacttattgagggatgaacttctcagcaaaataatggacaaaagaattaaattagttgacaaagttttctctctgagaggaaggagtatctatgataagcattcaaatcaggtttcatttttagacatgcataggcaaaaggtagtggataaactcagaagagcatgcagtttagttgtggagcatctacgtagtagtcaaaatcacattgctcaagaggacagagatgggaaaataaagctaataattgaatggtttactatgctgctgtatgcttttctggaacacatgaaatgccaacgtaacaggcttgatatgcagcaatcagcttccaggatcaaggagtctcaattgaaggaagaaacccttcaggcagcaagatgtggccaattagatcaaaattttgatcaacatattccttcaccagattttgaatttgctatggaagaatttaggcacttcagggaagtagttggtagctgctatgttgatccagctgctctggtaccagagtctttggatgacaattcagcaatggaaattatgttggttcaaagcgcaactgatgctgaagtcatcgaagaagtgctaaatcgacctactgaagttcttgttcaaggtccagcatcagaagttgttggtccatcagttgatgtgatttgcaattgttctgatggcatcaactcccaaagagatgcatctctggctgttcattcattggaaccttcaagtgacgaccttagaagtactgaccatgttgaggagaacacagttggctcacaaatacagggtggtacaagcaaacatttaggtgatgctgcaatggaagttgaaactggaaacaggaacactgctttggctgattcacctcactttgacaaaccagctttgactgctccatccaggcaggcaacattgctggtttctcgagaaaccgagatgctgagcaatcttgtggaccaatgtgcacaacagagtttagtgtcagcacaacctttgcaggatgagtcggaacaagcagatttgtctagtgcagcatcaactcaacccttgcaatctgagaggcaacaattaatctctgtttccaataatctgcttgaaagagcacagcttgatcagagtcaaccaaattatcagacagatgcggcacctggttgtgcgcagtctacagaactctttccagtgacgtcaatgatgtttaatcacgcacctattgattctgaaccactgaaaaatgagttgcacaaattacgattacacatggacacactcaataaagtccatgaaatgaagaaaacccaacttcagaccgcatgtagccaagaactagagaaggtaaagagaaaatatgatttgttaattaaagaacatgattccactcatcttcagcaaaagaaggcacttggtgatttttatgagaaagttcagcgcaaccaatcgctggctgaggattttcgggccaaattcatatcactgtctgcagcacaaggtgcagcaaaaggccatacccctccagttcgtcacacacctcaggctacccaagtggtgtcctccacatcatcaattgccctgtcatcagcttgtcgaccaccagtgccgaggcctagggttcaagctccacaggtggaccaaccattattgtcattgtcgcagttctcccgtccgtctttgcaagtggtccaacctcccaacctggaactaggcaatcttttcagagcaacgtcaacgactcttagtcatatgccacctcaacgtgggagctatggagttcagagtgaattggctcctcgctcacctgctcctcatcttcagttcagatcgccacgggcacattccatggcacctggaaatcagcagcaatcgccagcaattagtgtggatgcaatgtcctcaaggacacaaccagtgctggcggcaagcacatccccatcagatatacatgtgggacccctagcagcctcagccttgtcaagtttacactctgttctcccttcaacctcattaccctcaagcttgcatcctagtcacctggcacaacgtgtgccaccaactcctaacccaactttacaagccggggcaccgaaaggctcgaatgcaacaatgccttccatccctacaggcatgcagctgccagattctggttccctatcgctggatgcatggcttacagctaatcttgggttgaatgatgcgtctacagctcctgctaaggatacagccagtcttgggttgagcagtgatgcccctagggcagctcctgatacaaatacggccagtcttgggttgagcagtgatgtgcctaggggtacggctcctgctacaaatacagccagtcttgggttgagcagtgatgtgcctaggggaacgactcctgctacaactacaaccagtcttgggttgatcagtgattcacctagggtgattgctcctgccagcagtaattcgcctggggcgattgcttctgctacaaatggtggttccgagatagatgtggtatgcctgtcagatgatgaatgatgctagcacgtgtacaaggctgacagttatagatgactgcttgaaaggactaggcattattttacggctcccttgagtccgttctgacaaggtgggaatgttgtttgtgctgtgaatggctggtaacagcaatgacagttttattaagttcattgtaaatgtgtattatgacaaatgcctgccaacgtttgctgtaaatcgctaacctctggggaatgtggatattaacctctgagatggagttgggtttcaagcgctatgaggtttctgtacatgtttgtcattgattagttccctgaggtgttcgttgtaggccggagtgctagctccgtgtatcgttttggttctacgtatgtttcttttttttagtttgacttaaaaaaacagtagcaacaaaaaacagtagcaacatctccatgatagttattatgtataataaatgctgaaattttcttgtatatatttgattgaaacggcgggagtatgtaacagagcaatttagaccaaggcggtcacttcaacgttgtattgtatttctcttcttggtgaaatacggcagcactgtcctatgttaagttttatatctatatagctagctat

SEQ ID NO: 79761 - DNA, 6539 bp, Zea Mays
cgcctttctccgtcttcctttggtcggtggggtcgactccgcctcctcacccgcaaaacccctcgtgttcgcgagacgatcagacgaggcggtcagggagggggaggtagaatagggtttcggcagggccgtgccgggccgcctcctgctgaccttcctcctccagcgccgtgcaagcactcccgtccctgccaagccctagctagggtagctggtgcagcggattccaggacccacaaatctcttcttctcaacccattgccggtggagcgtggctgaggtagtggcctcgggttgttggggttcgggctcgccggcgattttgggggacgagttcgctgccggtgccgcgggcgggggcgtgattcgcacctcggaggaacaaacggttgaactgacccaggtgttgatctgctgctgctactactgatccatggctaatacccggtcaggaggaggaggagatgcccctccccccccttcttctcctccagctgctgcttctgcaactgccacaaggaagcttgccgatggaagggagaccaggaacaccgcagctgccagtgctcacacaccaaacctcaggaggtccactcgagaaaacaaaggaaagcacaaatctagacttgctgacacaccaccccttcacagatctgctaaaacgcccaccaaggatgccactgcaattgctacccccaaatccacacccttgccaaacaaccccaaagactcaacaaaaaagccctccagagttaggaacacaagtgtttcaccttctccttcaaaacaagaacctaatgaaacctcaacgcccgcctccaccaaaagaaaaacccaagatgatgctctgactgcctctacaccgtccaagaagcagaaaaggctcctgcatgcgaagagctacattgcactcttcaatataggagaagaatctgtgcttgctaccctcagggaggatgaggaaaaagcttctgaggtgcaaccggaaggagatggtgctgttttggtgcatgaagaaagtaatgcaccggaacaacccaaccaggaagcttcaaatgttgttgctagtgaggtcttgggaggtcactcttctgacttgcatgaaattgaggtgatattggagggagatggattgaagattggatcccatcagtctgatgttgttttagagcgttgcattcttactgagacgcgctcactaaataaggcagtggaaagcatccccatgttggaaactggagagcaagctactggtggttcaaaccagaaacctctactagaattgccaaatagcgcttgctctactgctcatcatgaagaggccagcaagtcggtggaagatggtaattctattgggattcaaggtgcatgcacttcaaggaatactgaagctatccaatgtgatgaaacatggtatgatgacaacatttgtgttgtttgcagaagtagggaaatctcagatatcctgaagtcttgtggtggaaaaggatgtaaacgacattaccatctttcgtgtatggatccttccttggacgtgtccctaggaatatggctttgcataatgtgtatgaaaaagaggattcagtttggtgtatattcagtcagcgagggaattgaatctttatgggatgtcaaggaaggagtggtgaacagcaagcaatatttcgttaagtataaaaatcttgctcatgtacataaccagtgggtttcagaaagtgatatagttgatagcaccccgcaaggttctgatcttatctccaaagttagcaagaagattcataaagaaaagacaataaggtggaagcaggaatgggctgaaccacaccgtctgttgaagagaagattgcttatgcctcaaaaagaagccgaagttttttttaattcactaggtgataaatttgtatactgtaatgtcgagtggctagtgaaatggaaggatctgggctatgaacatgctacatgggaactcgagtcctcatcctttttatgtactcctgaggccgaggagcttaaaaggagctatgaggaccgctttaaaactgcaagaaaagcatctgatccttcaaaagtagacaaggctaagggggggatatttcagcaactcgagagactgccagatggttgccctcctggtttagacgatgaccatttgagatcacttaaccagcttcgagcgagtaattaagaccattctttttgtggcatccatactgcctcacatctgtcaaccactcctcattgtgtctactactactactctctccttgtgggagactaaattcaatcgcttggcagcatccatcaatgttgttgtgtacaatggagagaaagatgtacgcaaatcaatacaagatctggagttttatcaggatggttctgtgatgttgcaagttctcttgtcccaccctgatgccatcttagaggacatcgaagtgattgaacgaattaactgggaagcagttatagtcgatgattgccaaaactctagagtttcaaaatggcttgaacaacttaggagacttcctaccaattttaggatggttctattgagttcctcactaaaggaaagtattgctgagcacatcagtctgctgtcttttctcaaccctgaagaaaatggtacattgagtgtttcaaatggtgtttcttttgatacagctggcactctagttgttctgaaagaaaaacttgcacgttatgttgcctttgagcggaagacagattcatcaaagcttttagagtattgggttcctgcccgcctttcaccagtgcaactagagatgtactgttacatattactatcaaactccccagcccttagatcacattctaaaacagatagtgttggtgctcttcgcaacattcttatatctcttcggaagtgttgtgatcacccttatcttgttgatcaatcgctgcaaagcacacttaccaaggatcaccctgtaactgatatccttgatattggagtgcgttcatgtggcaagttgctgcttcttgacagaatgctccaacagatcaggattcaaggtcttagagttcttattctttcgcagtctggtggtgaatctggcaagcctatgggtgacattttggatgactttgttcgtcagagatttggttatgagtcatatgaacgtgttgaacgtggattgctactgcaaaagaaacagacagcaatgaatatgttcaatgacaaaactaaggggcgatttatttttttaattgatagtcgtgcatgtggtccaagcatcaaactatcatctgttgatgccatcatcatatattgtagtgactggaatcccatgaatgacttgagagcccttcagagggtcagcatggagtcacagtctgaacctgtgcctatttttcgtttgtactcgtcttttacagtggaggaaaaagctcttattcttgcaaagcatgaccatattttggatagtaatattgtgaatataacccctagcctgagccattgtctgctcagttggggcgcatcatttctcttcaatagacttgaggagttgcagcaacatagctactcaaatgtctctggtgatgagcttttcatggataatgtagatttggagtttttgacaaaattactcagcaaggttgaactcagaactgaatcaggcaatacagccatatcacaagcttatctgtgtggatctttctattctagggctattgttgtagcgggtgagagggagggaattccatcagttgatggtgacctgccaaagttctgggcctactggttaagtttacttaatgggaggtctcctcagtggcagtatatatctgagccagtacaaagaagccgtagaaagataaataacatggaacaacaattgaaaaacacagacaaacagttgaaaataactactgaagaaactgatgaagccagagtaaagcgtagaagaattggtgaaatcatggattcatctgcaatagactcacctggcaaaaacaaggacaccatattgccaggaaacaataccccacctagttctcatcaaatatcagttgaagatacatggcaggaactagagcgaagcaatcttcatgccacacaaaaaggtctacacgttcaactcaagccagagatttcgaagttatataagttgctgcaactgccggaaccttcaagtgacgaccttagaagtactgaccatgttgaggagaacacagttggctcacaaatacagggtggtacaagcaaacatttaggtgatgctgcaatggaagttgaaactggaaacaggaacactgctttggctgattcacctcactttgacaaaccagctttgactgctccatccaggcaggcaacattgctggtttctcgagaaaccgagatgctgagcaatcttgtggaccaatgtgcacaacagagtttagtgtcagcacaacctttgcaggatgagtcggaacaagcagatttgtctagtgcagcatcaactcaacccttgcaatctgagaggcaacaattaatctctgtttccaataatctgcttgaaagagcacagcttgatcagagtcaaccaaattatcagacagatgcggcacctggttgtgcgcagtctacagaactctttccagtgacgtcaatgatgtttaatcacgcacctattgattctgaaccactgaaaaatgagttgcacaaattacgattacacatggacacactcaataaagtccatgaaatgaagaaaacccaacttcagaccgcatgtagccaagaactagagaaggtaaagagaaaatatgatttgttaattaaagaacatgattccactcatcttcagcaaaagaaggcacttggtgatttttatgagaaagttcagcgcaaccaatcgctggctgaggattttcgggccaaattcatatcactgtctgcagcacaaggtgcagcaaaaggccatacccctccagttcgtcacacacctcaggctacccaagtggtgtcctccacatcatcaattgccctgtcatcagcttgtcgaccaccagtgccgaggcctagggttcaagctccacaggtggaccaaccattattgtcattgtcgcagttctcccgtccgtctttgcaagtggtccaacctcccaacctggaactaggcaatcttttcagagcaacgtcaacgactcttagtcatatgccacctcaacgtgggagctatggagttcagagtgaattggctcctcgctcacctgctcctcatcttcagttcagatcgccacgggcacattccatggcacctggaaatcagcagcaatcgccagcaattagtgtggatgcaatgtcctcaaggacacaaccagtgctggcggcaagcacatccccatcagatatacatgtgggacccctagcagcctcagccttgtcaagtttacactctgttctcccttcaacctcattaccctcaagcttgcatcctagtcacctggcacaacgtgtgccaccaactcctaacccaactttacaagccggggcaccgaaaggctcgaatgcaacaatgccttccatccctacaggcatgcagctgccagattctggttccctatcgctggatgcatggcttacagctaatcttgggttgaatgatgcgtctacagctcctgctaaggatacagccagtcttgggttgagcagtgatgcccctagggcagctcctgatacaaatacggccagtcttgggttgagcagtgatgtgcctaggggtacggctcctgctacaaatacagccagtcttgggttgagcagtgatgtgcctaggggaacgactcctgctacaactacaaccagtcttgggttgatcagtgattcacctagggtgattgctcctgccagcagtaattcgcctggggcgattgcttctgctacaaatggtggttccgagatagatgtggtatgcctgtcagatgatgaatgatgctagcacgtgtacaaggctgacagttatagatgactgcttgaaaggactaggcattattttacggctcccttgagtccgttctgacaaggtgggaatgttgtttgtgctgtgaatggctggtaacagcaatgacagttttattaagttcattgtaaatgtgtattatgacaaatgcctgccaacgtttgctgtaaatcgctaacctctggggaatgtggatattaacctctgagatggagttgggtttcaagcgctatgaggtttctgtacatgtttgtcattgattagttccctgaggtgttcgttgtaggccggagtgctagctccgtgtatcgttttggttctacgtatgtttcttttttttagtttgacttaaaaaaacagtagcaacaaaaaacagtagcaacatctccatgatagttattatgtataataaatgctgaaattttcttgtatatatttgattgaaacggcgggagtatgtaacagagcaatttagaccaaggcggtcacttcaacgttgtattgtatttctcttcttggtgaaatacggcagcactgtcctatgttaagttttatatctatatagctagctat

SEQ ID NO: 79762 - DNA, 7751 bp, Zea Mays
cgcctttctccgtcttcctttggtcggtggggtcgactccgcctcctcacccgcaaaacccctcgtgttcgcgagacgatcagacgaggcggtcagggagggggaggtagaatagggtttcggcagggccgtgccgggccgcctcctgctgaccttcctcctccagcgccgtgcaagcactcccgtccctgccaagccctagctagggtagctggtgcagcggattccaggacccacaaatctcttcttctcaacccattgccggtggagcgtggctgaggtagtggcctcgggttgttggggttcgggctcgccggcgattttgggggacgagttcgctgccggtgccgcgggcgggggcgtgattcgcacctcggaggaacaaacggttgaactgacccaggtgttgatctgctgctgctactactgatccatggctaatacccggtcaggaggaggaggagatgcccctccccccccttcttctcctccagctgctgcttctgcaactgccacaaggaagcttgccgatggaagggagaccaggaacaccgcagctgccagtgctcacacaccaaacctcaggaggtccactcgagaaaacaaaggaaagcacaaatctagacttgctgacacaccaccccttcacagatctgctaaaacgcccaccaaggatgccactgcaattgctacccccaaatccacacccttgccaaacaaccccaaagactcaacaaaaaagccctccagagttaggaacacaagtgtttcaccttctccttcaaaacaagaacctaatgaaacctcaacgcccgcctccaccaaaagaaaaacccaagatgatgctctgactgcctctacaccgtccaagaagcagaaaaggctcctgcatgcgaagagctacattgcactcttcaatataggagaagaatctgtgcttgctaccctcagggaggatgaggaaaaagcttctgaggtgcaaccggaaggagatggtgctgttttggtgcatgaagaaagtaatgcaccggaacaacccaaccaggaagcttcaaatgttgttgctagtgaggtcttgggaggtcactcttctgacttgcatgaaattgaggtgatattggagggagatggattgaagattggatcccatcagtctgatgttgttttagagcgttgcattcttactgagacgcgctcactaaataaggcagtggaaagcatccccatgttggaaactggagagcaagctactggtggttcaaaccagaaacctctactagaattgccaaatagcgcttgctctactgctcatcatgaagaggccagcaagtcggtggaagatggtaattctattgggattcaaggtgcatgcacttcaaggaatactgaagctatccaatgtgatgaaacatggtatgatgacaacatttgtgttgtttgcagaagtagggaaatctcagatatcctgaagtcttgtggtggaaaaggatgtaaacgacattaccatctttcgtgtatggatccttccttggacgtgtccctaggaatatggctttgcataatgtgtatgaaaaagaggattcagtttggtgtatattcagtcagcgagggaattgaatctttatgggatgtcaaggaaggagtggtgaacagcaagcaatatttcgttaagtataaaaatcttgctcatgtacataaccagtgggtttcagaaagtgatatagttgatagcaccccgcaaggttctgatcttatctccaaagttagcaagaagattcataaagaaaagacaataaggtggaagcaggaatgggctgaaccacaccgtctgttgaagagaagattgcttatgcctcaaaaagaagccgaagttttttttaattcactaggtgataaatttgtatactgtaatgtcgagtggctagtgaaatggaaggatctgggctatgaacatgctacatgggaactcgagtcctcatcctttttatgtactcctgaggccgaggagcttaaaaggagctatgaggaccgctttaaaactgcaagaaaagcatctgatccttcaaaagtagacaaggctaagggggggatatttcagcaactcgagagactgccagatggttgccctcctggtttagacgatgaccatttgagatcacttaaccagcttcgagcgagtaattaagaccattctttttgtggcatccatactgcctcacatctgtcaaccactcctcattgtgtctactactactactctctccttgtgggagactaaattcaatcgcttggcagcatccatcaatgttgttgtgtacaatggagagaaagatgtacgcaaatcaatacaagatctggagttttatcaggatggttctgtgatgttgcaagttctcttgtcccaccctgatgccatcttagaggacatcgaagtgattgaacgaattaactgggaagcagttatagtcgatgattgccaaaactctagagtttcaaaatggcttgaacaacttaggagacttcctaccaattttaggatggttctattgagttcctcactaaaggaaagtattgctgagcacatcagtctgctgtcttttctcaaccctgaagaaaatggtacattgagtgtttcaaatggtgtttcttttgatacagctggcactctagttgttctgaaagaaaaacttgcacgttatgttgcctttgagcggaagacagattcatcaaagcttttagagtattgggttcctgcccgcctttcaccagtgcaactagagatgtactgttacatattactatcaaactccccagcccttagatcacattctaaaacagatagtgttggtgctcttcgcaacattcttatatctcttcggaagtgttgtgatcacccttatcttgttgatcaatcgctgcaaagcacacttaccaaggatcaccctgtaactgatatccttgatattggagtgcgttcatgtggcaagttgctgcttcttgacagaatgctccaacagatcaggattcaaggtcttagagttcttattctttcgcagtctggtggtgaatctggcaagcctatgggtgacattttggatgactttgttcgtcagagatttggttatgagtcatatgaacgtgttgaacgtggattgctactgcaaaagaaacagacagcaatgaatatgttcaatgacaaaactaaggggcgatttatttttttaattgatagtcgtgcatgtggtccaagcatcaaactatcatctgttgatgccatcatcatatattgtagtgactggaatcccatgaatgacttgagagcccttcagagggtcagcatggagtcacagtctgaacctgtgcctatttttcgtttgtactcgtcttttacagtggaggaaaaagctcttattcttgcaaagcatgaccatattttggatagtaatattgtgaatataacccctagcctgagccattgtctgctcagttggggcgcatcatttctcttcaatagacttgaggagttgcagcaacatagctactcaaatgtctctggtgatgagcttttcatggataatgtagatttggagtttttgacaaaattactcagcaaggttgaactcagaactgaatcaggcaatacagccatatcacaagcttatctgtgtggatctttctattctagggctattgttgtagcgggtgagagggagggaattccatcagttgatggtgacctgccaaagttctgggcctactggttaagtttacttaatgggaggtctcctcagtggcagtatatatctgagccagtacaaagaagccgtagaaagataaataacatggaacaacaattgaaaaacacagacaaacagttgaaaataactactgaagaaactgatgaagccagagtaaagcgtagaagaattggtgaaatcatggattcatctgcaatagactcacctggcaaaaacaaggacaccatattgccaggaaacaataccccacctagttctcatcaaatatcagttgaagatacatggcaggaactagagcgaagcaatcttcatgccacacaaaaaggtctacacgttcaactcaagccagagatttcgaagttatataagttgctgcaactgccggagaaggtgaaatccttatgtgaggaatttcttgagtatattttgaagaatcaccaaatcagccaggagcctaagggcatactgcatgcattcaatttggctctgtgttggcgtgctgcttctctctcaaagcataagatcaatcacacagaatcactcgcacttgctgtaaaaaacttaaactatgagtgcaaagaagaacttgttgattttgtttatgggaagctaaagatccttaagaagaagtttgcacgtagagcaggggaagtgagcaagcaaaactatatggtttcagtgagcgacatatcaacttgtgaacaggtcacttctgttagattgagaaatgatgagttagtccctagccaggtaactttaactgatggtaactttgagaatggttcacatcacgaggctacaggtgacttttggaccgaggagatggtttcgggagagaaagaactgctacctgacccagtaactcatgaaggggaacacttattgagggatgaacttctcagcaaaataatggacaaaagaattaaattagttgacaaagttttctctctgagaggaaggagtatctatgataagcattcaaatcaggtttcatttttagacatgcataggcaaaaggtagtggataaactcagaagagcatgcagtttagttgtggagcatctacgtagtagtcaaaatcacattgctcaagaggacagagatgggaaaataaagctaataattgaatggtttactatgctgctgtatgcttttctggaacacatgaaatgccaacgtaacaggcttgatatgcagcaatcagcttccaggatcaaggagtctcaattgaaggaagaaacccttcaggcagcaagatgtggccaattagatcaaaattttgatcaacatattccttcaccagattttgaatttgctatggaagaatttaggcacttcagggaagtagttggtagctgctatgttgatccagctgctctggtaccagagtctttggatgacaattcagcaatggaaattatgttggttcaaagcgcaactgatgctgaagtcatcgaagaagtgctaaatcgacctactgaagttcttgttcaaggtccagcatcagaagttgttggtccatcagttgatgtgatttgcaattgttctgatggcatcaactcccaaagagatgcatctctggctgttcattcattggaaccttcaagtgacgaccttagaagtactgaccatgttgaggagaacacagttggctcacaaatacagggtggtacaagcaaacatttaggtgatgctgcaatggaagttgaaactggaaacaggaacactgctttggctgattcacctcactttgacaaaccagctttgactgctccatccaggcaggcaacattgctggtttctcgagaaaccgagatgctgagcaatcttgtggaccaatgtgcacaacagagtttagtgtcagcacaacctttgcaggatgagtcggaacaagcagatttgtctagtgcagcatcaactcaacccttgcaatctgagaggcaacaattaatctctgtttccaataatctgcttgaaagagcacagcttgatcagagtcaaccaaattatcagacagatgcggcacctggttgtgcgcagtctacagaactctttccagtgacgtcaatgatgtttaatcacgcacctattgattctgaaccactgaaaaatgagttgcacaaattacgattacacatggacacactcaataaagtccatgaaatgaagaaaacccaacttcagaccgcatgtagccaagaactagagaaggtaaagagaaaatatgatttgttaattaaagaacatgattccactcatcttcagcaaaagaaggcacttggtgatttttatgagaaagttcagcgcaaccaatcgctggctgaggattttcgggccaaattcatatcactgtctgcagcacaaggtgcagcaaaaggccatacccctccagttcgtcacacacctcaggctacccaagtggtgtcctccacatcatcaattgccctgtcatcagcttgtcgaccaccagtgccgaggcctagggttcaagctccacaggtggaccaaccattattgtcattgtcgcagttctcccgtccgtctttgcaagtggtccaacctcccaacctggaactaggcaatcttttcagagcaacgtcaacgactcttagtcatatgccacctcaacgtgggagctatggagttcagagtgaattggctcctcgctcacctgctcctcatcttcagttcagatcgccacgggcacattccatggcacctggaaatcagcagcaatcgccagcaattagtgtggatgcaatgtcctcaaggacacaaccagtgctggcggcaagcacatccccatcagatatacatgtgggacccctagcagcctcagccttgtcaagtttacactctgttctcccttcaacctcattaccctcaagcttgcatcctagtcacctggcacaacgtgtgccaccaactcctaacccaactttacaagccggggcaccgaaaggctcgaatgcaacaatgccttccatccctacaggcatgcagctgccagattctggttccctatcgctggatgcatggcttacagctaatcttgggttgaatgatgcgtctacagctcctgctaaggatacagccagtcttgggttgagcagtgatgcccctagggcagctcctgatacaaatacggccagtcttgggttgagcagtgatgtgcctaggggtacggctcctgctacaaatacagccagtcttgggttgagcagtgatgtgcctaggggaacgactcctgctacaactacaaccagtcttgggttgatcagtgattcacctagggtgattgctcctgccagcagtaattcgcctggggcgattgcttctgctacaaatggtggttccgagatagatgtggtatgcctgtcagatgatgaatgatgctagcacgtgtacaaggctgacagttatagatgactgcttgaaaggactaggcattattttacggctcccttgagtccgttctgacaaggtgggaatgttgtttgtgctgtgaatggctggtaacagcaatgacagttttattaagttcattgtaaatgtgtattatgacaaatgcctgccaacgtttgctgtaaatcgctaacctctggggaatgtggatattaacctctgagatggagttgggtttcaagcgctatgaggtttctgtacatgtttgtcattgattagttccctgaggtgttcgttgtaggccggagtgctagctccgtgtatcgttttggttctacgtatgtttcttttttttagtttgacttaaaaaaacagtagcaacaaaaaacagtagcaacatctccatgatagttattatgtataataaatgctgaaattttcttgtatatatttgattgaaacggcgggagtatgtaacagagcaatttagaccaaggcggtcacttcaacgttgtattgtatttctcttcttggtgaaatacggcagcactgtcctatgttaagttttatatctatatagctagctat

SEQ ID NO: 79763 - DNA, 5685 bp, Zea Mays
atttagccatcatgcatgaaaaaggagcgagtaattaagaccattctttttgtggcatccatactgcctcacatctgtcaaccactcctcattgtgtctactactactactctctccttgtgggagactaaattcaatcgcttggcagcatccatcaatgttgttgtgtacaatggagagaaagatgtacgcaaatcaatacaagatctggagttttatcaggatggttctgtgatgttgcaagttctcttgtcccaccctgatgccatcttagaggacatcgaagtgattgaacgaattaactgggaagcagttatagtcgatgattgccaaaactctagagtttcaaaatggcttgaacaacttaggagacttcctaccaattttaggatggttctattgagttcctcactaaaggaaagtattgctgagcacatcagtctgctgtcttttctcaaccctgaagaaaatggtacattgagtgtttcaaatggtgtttcttttgatacagctggcactctagttgttctgaaagaaaaacttgcacgttatgttgcctttgagcggaagacagattcatcaaagcttttagagtattgggttcctgcccgcctttcaccagtgcaactagagatgtactgttacatattactatcaaactccccagcccttagatcacattctaaaacagatagtgttggtgctcttcgcaacattcttatatctcttcggaagtgttgtgatcacccttatcttgttgatcaatcgctgcaaagcacacttaccaaggatcaccctgtaactgatatccttgatattggagtgcgttcatgtggcaagttgctgcttcttgacagaatgctccaacagatcaggattcaaggtcttagagttcttattctttcgcagtctggtggtgaatctggcaagcctatgggtgacattttggatgactttgttcgtcagagatttggttatgagtcatatgaacgtgttgaacgtggattgctactgcaaaagaaacagacagcaatgaatatgttcaatgacaaaactaaggggcgatttatttttttaattgatagtcgtgcatgtggtccaagcatcaaactatcatctgttgatgccatcatcatatattgtagtgactggaatcccatgaatgacttgagagcccttcagagggtcagcatggagtcacagtctgaacctgtgcctatttttcgtttgtactcgtcttttacagtggaggaaaaagctcttattcttgcaaagcatgaccatattttggatagtaatattgtgaatataacccctagcctgagccattgtctgctcagttggggcgcatcatttctcttcaatagacttgaggagttgcagcaacatagctactcaaatgtctctggtgatgagcttttcatggataatgtagatttggagtttttgacaaaattactcagcaaggttgaactcagaactgaatcaggcaatacagccatatcacaagcttatctgtgtggatctttctattctagggctattgttgtagcgggtgagagggagggaattccatcagttgatggtgacctgccaaagttctgggcctactggttaagtttacttaatgggaggtctcctcagtggcagtatatatctgagccagtacaaagaagccgtagaaagataaataacatggaacaacaattgaaaaacacagacaaacagttgaaaataactactgaagaaactgatgaagccagagtaaagcgtagaagaattggtgaaatcatggattcatctgcaatagactcacctggcaaaaacaaggacaccatattgccaggaaacaataccccacctagttctcatcaaatatcagttgaagatacatggcaggaactagagcgaagcaatcttcatgccacacaaaaaggtctacacgttcaactcaagccagagatttcgaagttatataagttgctgcaactgccggagaaggtgaaatccttatgtgaggaatttcttgagtatattttgaagaatcaccaaatcagccaggagcctaagggcatactgcatgcattcaatttggctctggttagataaaattttttttttgtttttattttaatcatgtttgctgctaaatgcttttgttttgtattgttcttgcttcagtgttggcgtgctgcttctctctcaaagcataagatcaatcacacagaatcactcgcacttgctgtaaaaaacttaaactatgagtgcaaagaagaacttgttgattttgtttatgggaagctaaagatccttaagaagaagtttgcacgtagagcaggggaagtgagcaagcaaaactatatggtttcagtgagcgacatatcaacttgtgaacaggtcacttctgttagattgagaaatgatgagttagtccctagccaggtaactttaactgatggtaactttgagaatggttcacatcacgaggctacaggtgacttttggaccgaggagatggtttcgggagagaaagaactgctacctgacccagtaactcatgaaggggaacacttattgagggatgaacttctcagcaaaataatggacaaaagaattaaattagttgacaaagttttctctctgagaggaaggagtatctatgataagcattcaaatcaggtttcatttttagacatgcataggcaaaaggtagtggataaactcagaagagcatgcagtttagttgtggagcatctacgtagtagtcaaaatcacattgctcaagaggacagagatgggaaaataaagctaataattgaatggtttactatgctgctgtatgcttttctggaacacatgaaatgccaacgtaacaggcttgatatgcagcaatcagcttccaggatcaaggagtctcaattgaaggaagaaacccttcaggcagcaagatgtggccaattagatcaaaattttgatcaacatattccttcaccagattttgaatttgctatggaagaatttaggcacttcagggaagtagttggtagctgctatgttgatccagctgctctggtaccagagtctttggatgacaattcagcaatggaaattatgttggttcaaagcgcaactgatgctgaagtcatcgaagaagtgctaaatcgacctactgaagttcttgttcaaggtccagcatcagaagttgttggtccatcagttgatgtgatttgcaattgttctgatggcatcaactcccaaagagatgcatctctggctgttcattcattggaaccttcaagtgacgaccttagaagtactgaccatgttgaggagaacacagttggctcacaaatacagggtggtacaagcaaacatttaggtgatgctgcaatggaagttgaaactggaaacaggaacactgctttggctgattcacctcactttgacaaaccagctttgactgctccatccaggcaggcaacattgctggtttctcgagaaaccgagatgctgagcaatcttgtggaccaatgtgcacaacagagtttagtgtcagcacaacctttgcaggatgagtcggaacaagcagatttgtctagtgcagcatcaactcaacccttgcaatctgagaggcaacaattaatctctgtttccaataatctgcttgaaagagcacagcttgatcagagtcaaccaaattatcagacagatgcggcacctggttgtgcgcagtctacagaactctttccagtgacgtcaatgatgtttaatcacgcacctattgattctgaaccactgaaaaatgagttgcacaaattacgattacacatggacacactcaataaagtccatgaaatgaagaaaacccaacttcagaccgcatgtagccaagaactagagaaggtaaagagaaaatatgatttgttaattaaagaacatgattccactcatcttcagcaaaagaaggcacttggtgatttttatgagaaagttcagcgcaaccaatcgctggctgaggattttcgggccaaattcatatcactgtctgcagcacaaggtgcagcaaaaggccatacccctccagttcgtcacacacctcaggctacccaagtggtgtcctccacatcatcaattgccctgtcatcagcttgtcgaccaccagtgccgaggcctagggttcaagctccacaggtggaccaaccattattgtcattgtcgcagttctcccgtccgtctttgcaagtggtccaacctcccaacctggaactaggcaatcttttcagagcaacgtcaacgactcttagtcatatgccacctcaacgtgggagctatggagttcagagtgaattggctcctcgctcacctgctcctcatcttcagttcagatcgccacgggcacattccatggcacctggaaatcagcagcaatcgccagcaattagtgtggatgcaatgtcctcaaggacacaaccagtgctggcggcaagcacatccccatcagatatacatgtgggacccctagcagcctcagccttgtcaagtttacactctgttctcccttcaacctcattaccctcaagcttgcatcctagtcacctggcacaacgtgtgccaccaactcctaacccaactttacaagccggggcaccgaaaggctcgaatgcaacaatgccttccatccctacaggcatgcagctgccagattctggttccctatcgctggatgcatggcttacagctaatcttgggttgaatgatgcgtctacagctcctgctaaggatacagccagtcttgggttgagcagtgatgcccctagggcagctcctgatacaaatacggccagtcttgggttgagcagtgatgtgcctaggggtacggctcctgctacaaatacagccagtcttgggttgagcagtgatgtgcctaggggaacgactcctgctacaactacaaccagtcttgggttgatcagtgattcacctagggtgattgctcctgccagcagtaattcgcctggggcgattgcttctgctacaaatggtggttccgagatagatgtggtatgcctgtcagatgatgaatgatgctagcacgtgtacaaggctgacagttatagatgactgcttgaaaggactaggcattattttacggctcccttgagtccgttctgacaaggtgggaatgttgtttgtgctgtgaatggctggtaacagcaatgacagttttattaagttcattgtaaatgtgtattatgacaaatgcctgccaacgtttgctgtaaatcgctaacctctggggaatgtggatattaacctctgagatggagttgggtttcaagcgctatgaggtttctgtacatgtttgtcattgattagttccctgaggtgttcgttgtaggccggagtgctagctccgtgtatcgttttggttctacgtatgtttcttttttttagtttgacttaaaaaaacagtagcaacaaaaaacagtagcaacatctccatgatagttattatgtataataaatgctgaaattttcttgtatatatttgattgaaacggcgggagtatgtaacagagcaatttagaccaaggcggtcacttcaacgttgtattgtatttctcttcttggtgaaatacggcagcactgtcctatgttaagttttatatctatatagctagctat

SEQ ID NO: 79764 - DNA, 652 bp, Zea Mays
gccatctcttgatatccagagttctctggcatatccagagttctctttgcagagttcatgggatatccagagtcacgcctccacacccatgcactctctggcatatccagagttctctttgctgtaatcccatgaacccagccatctcttgatcttttcactgcctatttaagaataaccgagggggaagaagtgggagtaaaggagagatccttacctatgtcatcaaccacggtgtgtagcttcaacatagttttgttgcctccccttacccaaactataccctggacacgcccaaattctctggtcaagtgactcaacgtgtctggtgaccacgtcgccgacgcctcaacctcatactggaggaggagcagagagcaagatggggtccggatctttcctcaaggtgctggccaagaacttcgatgtccttgccgggccagtcatatcacatgcttatcctctatatgcttctgttagagcgatagagacaaaaaatcctgtagatgatcagcagtggctcacttactgggtgttgtactcatttgtcactttgtttgagctaactttggctccaattatcgagtggcttccattttggtcatatgcaaaactgttctttaactactgagagatatattgaacaaaatgg

SEQ ID NO: 79765 - DNA, 803 bp, Zea Mays
cgtaaacattacatgctcaagctcttcgttcctagtccgttgagatcccttccgggattttcgtggtcgctgcaacaaaccaggccgtcatctaaggaccgaccaatctttcctcgtttgtttgccctgaatatataatcgtgccccctcatccatttaacctcagcccgcagccgccaagtcaaccaagccccttcccgccgtctcccacctctagcaaatccccacgctcctctcgatccaatctagccgaccgtcgatctccctagccatggcgtccggccctagctcctagccagggtggccgccatttccctcggcaattcacacgtagtccctgccccttcttccttgctcgaccatgcacccatgcacgcgaacagccctctgctgcagcagccaaagcggtggccgcggcgatgtgccgctactcggacaccagagtacggcaacaacggcaaatggaggtggtggccgcagagatgggcatggaccggctctatgtcatggacggaagcttctgcagcacgatatcaggtaagacagctctcgggcgttcttctttccccgctactggtgaccgtgttctgggaggagatcggaccaccactcccgcatctcacgcttgtcgtgatttggagtcgcggggaactaccagacaacgtgggatctcgggcgcgtgaattcttggtcggggaaacctcgcgggcgtaggcaatcgctcgtcggagtttgaccttcaccctgatccgccccacgtcgcggccagacctcaccgttgctcaatcaccgcgtgaggacac

SEQ ID NO: 79766 - DNA, 686 bp, Zea Mays
aaaggccaggaggggttgtggcaggcggatgacctgatactcatctgcggcacgcatgtccagcacgccgcggccaagacgagcagcaaagcaaaccgtatttgtcccgcggcggcctcttcgtcccgcaaggtcgccccacctagatccggccacgccgcacgttccccttttccgccgcagcgatggtgtacgtggattcctgggacgagttcgtggagcggtccgtgcagctcttccgcgccgaccccaacaccacccgctacgtgatgaagtatcggcactgcgaggggaagctcgtgctcaaggtcactgatgaccgcgagatcaagctcaggacgcaaagaagatggagaagctcaacaacatcttttttgctctgatgactcgtgggcctgatgctgatatcagtgaagtttcagagaagggacaggccgagcaacagcaaccgaagaaaggtcggggaaggagacaatgatgccggtctggttcttatttctttcagaaaattcacaactggaatggtggattgacgtttcattgattattgttgtccgctctgtaatggtactgggaaggaagttttttcagtacagaaccgagaacaaactgaatgcacactatcatgacttcatgattgagaaacgcttaagccctgaatttaaaaaaaattatattccgaattt

SEQ ID NO: 79767 - DNA, 769 bp, Zea Mays
cgatgaagtcgtgatgccagaatggtcaatcgagcagagcaggcggcggcagccccgcacgcgccgcgtccgtgcgcggcggccgaaaaaacgcgcgaggccgcccgcggtccgacgagaccgcggcgggaagagggaagcgatcgacggccggccgggcctagagctagagggcggaggcgaggtgcatcgtctccgccgcgaccgcgacggtgtcggagaaccgctgcagcgcctcgcgcatccacgggtgggggcagcgcgcgatggcctcggcggcggagacccactccctgcggcgcgcggccatctcgggccaccggtccagctccgcggtgacgcgcagcgggagcacgaagccctcgtacgtggcgtcgtagctgcggctgcggtagcaccagcggcccagcgcggggcccgtctcgccgagcacgccggcctcctccgcggcctcgcgccgggccgcctcgtccatggactcgtccagctcccacccgcccttggggatcagcacgccccccgcggggcccttcttctgcgagctgatcaccaggacctccacctcgccgtcgcccccgcgcacgcggtacgggacgcagcccaccaccacgcgcccgcccgtgctcgcgctgtaccgctgcagctcccggccttggcgagacaccataactgctgccatctctgtcggtctctgcctcaaattactcgctccttgtgggagaagggggattctctcaatgggagggaggaggatgagtgggcacggcac

SEQ ID NO: 79768 - DNA, 2140 bp, Zea Mays
caggcctcagcggggtcgtcgggactcgggactcggtcctcggattcggaggcggaccagtgatataccaaacccaggccgcgaaacaaaccagtcgccgacctccctccatccttccctctcaggcacgcagctcgcgtggcattgcgttgcgcggcctgcttctctccggtctccaccgcgccgcgatcgacagcccggccagcgagctcctctcctccgccttctcctcttctaccgctcccgatcacgcggccgcgacatggaggacgacgaggggaagaagcagcaccaacggatcatccccaacgccaacggccacgtcatgatcgtggtccccgacgacgcgcacgcgcacgcgctgcccgcctccgcctccgctcctcctcgtgacgccgacggcccagacgaggagagcggggacgaggaggagcggacgccggcgggggccacgtcctcgctgtggcgagcagcggtgctggcgctcgcggcgctggcgctggcggcggcggcctacgcctgcctgtacgcgggtggggacgacgacgccggcgcggcctggcgcctcttggaggcgcggcggcaggaggacggcggcgacgacgagcacccgggcggccgcacgtccttcctgctgccgctctacccgaagccaccacgccgcggcggcgacgactggccgcagaattccacgttattcccgcactcgctcgccggcaacctcttcccggaagggctatactacaccgctatctctttgggcagtcctccaaggccttattttcttgacgtcgacactgggagccacacaacatgggtccagtgcgacgcgccgccatgcgcgagctgtgcaaagggagctcaccctttatataggcccgcaaggacggcggatgcacttcctgccagcgacccactttgtgaaggagcccagcatgagaacccaaaccagtgcgactatgagatcagctatgccgacggaagctcctccatgggcgtttatgtaagggacagtatgcaattcgtcggcgaagatggtgaaagggagaatgcagacattgtgtttgggtgcgggtacgaccagcagggagttcttttgaacgcactagaaaccaccgacggagttctcggcctgaccaacaaggcactgagccttcctacacagctagccagcagaggtggggaatgacttgggtccctatccgcgatggtccagcagatgatgtacgcagagcccaagtcaagcagataaaccatggggatcaacagctcaatgcgcaagggaagttgactcaagtggtctttgacactgggtccacatacacatatttcccagacgaggcgcttacaagattgatatcttcgctgaaggaggctgcatccccaaggttcgtacaagatgactcggacaaaacacttcctttctgcatgaaatctgattttccagtgaggtctgtggaggatgtgaagcattttttcaagcccttgagtctgcaattcgagaaacggtttttcttctccaggaccttcaacatccgccccgaacattacttggtcatcagtgacaagggcaatgtctgcctcggggtgctcaatgggacaacgatcggttacgattcagtagtaatagtcggagatgtttctcttcgtgggaaattggttgcttacgacaacgataagaatgaggtcgggtgggttgatttcgactgcaccaaccctcgcaaacgaagcaggattccttccttcctgcgacgagcgttgcgcaaccaacttctgtaaatactggctactgtgagactggctatgcttgttcttattacagacgtgctattccgcgtctgaattctgaaactgccatggaaccctcctataatcgtcgctgtaatcgtgtggagggatgtaactacgaggtagtaaaaaagcggttacaggacaggaaatagtggaaaggtagataagcatagatagtatatagtcaaaagaggtcatgtttgctatgttgtagagatctctcactttttaagactaaagtggggaagcataatccatagcagttcatttaaaaaaattggctggagcactgccatgtcatagaggctgggacagttgtgatacttctgattggtattcagtttcatca

SEQ ID NO: 79769 - DNA, 2185 bp, Zea Mays
ggtcctcggattcggaggcggaccagtgatataccaaacccaggccgcgaaacaaaccagtcgccgacctccctccatccttccctctcaggcacgcagctcgcgtggcattgcgttgcgcggcctgcttctctccggtctccaccgcgccgcgatcgacagcccggccagcgagctcctctcctccgccttctcctcttctaccgctcccgatcacgcggccgcgacatggaggacgacgaggggaagaagcagcaccaacggatcatccccaacgccaacggccacgtcatgatcgtggtccccgacgacgcgcacgcgcacgcgctgcccgcctccgcctccgctcctcctcgtgacgccgacggcccagacgaggagagcggggacgaggaggagcggacgccggcgggggccacgtcctcgctgtggcgagcagcggtgctggcgctcgcggcgctggcgctggcggcggcggcctacgcctgcctgtacgcgggtggggacgacgacgccggcgcggcctggcgcctcttggaggcgcggcggcaggaggacggcggcgacgacgagcacccgggcggccgcacgtccttcctgctgccgctctacccgaagccaccacgccgcggcggcgacgactggccgcagaattccacgttattcccgcactcgctcgccggcaacctcttcccggaagggctatactacaccgctatctctttgggcagtcctccaaggccttattttcttgacgtcgacactgggagccacacaacatgggtccagtgcgacgcgccgccatgcgcgagctgtgcaaagggagctcaccctttatataggcccgcaaggacggcggatgcacttcctgccagcgacccactttgtgaaggagcccagcatgagaacccaaaccagtgcgactatgagatcagctatgccgacggaagctcctccatgggcgtttatgtaagggacagtatgcaattcgtcggcgaagatggtgaaagggagaatgcagacattgtgtttgggtgcgggtacgaccagcagggagttcttttgaacgcactagaaaccaccgacggagttctcggcctgaccaacaaggcactgagccttcctacacagctagccagcagaggtatcatttccaatgcgttcggccactgcatgtcgacagatcccagcggtgctggtggttacttgtttcttggcgacgattacattcccaggtggggaatgacttgggtccctatccgcgatggtccagcagaagcccaagtcaagcagataaaccatggggatcaacagctcaatgcgcaagggaagttgactcaagtggtctttgacactgggtccacatacacatatttcccagacgaggcgcttacaagattgatatcttcgctgaaggaggctgcatccccaaggttcgtacaagatgactcggacaaaacacttcctttctgcatgaaatctgattttccagtgaggtctgtggaggatgtgaagcattttttcaagcccttgagtctgcaattcgagaaacggtttttcttctccaggaccttcaacatccgccccgaacattacttggtcatcagtgacaagggcaatgtctgcctcggggtgctcaatgggacaacgatcggttacgattcagtagtaatagtcggagatgtttctcttcgtgggaaattggttgcttacgacaacgataagaatgaggtcgggtgggttgatttcgactgcaccaaccctcgcaaacgaagcaggattccttccttcctgcgacgagcgttgcgcaaccaacttctgtaaatactggctactgtgagactggctatgcttgttcttattacagacgtgctattccgcgtctgaattctgaaactgccatggaaccctcctataatcgtcgctgtaatcgtgtggagggatgtaactacgaggtagtaaaaaagcggttacaggacaggaaatagtggaaaggtagataagcatagatagtatatagtcaaaagaggtcatgtttgctatgttgtagagatctctcactttttaagactaaagtggggaagcataatccatagcagttcatttaaaaaaattggctggagcactgccatgtcatagaggctgggacagttgtgatacttctgattggtattcagtttcatca

SEQ ID NO: 79770 - DNA, 2058 bp, Zea Mays
cggattcggaggcggaccagtgatataccaaacccaggccgcgaaacaaaccagtcgccgacctccctccatccttccctctcaggcacgcagctcgcgtggcattgcgttgcgcggcctgcttctctccggtctccaccgcgccgcgatcgacagcccggccagcgagctcctctcctccgccttctcctcttctaccgctcccgatcacgcggccgcgacatggaggacgacgaggggaagaagcagcaccaacggatcatccccaacgccaacggccacgtcatgatcgtggtccccgacgacgcgcacgcgcacgcgctgcccgcctccgcctccgctcctcctcgtgacgccgacggcccagacgaggagagcggggacgaggaggagcggacgccggcgggggccacgtcctcgctgtggcgagcagcggtgctggcgctcgcggcgctggcgctggcggcggcggcctacgcctgcctgtacgcgggtggggacgacgacgccggcgcggcctggcgcctcttggaggcgcggcggcaggaggacggcggcgacgacgagcacccgggcggccgcacgtccttcctgctgccgctctacccgaagccaccacgccgcggcggcgacgactggccgcagaattccacgttattcccgcactcgctcgccggcaacctcttcccggaagggctatactacaccgctatctctttgggcagtcctccaaggccttattttcttgacgtcgacactgggagccacacaacatgggtccagtgcgacgcgccgccatgcgcgagctgtgcaaagggagctcaccctttatataggcccgcaaggacggcggatgcacttcctgccagcgacccactttgtgaaggagcccagcatgagaacccaaaccagtgcgactatgagatcagctatgccgacggaagctcctccatgggcgtttatgtaagggacagtatgcaattcgtcggcgaagatggtgaaagggagaatgcagacattgtgtttgggtgcgggtacgaccagcagggagttcttttgaacgcactagaaaccaccgacggagttctcggcctgaccaacaaggcactgagccttcctacacagctagccagcagagtgatgtacgcagagcccaagtcaagcagataaaccatggggatcaacagctcaatgcgcaagggaagttgactcaagtggtctttgacactgggtccacatacacatatttcccagacgaggcgcttacaagattgatatcttcgctgaaggaggctgcatccccaaggttcgtacaagatgactcggacaaaacacttcctttctgcatgaaatctgattttccagtgaggtctgtggaggatgtgaagcattttttcaagcccttgagtctgcaattcgagaaacggtttttcttctccaggaccttcaacatccgccccgaacattacttggtcatcagtgacaagggcaatgtctgcctcggggtgctcaatgggacaacgatcggttacgattcagtagtaatagtcggagatgtttctcttcgtgggaaattggttgcttacgacaacgataagaatgaggtcgggtgggttgatttcgactgcaccaaccctcgcaaacgaagcaggattccttccttcctgcgacgagcgttgcgcaaccaacttctgtaaatactggctactgtgagactggctatgcttgttcttattacagacgtgctattccgcgtctgaattctgaaactgccatggaaccctcctataatcgtcgctgtaatcgtgtggagggatgtaactacgaggtagtaaaaaagcggttacaggacaggaaatagtggaaaggtagataagcatagatagtatatagtcaaaagaggtcatgtttgctatgttgtagagatctctcactttttaagactaaagtggggaagcataatccatagcagttcatttaaaaaaattggctggagcactgccatgtcatagaggctgggacagttgtgatacttctgattggtattcagtttcatca

SEQ ID NO: 79771 - DNA, 1021 bp, Zea Mays
tactgtagttgccaaaaaaaacagtgatgtacgcagagcccaagtcaagcagataaaccatggggatcaacagctcaatgcgcaagggaagttgactcaagtggtctttgacactgggtccacatacacatatttcccagacgaggcgcttacaagattgatatcttcggtgagtgtcggttcttctatcgattgatggaatcacaaacaccggtcagttcttatgttttctttctaacttaacagctgaaggaggctgcatccccaaggttcgtacaagatgactcggacaaaacacttcctttctgcatgaaatctgattttccagtgaggtctgtggaggatgtgaagcattttttcaagcccttgagtctgcaattcgagaaacggtttttcttctccaggaccttcaacatccgccccgaacattacttggtcatcagtgacaagggcaatgtctgcctcggggtgctcaatgggacaacgatcggttacgattcagtagtaatagtcggagatgtttctcttcgtgggaaattggttgcttacgacaacgataagaatgaggtcgggtgggttgatttcgactgcaccaaccctcgcaaacgaagcaggattccttccttcctgcgacgagcgttgcgcaaccaacttctgtaaatactggctactgtgagactggctatgcttgttcttattacagacgtgctattccgcgtctgaattctgaaactgccatggaaccctcctataatcgtcgctgtaatcgtgtggagggatgtaactacgaggtagtaaaaaagcggttacaggacaggaaatagtggaaaggtagataagcatagatagtatatagtcaaaagaggtcatgtttgctatgttgtagagatctctcactttttaagactaaagtggggaagcataatccatagcagttcatttaaaaaaattggctggagcactgccatgtcatagaggctgggacagttgtgatacttctgattggtattcagtttcatca

SEQ ID NO: 79772 - DNA, 1149 bp, Zea Mays
gttctcctttatctcccaccactcaaaactctctccatgatcttttcatcgtgtgactgtgtggaggcacttcctcttcaccggtgcctagccatagaactgagcttgtcagtgcactctgctcctctggtgctgctctaggttcagccggcgtcttcgtcacgttgccggtcggcaaagcttgcctaggccccagctgtcgctcaccttgaccgtccccagtttctcccttctctacacagcgcctctgctagctacgtgctcctctcagctacggcaagccatcaaagctcgctggtggctagcactgtagtcccggctcccccacgtcctagccatcgcccactgccaaatcaagttcgtcggccagtcgccggtccgaccatgaacccctgcagactcctccatatccacagcgcgtcattgaccttgccgtgcgccgttgagccttcatctccatgtccgacatctagctcgcgtccatggatgtcatgccgcgccgcgagctcgatctgcgctgccatcgcttcaccgtgctcactggccatgcgcccctgcagctccctgttcggtaaaatgagtggactcgtgctcgtcgtgtgttgggaagatcgacactgcgatgctgattgtttgattttggggagaacgacacacacatggtgttcagtgaatagttcaaaccagatagcctcatcgaaatcacgactccgagtcgattcagacatggtaagctgatccatttgtttcccgttagtatgaggaatgattggatgcgttggattaaattactggtcgtaatgatagtcattatatgctatttttatttaaaaatagggtattaatgtttatgtaatttctggtaataataattaattagacatttttatatgtatatggtaaagtttgggcgacaatgtaatttagatgaggagtgctttggtggtggatacaaatgactaggataatttaattgatttaatattggcgatatgcttgtgatcacaattgtggcgtagacacatcgtgaaacgctcgggtttaaaatacggtttaggcgaaggagatttcggtagaccagtacacgatgttggtgaatcgatgacgttaaaaataggttagtattaaatcagctagccgacgttttcc

SEQ ID NO: 79773 - DNA, 2362 bp, Zea Mays
cgtccatggatgtcatgccgcgccgcgagctcgatctgcgctgccatcgcttcaccgtgctcactggccatgcgcccctgcagctccctgttcggtaaaatgagtggactcgtgctcgtcgtgtgttgggaagatcgacactgcgatgctgattgtttgattttggggagaacgacacacacatggtgttcagtgaatagttcaaaccagatagcctcatcgaaatcacgactccgagtcgattcagacatggcgacgaagaagaagcaaggatccctacagacttcgatgactgtgttagccgccaagatcttgaggcaaacaacaagctcctgaaggagcaaatggaggagacggtccacaagtcagtgcatgatgccttcattgacatgaaccatggcaagacttacgagaggctggatcgacgattgtcccagatcatcgacaggcttgctgtgttggagacgcaacaacaagcaccgccaccgccaccaccacctcctcgtccacgtcttcccgatgatgggtgtttgatgaagaaggtaattatgatgaagcggccactagagatttgcacctacattgccatcttcatcaaaacatagaaggtatgccacactgccagcaaggtaataacaatcgtgctcctgacgacccttatgctaagattaaattttctataccatcttttcgggtcattatgatgctgagggatatcttgattgggagatgacgatagaacagaaatttgctgcccaccttgtacctgaacgacatcaagttagacaagccactagtgaatttaaagtttttgctagtgtctggtggactggtctagttggggatggtagagcacctacgacttgggaagatcttaaggtagctatgcgcgatagatttgttcccccatcttatcatagacaattgcgtaagaaattgatgcgtttagagcaaggggataaatctgttcaagattattatgctgagcttcagaagggattgcagcattgtgggacagtagagggacatgaggacgctctttgtcgtttttatttaggtttgcggcgtgacattcaggacattatggattacaaagaatttaacactgtcaacaagttgttccagtttgctatgcttgcagagacggaattgcagggacgccaacatcgacctagggctacttttggcgcctcctctacatcacggacgcacacacctgcctcgagtcatacaccttcgaccactccagcgtccacgcgacctccctcgacacctgctgcacatgttggtaaccttcctttgcaggtacccaccaagaaacataattcactagcacctgcagcaacttccagtggtcgttcttcgggtattgtttgccaccgctgtcatgggattggtcacgtgaagaaggattgcccgagtcagcgaacatacattgctacggatgatggctacattagtacttccgacgctgagggtgacgatgatgactccagtgatgttgctgccaatgatgatgccatgcttggtgctgatgctatagtgaaccttcgaagcatcatggtgcagcgtgttcttagttctcagcctgaatcatcaaagaagcagcaacaccataatttgttccagactttcttcaccatcgagaatcggcgtgcacatgttattattgatggtggaagctgcaataatttggtgagttcagatttggtcaagaagcttggcctgaccacacgtccacggccacatccatactacattcagtggatcaatgattcaggcaaggttaaggtaacacacatggtacgagtgcatttctccattggtatgtattctgattatgcggattgcgatgtagtacctatggaagcttgttctcttttgttgggtagaccttgggaatatgatactgatgcacgtcaccatggtaggagtaatacttagatgtatctgaggcatagcacaacaggttggaacaaagaacaatggaactagcagaatggcagtaccgtaaatattgtactagcgaggccaaaaaggcactagtaggattcactagtgattttgtttttctttttttgtatgatttttttatatttttctcagcacaagaagcaacaaaataggagctacaccaagtttcacctaaaacagagatcagatgtggtctacagaaaatgaacaagttctctaaaaagcgtgtaagagctttgataattttttctttattttcctgaattttttttgacaattttatcgagaccaaacatttttttggttggcctcagaatggcgtcaccaagctcctgtaaaaattttagattttttgaacaaccgagcgaaaagttatgcctggtttaag

SEQ ID NO: 79774 - DNA, 302 bp, Zea Mays
gctcgatctgcgctgccatcgcttcaccgtgctcactggccatgcgcccctgcagctccctgttcggtaaaatgagtggactcgtgctcgtcgtgtgttgggaagatcgacactgcgatgctgattgtttgattttggggagaacgacacacacatggtgttcagtgaatagttcaaaccagatagcctcatcgaaatcacgactccgagtcgattcagacatggttatagttttgtgctgctgatgatggtgttaagtgccggtgggctcggccttcttataggttaaagtagctctccta

SEQ ID NO: 79775 - DNA, 2279 bp, Zea Mays
attcgagccctgaaatcccaaaagcccaaaccaaatccaagcgcaagagggggcaaagccgcaaagggggaggcaccaggcaccggcagccattacttactggtcctcactcccacaccaaccaaccaacctcctctgcctgccgcttctcctgctgcgggcgggcactgctgcaagtactagaggaggacatccgcttccattactgcgcctgcggaggatcggaggaaccagtagcggaggcttcgattttcggcgggcgcaataaatttcccgcatggctcggagggccgcgtcctcgctcgtctcccgctgcctcctggcgagggcccctgccggcgcgccgcccgctgccccctctgcgccgcgcaggacagatgggatgcacaggctgttgccaggtgtccttcagaggttcagcactgcagcagcagtagaggagcccatcacgccgtcagtccatgtgaactacacaaagctcctcattaatgggaactttgttgattccgcatccggcaagaccttcccaactctggaccctcgtacaggggaggtgattgctcatgtggctgagggtgacgcagaggacattaaccgtgcagtagctgcggctcgcaaggcttttgatgaagggccatggccgaagatgactgcctatgagaggtcccgtatcctactgcggtttgctgatttgatagagaagcacaatgacgagcttgctgctttggagacatgggacaacgggaagccatatgagcaagcagcccagattgaagtacccatggtggcccgtcttatgcgttactatgctggttgggctgataagatccatgggctcattgtgccggctgatggcccacaccatgtacagatcttgcatgagccaattggtgttgcaggtcagatcatcccatggaactttcctcttctgatgtatgcctggaaagttggccctgctttggcatgtggaaatactctcgtgctcaagactgctgaacaaacccctctatcggctttgtatatctccaaattgttgcatgaggctggactacctgagggtgttgtgaatgtcgtttctggttttggccctactgctggtgctgctcttgctagtcacatggatgttgataagatcgcatttactggatctaccgatactggaaaaattattctcgagttggctgcaaagagcaaccttaagacagtgacactggagttaggaggcaagtcccctttcatcataatggacgatgctgatgttgaccatgctgttgagcttgcgcactttgccctgttctttaaccagggacaatgctgctgcgctggatctcgcacgtttgtacatgagcgtgtttatgatgagtttgtggagaaggccaaggctcgtgcattgaagcgcgtcgttggtgatccgttcaggaaaggtgttgaacagggcccgcagattgacgacgagcaattcaacaagatcttgcgctacattaggtatggtgttgacggtggagctacccttgtgacgggtggtgataggttgggtgacaagggtttctacatccagccaacgattttctcagatgtccaggacggcatgaagattgctcaggaggagatatttgggcctgtgcagtcgatcctcaagttcaaagacctcaatgaggttatcaagagggcaaacgcgagccagtatggattggccgccggcgtgttcaccaacagcctggacacggccaacaccctgacgcgcgcgctcagggccgggaccgtctgggtgaactgcttcgacgtcttcgatgctgcgattccgtttggtgggtacaagatgagcggcatcgggagggagaagggcgttgacagcctgaagaactacctgcaggtgaaggcggtcgtcaccccaatcaagaacgccgcgtggttgtagacgctgcaagtgtggccttgtgcacgagaaccacgtatattcatttcctggtcacatccccgaacaatgtgaaggcgttaatcagatagatgacgatgaagaagaacaactataataagatttgccctagcctgggttctcagttatctctaataagttttatggttggtgcctatatattgtgcaatttggttgctcccttttattttgtttctttttgataagactgttctagcaacggatatgcagagttcattatgaaaatgcatttgttagtgtctttgatggttaagtccctaattgtcatcagtgttgattccctagatttggcgaagaatgtaagggaagagaaagattagag

SEQ ID NO: 79776 - DNA, 1970 bp, Zea Mays
ggacaaccatgatctgtttacgtcaagaaattcatgatcaacttagtgaaatgtcaaagtgcctgcagatgggatgcacaggctgttgccaggtgtccttcagaggttcagcactgcagcagcagtagaggagcccatcacgccgtcagtccatgtgaactacacaaagctcctcattaatgggaactttgttgattccgcatccggcaagaccttcccaactctggaccctcgtacaggggaggtgattgctcatgtggctgagggtgacgcagaggacattaaccgtgcagtagctgcggctcgcaaggcttttgatgaagggccatggccgaagatgactgcctatgagaggtcccgtatcctactgcggtttgctgatttgatagagaagcacaatgacgagcttgctgctttggagacatgggacaacgggaagccatatgagcaagcagcccagattgaagtacccatggtggcccgtcttatgcgttactatgctggttgggctgataagatccatgggctcattgtgccggctgatggcccacaccatgtacagatcttgcatgagccaattggtgttgcaggtcagatcatcccatggaactttcctcttctgatgtatgcctggaaagttggccctgctttggcatgtggaaatactctcgtgctcaagactgctgaacaaacccctctatcggctttgtatatctccaaattgttgcatgaggctggactacctgagggtgttgtgaatgtcgtttctggttttggccctactgctggtgctgctcttgctagtcacatggatgttgataagatcgcatttactggatctaccgatactggaaaaattattctcgagttggctgcaaagagcaaccttaagacagtgacactggagttaggaggcaagtcccctttcatcataatggacgatgctgatgttgaccatgctgttgagcttgcgcactttgccctgttctttaaccagggacaatgctgctgcgctggatctcgcacgtttgtacatgagcgtgtttatgatgagtttgtggagaaggccaaggctcgtgcattgaagcgcgtcgttggtgatccgttcaggaaaggtgttgaacagggcccgcagattgacgacgagcaattcaacaagatcttgcgctacattaggtatggtgttgacggtggagctacccttgtgacgggtggtgataggttgggtgacaagggtttctacatccagccaacgattttctcagatgtccaggacggcatgaagattgctcaggaggagatatttgggcctgtgcagtcgatcctcaagttcaaagacctcaatgaggttatcaagagggcaaacgcgagccagtatggattggccgccggcgtgttcaccaacagcctggacacggccaacaccctgacgcgcgcgctcagggccgggaccgtctgggtgaactgcttcgacgtcttcgatgctgcgattccgtttggtgggtacaagatgagcggcatcgggagggagaagggcgttgacagcctgaagaactacctgcaggtgaaggcggtcgtcaccccaatcaagaacgccgcgtggttgtagacgctgcaagtgtggccttgtgcacgagaaccacgtatattcatttcctggtcacatccccgaacaatgtgaaggcgttaatcagatagatgacgatgaagaagaacaactataataagatttgccctagcctgggttctcagttatctctaataagttttatggttggtgcctatatattgtgcaatttggttgctcccttttattttgtttctttttgataagactgttctagcaacggatatgcagagttcattatgaaaatgcatttgttagtgtctttgatggttaagtccctaattgtcatcagtgttgattccctagatttggcgaagaatgtaagggaagagaaagattagag

SEQ ID NO: 79777 - DNA, 849 bp, Zea Mays
cgaacgcctcgctccagccaccagcccacgcccgctgcccaccgcccacgtcatggcggcgccagtcgttgccccactgtgttccagtagatggttcataaagcatggttaccaccttggctagcggcacaatatgctcattatgtggaggttgtctcagatcactggagctaacatgggaaacctgctatgcagaatgtttttgtgcctttttcatactagtttcttttatttccaatttcaaaatgaattacacaaataaaatgaccatttatatgtctacgtatctaacatttcaggcatcagaaaaattagcacatgcaaagaaatgggttgaaactcatattgaggctactaagatgaaatggatttctgttaaggagaaattggttgtcctaaaaaatgtagaaccttatgtacaaaaggtatcaacaagatgttaatgggctgaacttcatattaagacttctaaaatgaaatggattcctgttaaagacaaaattggtggtcctcacgaaaaatgcagaaccttatgtacaaatcggttgtcttcaaaatgttgatcttgtagctgcaataaagagaagcaacaatggcgctgatgctacatggttagaagtagcaatgttggtctggtagctccaagatttggttgttattgaataatatctatgataatatgttgataagtatatgtgatgatcattgatagttgttcaattataatgggttgtgcttcttgtgctacattgacatcgatgatagttataaaataaaatggcctcgcttgggccaaatgttttgtgatgaacaaaagtgttttgtgacgaacatcatcatagtatgaat

SEQ ID NO: 79778 - DNA, 859 bp, Zea Mays
cctcgctccagccaccagcccacgcccgctgcccaccgcccacgtcatggcggcgccagtcgttgccccactgtgttccagtagatggttcataaagcatggttaccaccttggctagcggcacaatatgctcattatgtgacgtcatcatttgtaggaggttgtctcagatcactggagctaacatgggaaacctgctatgcagaatgtttttgtgcctttttcatactagtttcttttatttccaatttcaaaatgaattacacaaataaaatgaccatttatatgtctacgtatctaacatttcaggcatcagaaaaattagcacatgcaaagaaatgggttgaaactcatattgaggctactaagatgaaatggatttctgttaaggagaaattggttgtcctaaaaaatgtagaaccttatgtacaaaaggtatcaacaagatgttaatgggctgaacttcatattaagacttctaaaatgaaatggattcctgttaaagacaaaattggtggtcctcacgaaaaatgcagaaccttatgtacaaatcggttgtcttcaaaatgttgatcttgtagctgcaataaagagaagcaacaatggcgctgatgctacatggttagaagtagcaatgttggtctggtagctccaagatttggttgttattgaataatatctatgataatatgttgataagtatatgtgatgatcattgatagttgttcaattataatgggttgtgcttcttgtgctacattgacatcgatgatagttataaaataaaatggcctcgcttgggccaaatgttttgtgatgaacaaaagtgttttgtgacgaacatcatcatagtatgaat

SEQ ID NO: 79779 - DNA, 690 bp, Zea Mays
ctcgctccagccaccagcccacgcccgctgcccaccgcccacgtcatggcggcgccagtcgttgccccactgtgttccagtagatggttcataaagcatggttaccaccttggctagcggcacaatatgctcattatgtggcatcagaaaaattagcacatgcaaagaaatgggttgaaactcatattgaggctactaagatgaaatggatttctgttaaggagaaattggttgtcctaaaaaatgtagaaccttatgtacaaaaggtatcaacaagatgttaatgggctgaacttcatattaagacttctaaaatgaaatggattcctgttaaagacaaaattggtggtcctcacgaaaaatgcagaaccttatgtacaaatcggttgtcttcaaaatgttgatcttgtagctgcaataaagagaagcaacaatggcgctgatgctacatggttagaagtagcaatgttggtctggtagctccaagatttggttgttattgaataatatctatgataatatgttgataagtatatgtgatgatcattgatagttgttcaattataatgggttgtgcttcttgtgctacattgacatcgatgatagttataaaataaaatggcctcgcttgggccaaatgttttgtgatgaacaaaagtgttttgtgacgaacatcatcatagtatgaat

SEQ ID NO: 79780 - DNA, 857 bp, Zea Mays
caagttgtttgcttggtctggtctagttgggttaccgcagttgacctgacatgcctttaaatcataaatccattgaatttcgatcctgattttgtaagccagttcataaagcatggttaccaccttggctagcggcacaatatgctcattatgtggaggttgtctcagatcactggagctaacatgggaaacctgctatgcagaatgtttttgtgcctttttcatactagtttcttttatttccaatttcaaaatgaattacacaaataaaatgaccatttatatgtctacgtatctaacatttcaggcatcagaaaaattagcacatgcaaagaaatgggttgaaactcatattgaggctactaagatgaaatggatttctgttaaggagaaattggttgtcctaaaaaatgtagaaccttatgtacaaaaggtatcaacaagatgttaatgggctgaacttcatattaagacttctaaaatgaaatggattcctgttaaagacaaaattggtggtcctcacgaaaaatgcagaaccttatgtacaaatcggttgtcttcaaaatgttgatcttgtagctgcaataaagagaagcaacaatggcgctgatgctacatggttagaagtagcaatgttggtctggtagctccaagatttggttgttattgaataatatctatgataatatgttgataagtatatgtgatgatcattgatagttgttcaattataatgggttgtgcttcttgtgctacattgacatcgatgatagttataaaataaaatggcctcgcttgggccaaatgttttgtgatgaacaaaagtgttttgtgacgaacatcatcatagtatgaat

SEQ ID NO: 79781 - DNA, 1225 bp, Zea Mays
ctgactcatgatgactgttatgatttgttcaatttcgcataactgactcaatcgctacctcatacttcgtttcgatcattgtacttttatgatcctgtgatcccaagcatggttctaagactaagtatattctttttgagtttttgcttgctgttcgtgaggaagatatgcaaaattagagagggacaatatggtcactgcaggagatgtgggaaaaataaagaaaaaaataaaaattaataagaggttatagtactattcttatgacactagcaggagatgtagaaaaaaataattaataagaactcaagtctaaagcttgcaacacattattataacactagcagatcattaaattagatatctatactagagcctaaagtccattgaaattttaaattctatactttgacgtatggatggtgtttggagtgcaaatatgcatgtttatgttcatttccttttgcaggttcataaagcatggttaccaccttggctagcggcacaatatgctcattatgtggaggttgtctcagatcactggagctaacatgggaaacctgctatgcagaatgtttttgtgcctttttcatactagtttcttttatttccaatttcaaaatgaattacacaaataaaatgaccatttatatgtctacgtatctaacatttcaggcatcagaaaaattagcacatgcaaagaaatgggttgaaactcatattgaggctactaagatgaaatggatttctgttaaggagaaattggttgtcctaaaaaatgtagaaccttatgtacaaaaggtatcaacaagatgttaatgggctgaacttcatattaagacttctaaaatgaaatggattcctgttaaagacaaaattggtggtcctcacgaaaaatgcagaaccttatgtacaaatcggttgtcttcaaaatgttgatcttgtagctgcaataaagagaagcaacaatggcgctgatgctacatggttagaagtagcaatgttggtctggtagctccaagatttggttgttattgaataatatctatgataatatgttgataagtatatgtgatgatcattgatagttgttcaattataatgggttgtgcttcttgtgctacattgacatcgatgatagttataaaataaaatggcctcgcttgggccaaatgttttgtgatgaacaaaagtgttttgtgacgaacatcatcatagtatgaat

SEQ ID NO: 79782 - DNA, 713 bp, Zea Mays
cattgtcatgcgtttcgttaccgcaggtgaccctagcttccctcgtctatttagaaagctgcgaccgaagcctaagctattcacctctccgtgctcctcgcgtccgccaccctagaaagatcacgggagccctcggtgtggtgtccgcgcagaagttaggggggcaccacggattgtggtgtagcgtcttcacatcggcgaggacgcataccctaggagcatcgcaagatcacaccaagcgtacccgtggaggtggtgggctctgacggtaggggtagaagagtggattgctcgccggagttcaacgagagcctccgtccgccccacgcccggttctgcgcgcacgtcatcacgattttcgggctgtcgccggtgatgttccgccatatggggacggtggcgccgccattcaaaacgaaacgggtgaggaaaaatggcgtatgccgttgatgagcaagcgaatggctgggattatccggcgcgtacccgttcggcggtgtcaatccggaccgtccatctctgatcgagcgcatgtgattcaccgtgggcaacgtaagatccggacggttgaactaagatcctagggccaaatatgcgtaccagttcacttaatgcgacatctaatcatggccctcagaatgagatccaatggctagaatccatccatactctcggtcgcgacagatttacatctgaggccctcaggattcgct

SEQ ID NO: 79783 - DNA, 690 bp, Zea Mays
cattgtcatgcgtttcgttaccgcaggtgaccctagcttccctcgtctatttagaaagctgcgaccgaagcctaagctattcacctctccgtgctcctcgcgtccgccaccctagaaagatcacgggagccctcggtgtggtgtccgcgcagaagttaggggggcaccacggattgtggtgtagcgtcttcacatcggcgaggacgcataccctaggagcatcgcaagatcacaccaagcgtacccgtggaggtggtgggctctgacggtaggggtagaagagtggattgctcgccggagttcaacgagagcctccgtccgccccacgcccggttctgcgcgcacgtcatcacgattttcgtgaggacacgaggatctaaggatcatcctggtacctggaatctcaagtcccaggcaagttgtgcccttgatcacttttgcttacccaataatgttctttataatcatttattcatgcataggtttaattttgatgggacccaatagatcaccctagtctgattatctattttaccttgtttatccctgaatcatttgggtagttatgctattgctttacatggttttaggttaatatttcattatatccatgttccaattattttgttattttatttatgttcatgtcaagatcattatctttaattggaacatggagcttaacttgag

SEQ ID NO: 79784 - DNA, 571 bp, Zea Mays
ggaaagtaatgttctgttacgcataacctggctgttgctatttcaccaccatcctgaatttcttggtttccttggaaaatgaaatgggtgcgagaattgatgaattggaacagagcctcaatgacctcaaggctgagataggcggtgaaggcatgtcgacgccatctaagatgaaggaagagtcaagaccttcagacagctccgcatgagtgcagcagaagcagcatgactcgtttcagaggccgttgctgtgtcttgggcgttcatcactaacaaatacgtacctgttttaaggtctcatttgagcaagagattgtaacccgtgctacttgtgttttgctgaatggtttgccataaattgtacccgtcttcgttctgtgtagacctacccgtggttatgcgctgagcatgtagtgacagctgctagaatgctagcaccccaattactaagaattcgggattcgcaagcataatttactttgcttctgtgttagttttatcacttacatggatagtagtgtatatatttttaattggcttacatattaaattcatgttcgcaacataattt

SEQ ID NO: 79785 - DNA, 2419 bp, Zea Mays
gtggggtatagaggattgttatagggggaaccgctgtagagcgtggagatatagggggagagagattgctgacgtggcacgtgagtgggatatagggagacaaatttaggggaaccgctgaacacagtcttatcccacacgcgcagctccctccttcccatctcccatggccgagcgcccaaccaaactcctccctcgtctccatggcgcgcgctcctccctgcttccctgctccgctcggcaacaagctcatcctgcgcgggcccgtggtccctgctcagagcttccccggcgtcattcccatggccgccggtgctcgcatctccatggtggtcaggagcttgtcccatggttgccagcccaccatggtggcgcttcgttcttcccctgcgctgctccctgcttctctgctggccggctccgcggtgcatgcgtcgcaggggcacgcgcccaccgcgctccagtaccccgccgttggcttctgctccaactccagccccagctcggatctcgactttgtgctcgacgtctctggcgccagctgctgtgccctccccatgccagctcgctggtgacggtaggtctggccgtccctgctccccggccttcatccccgtcgcgccgattcgctcgccctggcatcgatcccgtcggtgctcatgtccctgtcatcctcgcggtggatttactccgtgtgcttactctactcgccgatcttctctgttgagacgcgcattggctgtcttccttctccctcggccacggctccttggtgccgagcctccatccccagtccgccgtcaccagctccgtgcctccatccatggttgcgcgcgcgagctttattgcgagagcaccgaactctacctacaaagcctcgccggtgaagtccgccgccgtcctctggtctcagctcgccccagcactcttgcttgcccttatgctctggccgcgcgatctatccatgctcccgggtttttgccttgcctcgccatggtgctgcgtcaccatctttagccagttcgcctggacactggtgtccttccccagcacgtcaactcgcctccatctgatggcctcatgtgcgggcatgttggctgcctgctctcgcggtgactccatacggcttacgagttccgcgtgacgctcaccatgtgttccatgggatgtcgaatccagaaatcgttgttgtttctcatctgcgatctcattagcctctgctcgacatgtgttcgacgattacgtgaaccggtgatcatcctcgacctagcgagattcaagtctatttagtgtggtaagtcgattcactatttatgctagtggttcaatgatcggattaattaactatattaatacatgggttcttttatcagtagcatatgcattgtgattgtcttagataattgctataatgtctcgtctatgcggtgtgggtgtgggcataattatgaaataggcgtattataattaggtggaaaagcaaactagagcaacacttactgtgtgtataatgcattgccttagttacttgtaatgctatagtcgtattttgcaattattaagcatatatattgttaggtgtgatatcgtgtttgaattgcaggtttgggtgaaaagtgcatcgataggctagtgggtattgctaaaatgtaccatatcatgcattagtgtgattatgtgcatacttgtaatgtagtcgctttgtatgataaaacctaagtatgataaaacctaagtttaagatataaattatgcgaggaatgatttaatagattactatgtctaaaataattgagttagccttataaatgcggaatttgacgctttaggtaggcaaagaatgttttggtaaacaagtatacgaaggacaactttagtgattcaactgtctagccaataaatgcaattaggcgatttaagcccctttgtttctaagtgtagtaacctatcaatgttgtgctctaagtatgttaggacttgtatattgttattgttcttgatgtttgagttagatctagttaagatagagagggtgattgttgtattcagtaatatgtcgatactagtatcatgagtgttgtaatacatctcaccattagtgtttaattcttcactgtgtaaaatcgtaatattatcttgcgatattcgtcttgatattcatacatgtgcattgtgcatcccatgaggtacgttaattaatcacgtgatccggaggaccaaagctgagtcgaccacaagaggctggaaagcgtgagccactcgcaaggtgatgctgttggatccacctgaagatggataggctgaacaagtgccaacacaaaaggctgttcgccaagtggtagccacctaacaaacactaacctagtgttattccaggtactagatttgtgctgctgtggatggtgttaagcgccggtgg

SEQ ID NO: 79786 - DNA, 2212 bp, Zea Mays
tggaggttggtcttttgctttcctttccctgtgcagtctcatgcagaacaacaacatcaccggcccaatcccagcagagattggcaagcttacaaagctcaagacacttgatctctccagcaaccacctgtacggtggaatccccgcttctgtaggccaccttgagagcctgcagtacttgaggctcaacaacaacaccctttctggtccattcccttcagcatcagctaacttgtcccagctcgttttcctagacttgtcatataataacctgagtggtccaataccgggatctttggcaagaacattcaacatagttgggaatcctctcatctgcggcaccaacaccgaggaagattgctacgggactgccccaatgccgatgtcctacaagctcaatagctcgcagggtgctccgccactggcaaaatccaaaagccacaagtttgttgcagttgcattcggtgcagcaattggttgcatcagcatcctctccctcgctgccggattcctgttctggtggaggcaccgtagaaaccggcagatccttttcgacgtcgacgaccaacacatggagaacgttggccttggaaacgtgaagaggttccagttcagggagctccaggccgcgacagacaagttcagcggcaagaacctgctagggaaaggtggctttgggttcgtttacagagggcagctccctgacgggactctcgtggctgtgaagcgactgaaggacggcaatgtcgcgggaggcgaggcgcagttccagactgaggttgagatgatcagcttggcgctgcacagaaaccttctcaggctctatgggttttgcacgaccgccaccgagaggctgctggtctacccatacatgtctaacggaagcgtcgcgtcgcgcctgaaagggaagccgcctttggactgggcgaccaggaggaggatagctcttggcgcagggagggggctgctgtacctgcacgagcagtgtgaccccaagatcatacacagggacgtcaaagcagccaacgtcctgctagatgactgctgcgaggccatcgttggtgactttgggctcgcgaagctcctggaccaccgggactcgcatgtcaccactgcggtgcgaggcaccgtcggtcacatcgcgcccgagtacctctccactggccagtcgtctgacaagaccgacgtcttcgggtttggcatcctgctgctggagctggtcactggtcagaccgcgctggagttcgggaaggcagcaaaccagaagaagggagccatgcttgattggcaaagcattgttgttgttgttgttggtcaggtgaagaagatgcaccaggagaagaagctggacgttctggtggacaaggggctgaggagcaggtacgacgggatcgagatggaggagatggtgcaggtggcgttgctgtgcacgcagtacctccccggccaccggccgaagatgtcggaggtggtccggatgctggaaggtgacgggctcgcagagcggtggcaggcttcgcagcgcgcggactcgcacaagtccttcaaagtgcccgacttcactttcagccgctgctactccgaccttaccgacgactcgtcattgctggtgcaggccgtcgagctgtccggcccaagatgacaccaaccaccaccaccgtcagtttgcacttgtacagcataaggaccgagaatcatgtgtatattgccatattggagaataaaatgagccatgttagaataactatagtgtgtattagatagatgaactgtacaaaagaagagcgtaaggtttgtacaggtttggatatttacatatttctagcagttgagacagtaataccaagtagacgagctttttactgaaccggaaagcttttgcttgtgttgtcaggttctgttgacccttccctctatatccgtttccttgctgtatatttccagagtgcaaaaggttctgaaatcttataaagtccttagttgatatgagctgcatttcaaagaagggaattgctaaattgtgggaattctgaaatttaattaatttttgtaagatatgagctgcatttcaaagaagggaattgctaaatctcagctgaatgtttcatcagactccaaccgcatagaatcatagtatgcaattgcgtttgccccagacatattttggcaaagcattaccggctttcacatgtccatcagacaactgaaggac

SEQ ID NO: 79787 - DNA, 2207 bp, Zea Mays
tggaggttggtcttttgctttcctttccctgtgcagtctcatgcagaacaacaacatcaccggcccaatcccagcagagattggcaagcttacaaagctcaagacacttgatctctccagcaaccacctgtacggtggaatccccgcttctgtaggccaccttgagagcctgcagtacttgaggctcaacaacaacaccctttctggtccattcccttcagcatcagctaacttgtcccagctcgttttcctagacttgtcatataataacctgagtggtccaataccgggatctttggcaagaacattcaacatagttgggaatcctctcatctgcggcaccaacaccgaggaagattgctacgggactgccccaatgccgatgtcctacaagctcaatagctcgcagggtgctccgccactggcaaaatccaaaagccacaagtttgttgcagttgcattcggtgcagcaattggttgcatcagcatcctctccctcgctgccggattcctgttctggtggaggcaccgtagaaaccggcagatccttttcgacgtcgacgaccaacacatggagaacgttggccttggaaacgtgaagaggttccagttcagggagctccaggccgcgacagacaagttcagcggcaagaacctgctagggaaaggtggctttgggttcgtttacagagggcagctccctgacgggactctcgtggctgtgaagcgactgaaggacggcaatgtcgcgggaggcgaggcgcagttccagactgaggttgagatgatcagcttggcgctgcacagaaaccttctcaggctctatgggttttgcacgaccgccaccgagaggctgctggtctacccatacatgtctaacggaagcgtcgcgtcgcgcctgaaagggaagccgcctttggactgggcgaccaggaggaggatagctcttggcgcagggagggggctgctgtacctgcacgagcagtgtgaccccaagatcatacacagggacgtcaaagcagccaacgtcctgctagatgactgctgcgaggccatcgttggtgactttgggctcgcgaagctcctggaccaccgggactcgcatgtcaccactgcggtgcgaggcaccgtcggtcacatcgcgcccgagtacctctccactggccagtcgtctgacaagaccgacgtcttcgggtttggcatcctgctgctggagctggtcactggtcagaccgcgctggagttcgggaaggcagcaaaccagaagaagggagccatgcttgattggcattgttgttgttgttgttggtcaggtgaagaagatgcaccaggagaagaagctggacgttctggtggacaaggggctgaggagcaggtacgacgggatcgagatggaggagatggtgcaggtggcgttgctgtgcacgcagtacctccccggccaccggccgaagatgtcggaggtggtccggatgctggaaggtgacgggctcgcagagcggtggcaggcttcgcagcgcgcggactcgcacaagtccttcaaagtgcccgacttcactttcagccgctgctactccgaccttaccgacgactcgtcattgctggtgcaggccgtcgagctgtccggcccaagatgacaccaaccaccaccaccgtcagtttgcacttgtacagcataaggaccgagaatcatgtgtatattgccatattggagaataaaatgagccatgttagaataactatagtgtgtattagatagatgaactgtacaaaagaagagcgtaaggtttgtacaggtttggatatttacatatttctagcagttgagacagtaataccaagtagacgagctttttactgaaccggaaagcttttgcttgtgttgtcaggttctgttgacccttccctctatatccgtttccttgctgtatatttccagagtgcaaaaggttctgaaatcttataaagtccttagttgatatgagctgcatttcaaagaagggaattgctaaattgtgggaattctgaaatttaattaatttttgtaagatatgagctgcatttcaaagaagggaattgctaaatctcagctgaatgtttcatcagactccaaccgcatagaatcatagtatgcaattgcgtttgccccagacatattttggcaaagcattaccggctttcacatgtccatcagacaactgaaggac

SEQ ID NO: 79788 - DNA, 745 bp, Zea Mays
tcccccaaagccgaacacacttcctcgcgctcgcgctctcgagtcccgactcacctgcttctagccatggaggcgcctccatcttctcccttcctagtgttgctcctgctgttcttcccttcgagcggccttgccgcccccatggattttaaccatgaagtgcaagtccttatggtgatcaagagcctcctcaaggacccctatggcgcgctgagaaactgggacaggaactccgtcgatccctgtacctggtccttcatctcctgctcgccggagaatctcgtcactgcactggaagctccaagcaagaacctttccggccggctctccccgagcatagggaacctgacaaaacttgagaagcttcagctgcagaacaacaacataattgggccaatcccagcagagatcggcaagttagcaaagctcaggacgctggttctgtccagtaacaaattacatggcacagtcccaaattctttaggccgactcggaagactccagtacatagacttgtcgtacaataacttgagtggcccgataccaaaaacgtctgcaagaacgctcaacatagccgggaatcctctcatctgtgctgcagaacaggattgtgacagtaccaagctgaaaccgatgctggattcctatatcgctggtgaacagtaggagccccaagttgggagtcggttaccttgctaaggagcacattttcatgtcgggcatatgacgttcggtgcacaagcag

SEQ ID NO: 79789 - DNA, 3143 bp, Zea Mays
ccgacctcatttgcagcccaacccgcactcaccaacagaaagggaaaagaccatcctacccacgccagctccggagttccgacgcaacttcccattccgatccacatcagccccgtcgctgtctctccaggatctggagaccctacccgcctgagccctcagccggccgcgcggtgcggcaccgcaccaccgccaccgagccacgaacccgccggagtaccgacccgcctgcgccctccgctggccgtgcggcgtggcagcgcaccacctacggcgggctgcggcaccgccccggccctcgcaccagttccgcggcgacgtggtccagcagcaccgccaggccgcctacggccatttcactcgcggcttctgagcatctacctgcacttcttcaattacctgcagctttcatcgtatttcctttgcattgcataccgtgcagccacctctgcacatgatgtttcggatgttatcttattattaaaaaactagatttactcatgtttttcttcctctgtcattattgctgatttggtaactaatctttctgtggggtttatgcactgttaatttttccctgtcattttaggtctaatttgtattcgacactctcatcgtagtaactgcctcataggttttgtgccctctgtatacatctctatcggctccatgtccaaggcactgcaccacccttttgttatcaggttttaaaccggcttttggaattgtacacatggatcaatttgtgggagtggaaattagagcagatttctgtgcttttttttttccagcacatctgccagactagtatcatcagcaattgtccatcgcagcatagggaccccaaacaaaagttgaattgtacacattgaatcacatggaatgagccagatgcaatgagggctgcctgaaagtgtataggcaggcagagcacagcagcaactttcgcgttagatatttgcggatgaatagggcggcgaggaaactatctgttgacctggcagggcgctttgcggcttttcctgtgtatttacgcccgctacctcacgctcgaggttccaaaaggcggaacggctaagggggagtggcaacgactgccacaaaacccacctcgtggtcattgctttggaatccccttccctttccctttagccaaagacgctctgctcagcataaagagaagggcgggcggcatcttctcctcccttccctttgccctaccttttgctatactacaagagcttcaaattctccgccttcattcatgcatgctttctgttggcaaacaacaaacatactagcactgctttgacttaaaaggttccgagacagcctgatggtcaagagagagatagtttacgtacctgcaagtgtgctcaggcaggctggccccggccggtctaattctgcagcctcgcatcgccaaacagagcatcaaatctttatctgagagcgactccgtgtctgaaggattggtgctcacgtcgcgacatccaaagccagccacaagataggcacacagcgctgctccgcaccaagaatgacgccaagtgtcacgccctggattcctctggcacccaccctcctattagtactctgcactggacttgcagcgctgtggatccatcactgcaacttcatggattataattttgacaccagcgtcctcgacgaggacgtcgccgggagaggaggcagggaagggagctgcccgccagcatgggccagggcgtgcgacgggtgccgcgcagcccccagcgtggtgtactgccatgcggacaccgcgtacctgtgcgcgtcatgcaactcgcgggtgcatgccgccaatcgcgtggcctcgcgccatgagcgcgtgcgcgtctgcgaggcctgcgagtgcgcccccgcggtgctcgcgtgccgcgccgacgcggcggcgctctgcgctgcctgcgacgcgcaggtccactccgccaacccgcttgcggggaggcaccagcgcgtgcccgtcctgccgctcccggccgccgccgtcccggctgcctctgtgctcgccgaggcagctgccaccgccgcggccgttgctggtgacaaggacgaggaggtcgactcctggctgctgctcaccaaggacccagacgacgacgacaagaaccacaactgcagtagcaacaacaacaacatcagcagcaacaccagcacgttctacgcagacgttgacgagtacttcgatctggtcgggtacagttcctactgtgacaaccacatcaatagcaacacgaaacagtacgggatgcaagagcagcagctcctgctgcacaaggagtttggagacaaggagggaagcgagtacgtggtgccttcacaggtcgggcagcagcagagtggctatcacagagttattgggacggagcaggctgcctccatgactcccggggtcagtgcttacacagattccatcagcaacagcatctctttctcatcgtcaatggaggtgggtatagtaccagacaacatggcaacgacagacatgccaagctccggcatcctgctgacgcctgctggggccatcagcctgttctcgtcgggtcctccgctccagatgccgcttcacttggcctccatggacagggaggccagggtgctgaggtacagggagaagaagaagagcaggaagtttgagaagaccatacggtatgcaacgaggaagacgtacgcagaagcacggccgaggatcaagggacgcttcgcgaaaagatcgtctgatatggatgtcgaagtggatcagatgttctcagctgcggctctgtcgtctgatggtagctatggtaccgttccatggttctgaaggaactttagtgagacattatatgtatcatacagtataataattgtaacatgcgttgaccatatatagtggtaaggtcaagtacaagtagttctaggaaaccgatggtaatgagtgatattgtgtttgttttgaaagataaatgaacaaatatcttagcatttgagttttggtttgtaattgcatgcacatatcaggtctatacagaattttcagtcacttaaacatttttcactgaacagatgattctttgttgccatggattagcaacagcatatagcagtataatgctatgggacagagacatgatttcgtg

SEQ ID NO: 79790 - DNA, 901 bp, Zea Mays
tgcagcccaacccgcactcaccaacagaaagggaaaagaccatcctacccacgccagctccggagttccgacgcaacttcccattccgatccacatcagccccgtcgctgtctctccaggatctggagaccctacccgcctgagccctcagccggccgcgcggtgcggcaccgcaccaccgccaccgagccacgaacccgccggagtaccgacccgcctgcgccctccgctggccgtgcggcgtggcagcgcaccacctacggcgggctgcggcaccgccccggccctcgcaccagttccgcggcgacgtggtccagcagcaccgccaggccgcctacggccatttcactcgcggcttctgagcatctacctgcacttcttcaattacctgcagctttcatcgtatttcctttgcattgcataccgtgcagccacctctgcacatgatgtttcggatgttatcttattattaaaaaactagatttactcatgtttttcttcctctgtcattattgctgatttggtaactaatctttctgtggggtttatgcactgttaatttttccctgtcattttaggtctaatttgtattcgacactctcatcgtagtaactgcctcataggttttgtgccctctgtatacatctctatcggctccatgtccaaggcactgcaccacccttttgttatcaggttttaaaccggcttttggaattgtacacatggatcaatttgtgggagtggaaattagagcagatttctgtgcttttttttttccagcacatctgccagactagtatcatcagcaattgtccatcgcagcatagatgattctttgttgccatggattagcaacagcatatagcagtataatgctatgggacagagacatgatttcgtg

SEQ ID NO: 79791 - DNA, 2342 bp, Zea Mays
cccgcactcaccaacagaaagggaaaagaccatcctacccacgccagctccggagttccgacgcaacttcccattccgatccacatcagccccgtcgctgtctctccaggatctggagaccctacccgcctgagccctcagccggccgcgcggtgcggcaccgcaccaccgccaccgagccacgaacccgccggagtaccgacccgcctgcgccctccgctggccgtgcggcgtggcagcgcaccacctacggcgggctgcggcaccgccccggccctcgcaccagttccgcggcgacgtggtccagcagcaccgccaggccgcctacggccatttcactcgcggcttctgagcatctacctgcacttcttcaattacctgcagctttcatcgtatttcctttgcattgcataccgtgcagccacctctgcacatgatgtttcggatgttatcttattattaaaaaactagatttactcatgtttttcttcctctgtcattattgctgatttggtaactaatctttctgtggggtttatgcactgttaatttttccctgtcattttaggtctaatttgtattcgacactctcatcgtagtaactgcctcataggttttgtgccctctgtatacatctctatcggctccatgtccaaggcactgcaccacccttttgttatcaggttttaaaccggcttttggaattgtacacatggatcaatttgtgggagtggaaattagagcagatttctgtgcttttttttttccagcacatctgccagactagtatcatcagcaattgtccatcgcagcatagtggatccatcactgcaacttcatggattataattttgacaccagcgtcctcgacgaggacgtcgccgggagaggaggcagggaagggagctgcccgccagcatgggccagggcgtgcgacgggtgccgcgcagcccccagcgtggtgtactgccatgcggacaccgcgtacctgtgcgcgtcatgcaactcgcgggtgcatgccgccaatcgcgtggcctcgcgccatgagcgcgtgcgcgtctgcgaggcctgcgagtgcgcccccgcggtgctcgcgtgccgcgccgacgcggcggcgctctgcgctgcctgcgacgcgcaggtccactccgccaacccgcttgcggggaggcaccagcgcgtgcccgtcctgccgctcccggccgccgccgtcccggctgcctctgtgctcgccgaggcagctgccaccgccgcggccgttgctggtgacaaggacgaggaggtcgactcctggctgctgctcaccaaggacccagacgacgacgacaagaaccacaactgcagtagcaacaacaacaacatcagcagcaacaccagcacgttctacgcagacgttgacgagtacttcgatctggtcgggtacagttcctactgtgacaaccacatcaatagcaacacgaaacagtacgggatgcaagagcagcagctcctgctgcacaaggagtttggagacaaggagggaagcgagtacgtggtgccttcacaggtcgggcagcagcagagtggctatcacagagttattgggacggagcaggctgcctccatgactcccggggtcagtgcttacacagattccatcagcaacagcatctctttctcatcgtcaatggaggtgggtatagtaccagacaacatggcaacgacagacatgccaagctccggcatcctgctgacgcctgctggggccatcagcctgttctcgtcgggtcctccgctccagatgccgcttcacttggcctccatggacagggaggccagggtgctgaggtacagggagaagaagaagagcaggaagtttgagaagaccatacggtatgcaacgaggaagacgtacgcagaagcacggccgaggatcaagggacgcttcgcgaaaagatcgtctgatatggatgtcgaagtggatcagatgttctcagctgcggctctgtcgtctgatggtagctatggtaccgttccatggttctgaaggaactttagtgagacattatatgtatcatacagtataataattgtaacatgcgttgaccatatatagtggtaaggtcaagtacaagtagttctaggaaaccgatggtaatgagtgatattgtgtttgttttgaaagataaatgaacaaatatcttagcatttgagttttggtttgtaattgcatgcacatatcaggtctatacagaattttcagtcacttaaacatttttcactgaacagatgattctttgttgccatggattagcaacagcatatagcagtataatgctatgggacagagacatgatttcgtg

SEQ ID NO: 79792 - DNA, 2675 bp, Zea Mays
cccgcactcaccaacagaaagggaaaagaccatcctacccacgccagctccggagttccgacgcaacttcccattccgatccacatcagccccgtcgctgtctctccaggatctggagaccctacccgcctgagccctcagccggccgcgcggtgcggcaccgcaccaccgccaccgagccacgaacccgccggagtaccgacccgcctgcgccctccgctggccgtgcggcgtggcagcgcaccacctacggcgggctgcggcaccgccccggccctcgcaccagttccgcggcgacgtggtccagcagcaccgccaggccgcctacggccatttcactcgcggcttctgagcatctacctgcacttcttcaattacctgcagctttcatcgtatttcctttgcattgcataccgtgcagccacctctgcacatgatgtttcggatgttatcttattattaaaaaactagatttactcatgtttttcttcctctgtcattattgctgatttggtaactaatctttctgtggggtttatgcactgttaatttttccctgtcattttaggtctaatttgtattcgacactctcatcgtagtaactgcctcataggttttgtgccctctgtatacatctctatcggctccatgtccaaggcactgcaccacccttttgttatcaggttttaaaccggcttttggaattgtacacatggatcaatttgtgggagtggaaattagagcagatttctgtgcttttttttttccagcacatctgccagactagtatcatcagcaattgtccatcgcagcataggttccgagacagcctgatggtcaagagagagatagtttacgtacctgcaagtgtgctcaggcaggctggccccggccggtctaattctgcagcctcgcatcgccaaacagagcatcaaatctttatctgagagcgactccgtgtctgaaggattggtgctcacgtcgcgacatccaaagccagccacaagataggcacacagcgctgctccgcaccaagaatgacgccaagtgtcacgccctggattcctctggcacccaccctcctattagtactctgcactggacttgcagcgctggtgacctgacttcccccacatactcatactgacagtggatccatcactgcaacttcatggattataattttgacaccagcgtcctcgacgaggacgtcgccgggagaggaggcagggaagggagctgcccgccagcatgggccagggcgtgcgacgggtgccgcgcagcccccagcgtggtgtactgccatgcggacaccgcgtacctgtgcgcgtcatgcaactcgcgggtgcatgccgccaatcgcgtggcctcgcgccatgagcgcgtgcgcgtctgcgaggcctgcgagtgcgcccccgcggtgctcgcgtgccgcgccgacgcggcggcgctctgcgctgcctgcgacgcgcaggtccactccgccaacccgcttgcggggaggcaccagcgcgtgcccgtcctgccgctcccggccgccgccgtcccggctgcctctgtgctcgccgaggcagctgccaccgccgcggccgttgctggtgacaaggacgaggaggtcgactcctggctgctgctcaccaaggacccagacgacgacgacaagaaccacaactgcagtagcaacaacaacaacatcagcagcaacaccagcacgttctacgcagacgttgacgagtacttcgatctggtcgggtacagttcctactgtgacaaccacatcaatagcaacacgaaacagtacgggatgcaagagcagcagctcctgctgcacaaggagtttggagacaaggagggaagcgagtacgtggtgccttcacaggtcgggcagcagcagagtggctatcacagagttattgggacggagcaggctgcctccatgactcccggggtcagtgcttacacagattccatcagcaacagcatctctttctcatcgtcaatggaggtgggtatagtaccagacaacatggcaacgacagacatgccaagctccggcatcctgctgacgcctgctggggccatcagcctgttctcgtcgggtcctccgctccagatgccgcttcacttggcctccatggacagggaggccagggtgctgaggtacagggagaagaagaagagcaggaagtttgagaagaccatacggtatgcaacgaggaagacgtacgcagaagcacggccgaggatcaagggacgcttcgcgaaaagatcgtctgatatggatgtcgaagtggatcagatgttctcagctgcggctctgtcgtctgatggtagctatggtaccgttccatggttctgaaggaactttagtgagacattatatgtatcatacagtataataattgtaacatgcgttgaccatatatagtggtaaggtcaagtacaagtagttctaggaaaccgatggtaatgagtgatattgtgtttgttttgaaagataaatgaacaaatatcttagcatttgagttttggtttgtaattgcatgcacatatcaggtctatacagaattttcagtcacttaaacatttttcactgaacagatgattctttgttgccatggattagcaacagcatatagcagtataatgctatgggacagagacatgatttcgtg

SEQ ID NO: 79793 - DNA, 2663 bp, Zea Mays
cccgcactcaccaacagaaagggaaaagaccatcctacccacgccagctccggagttccgacgcaacttcccattccgatccacatcagccccgtcgctgtctctccaggatctggagaccctacccgcctgagccctcagccggccgcgcggtgcggcaccgcaccaccgccaccgagccacgaacccgccggagtaccgacccgcctgcgccctccgctggccgtgcggcgtggcagcgcaccacctacggcgggctgcggcaccgccccggccctcgcaccagttccgcggcgacgtggtccagcagcaccgccaggccgcctacggccatttcactcgcggcttctgagcatctacctgcacttcttcaattacctgcagctttcatcgtatttcctttgcattgcataccgtgcagccacctctgcacatgatgtttcggatgttatcttattattaaaaaactagatttactcatgtttttcttcctctgtcattattgctgatttggtaactaatctttctgtggggtttatgcactgttaatttttccctgtcattttaggtctaatttgtattcgacactctcatcgtagtaactgcctcataggttttgtgccctctgtatacatctctatcggctccatgtccaaggcactgcaccacccttttgttatcaggttttaaaccggcttttggaattgtacacatggatcaatttgtgggagtggaaattagagcagatttctgtgcttttttttttccagcacatctgccagactagtatcatcagcaattgtccatcgcagcatagcctgatggtcaagagagagatagtttacgtacctgcaagtgtgctcaggcaggctggccccggccggtctaattctgcagcctcgcatcgccaaacagagcatcaaatctttatctgagagcgactccgtgtctgaaggattggtgctcacgtcgcgacatccaaagccagccacaagataggcacacagcgctgctccgcaccaagaatgacgccaagtgtcacgccctggattcctctggcacccaccctcctattagtactctgcactggacttgcagcgctggtgacctgacttcccccacatactcatactgacagtggatccatcactgcaacttcatggattataattttgacaccagcgtcctcgacgaggacgtcgccgggagaggaggcagggaagggagctgcccgccagcatgggccagggcgtgcgacgggtgccgcgcagcccccagcgtggtgtactgccatgcggacaccgcgtacctgtgcgcgtcatgcaactcgcgggtgcatgccgccaatcgcgtggcctcgcgccatgagcgcgtgcgcgtctgcgaggcctgcgagtgcgcccccgcggtgctcgcgtgccgcgccgacgcggcggcgctctgcgctgcctgcgacgcgcaggtccactccgccaacccgcttgcggggaggcaccagcgcgtgcccgtcctgccgctcccggccgccgccgtcccggctgcctctgtgctcgccgaggcagctgccaccgccgcggccgttgctggtgacaaggacgaggaggtcgactcctggctgctgctcaccaaggacccagacgacgacgacaagaaccacaactgcagtagcaacaacaacaacatcagcagcaacaccagcacgttctacgcagacgttgacgagtacttcgatctggtcgggtacagttcctactgtgacaaccacatcaatagcaacacgaaacagtacgggatgcaagagcagcagctcctgctgcacaaggagtttggagacaaggagggaagcgagtacgtggtgccttcacaggtcgggcagcagcagagtggctatcacagagttattgggacggagcaggctgcctccatgactcccggggtcagtgcttacacagattccatcagcaacagcatctctttctcatcgtcaatggaggtgggtatagtaccagacaacatggcaacgacagacatgccaagctccggcatcctgctgacgcctgctggggccatcagcctgttctcgtcgggtcctccgctccagatgccgcttcacttggcctccatggacagggaggccagggtgctgaggtacagggagaagaagaagagcaggaagtttgagaagaccatacggtatgcaacgaggaagacgtacgcagaagcacggccgaggatcaagggacgcttcgcgaaaagatcgtctgatatggatgtcgaagtggatcagatgttctcagctgcggctctgtcgtctgatggtagctatggtaccgttccatggttctgaaggaactttagtgagacattatatgtatcatacagtataataattgtaacatgcgttgaccatatatagtggtaaggtcaagtacaagtagttctaggaaaccgatggtaatgagtgatattgtgtttgttttgaaagataaatgaacaaatatcttagcatttgagttttggtttgtaattgcatgcacatatcaggtctatacagaattttcagtcacttaaacatttttcactgaacagatgattctttgttgccatggattagcaacagcatatagcagtataatgctatgggacagagacatgatttcgtg

SEQ ID NO: 79794 - DNA, 3362 bp, Zea Mays
cttttgtagtcctattctcctgcataagtacgctattattggtaatcatttatacgctgttacgttcgatatttcttctggtcttcaaatgttagttttccaccctcatacaagacaactagatgttatgtttggatcatatatatagtgtgtttgccactgttaaacatggtgtttgagtattgtaaaaccatactaaacaaattctctgtccctggattattgtatttgatagcttcacatattccttccattattcaacaatttcttgatttatggatccacatatgcatgattggggaacggtagatctaaacagtgaatctggaccatacatgcatgaacaacaccgtccagatctagaactaccaccagtaaaaactaccgcaagtgggaaggaaataaagggtgggtagtatcgttgcctcgcaggttgggagaacatgtttaattatgctgcaatggctcgatttagttgcctagtagctgggactggtccaccaacttaaaatatataaggtacatgtccacacatatataggtagtggagaagatgatggcagaaacaggagttgaaatcagtcgcaaccgtccgcttcactctcgctatgactgatgaagatgttaggaaataaagatagatatggttagacatatttggagataataaaactctcagtatttattttataacagaacaaagttcagtctctatcgtctagagaaaacaaatcccttaatataaagataaggacagaatgctagagatgacttaggttaggcctagtacaagttgatttaaggcctgtttggtttgatgcctaatttgccacactttgcctaacttttctgcctaaggttagttcttcaattcgaacgactaaccttaggcaaagtgtgacacatttagccacgaaccaaacggccccttatactccaactctcctcacatgcacctataaatacccctgaggggtcaacaccagaaaaaccaacaaatcaacagcaaattgctaggctttttcatatataatatccatcttttttccacactcagggaccccaaacaaaagttgaattgtacacattgaatcacatggaatgagccagatgcaatgagggctgcctgaaagtgtataggcaggcagagcacagcagcaactttcgcgttagatatttgcggatgaatagggcggcgaggaaactatctgttgacctggcagggcgctttgcggcttttcctgtgtatttacgcccgctacctcacgctcgaggttccaaaaggcggaacggctaagggggagtggcaacgactgccacaaaacccacctcgtggtcattgctttggaatccccttccctttccctttagccaaagacgctctgctcagcataaagagaagggcgggcggcatcttctcctcccttccctttgccctaccttttgctatactacaagagcttcaaattctccgccttcattcatgcatgctttctgttggcaaacaacaaacatactagcactgctttgacttaaaaggttccgagacagcctgatggtcaagagagagatagtttacgtacctgcaagtgtgctcaggcaggctggccccggccggtctaattctgcagcctcgcatcgccaaacagagcatcaaatctttatctgagagcgactccgtgtctgaaggattggtgctcacgtcgcgacatccaaagccagccacaagataggcacacagcgctgctccgcaccaagaatgacgccaagtgtcacgccctggattcctctggcacccaccctcctattagtactctgcactggacttgcagcgctgtggatccatcactgcaacttcatggattataattttgacaccagcgtcctcgacgaggacgtcgccgggagaggaggcagggaagggagctgcccgccagcatgggccagggcgtgcgacgggtgccgcgcagcccccagcgtggtgtactgccatgcggacaccgcgtacctgtgcgcgtcatgcaactcgcgggtgcatgccgccaatcgcgtggcctcgcgccatgagcgcgtgcgcgtctgcgaggcctgcgagtgcgcccccgcggtgctcgcgtgccgcgccgacgcggcggcgctctgcgctgcctgcgacgcgcaggtccactccgccaacccgcttgcggggaggcaccagcgcgtgcccgtcctgccgctcccggccgccgccgtcccggctgcctctgtgctcgccgaggcagctgccaccgccgcggccgttgctggtgacaaggacgaggaggtcgactcctggctgctgctcaccaaggacccagacgacgacgacaagaaccacaactgcagtagcaacaacaacaacatcagcagcaacaccagcacgttctacgcagacgttgacgagtacttcgatctggtcgggtacagttcctactgtgacaaccacatcaatagcaacacgaaacagtacgggatgcaagagcagcagctcctgctgcacaaggagtttggagacaaggagggaagcgagtacgtggtgccttcacaggtcgggcagcagcagagtggctatcacagagttattgggacggagcaggctgcctccatgactcccggggtcagtgcttacacagattccatcagcaacagcatctctttctcatcgtcaatggaggtgggtatagtaccagacaacatggcaacgacagacatgccaagctccggcatcctgctgacgcctgctggggccatcagcctgttctcgtcgggtcctccgctccagatgccgcttcacttggcctccatggacagggaggccagggtgctgaggtacagggagaagaagaagagcaggaagtttgagaagaccatacggtatgcaacgaggaagacgtacgcagaagcacggccgaggatcaagggacgcttcgcgaaaagatcgtctgatatggatgtcgaagtggatcagatgttctcagctgcggctctgtcgtctgatggtagctatggtaccgttccatggttctgaaggaactttagtgagacattatatgtatcatacagtataataattgtaacatgcgttgaccatatatagtggtaaggtcaagtacaagtagttctaggaaaccgatggtaatgagtgatattgtgtttgttttgaaagataaatgaacaaatatcttagcatttgagttttggtttgtaattgcatgcacatatcaggtctatacagaattttcagtcacttaaacatttttcactgaacagatgattctttgttgccatggattagcaacagcatatagcagtataatgctatgggacagagacatgatttcgtg

SEQ ID NO: 79795 - DNA, 2244 bp, Zea Mays
aactgaaataatccaaaataggacaaaaaattgagtacaaaaattgcgacaggtctcaacagagacgcgcagcagatttgcagccactaccaccgaaaccaaatggctctctccctatcaaaaaaattgctagggtgccccggtccttgtctcgcggttcacagtagagcggtggcaccacgtttttcctaatcctcttcctgttctacttctacccatttgttccgtcgcttcaacggcacggaagagaatcgctacccagccaatcgaagtcttctcttgccctgctgtatctcatatcctgttgcgcgagattcttggcgattctgctactggtttttatttttattttgctagttcttgaaatttctttcacgagtgtcagtagccaactgctgataacaacatcctatcgttcctgtagcccctttccgtgaccttgccaaagaatttgctcttctctgtgcgtgtgcaatttcttccgctacagctcaaggatccgctactctgctgttttgggagattcgccatgggcggcggggccgttaacgaccacttcccgggggccagcgacccgctgctccccacgaagcgggatggggacggggacgaggacgacgcaggtgcctccgcgttccacgagttcgacggcgcctccttcgccggcgcggtgttcaacctctccaccaccatcgtcggcgcgggcatcatggcgctaccggccaccatgaaggtgctcggtctcgtccctgggctcgtcatgatagtgctcgccgcgctcctcaccgacgcctccatcgagctgctcgtgcggttcagccgggccgcgggcgcgcgctcctacagcgcggccatggccgacgccttcggatggtggggtaggaggctgctccaggtctgcgtcgtcatcaacaacgtcggcgtcatgattgtgtacatgatcattataggcgatgtgctttctggatccacttctggtggtgagcatcactatggtgtgttagaaggatggtttggaatacactggtggaatgggcgtttatttgttctccttgtcacaaccctttgtgtgttcactccactagcatgcttgaagcgtattgattcactaagctatacatccacaatatctgttgctttggcggttgtattcgttattattactgcaggaattgctgtcatcaagttgataggtggacaaattccaatgcccaagttgtttcccactgtttctgatttggcatctgtttgggaactttttacagcagtgccggttcttgtcactgcttacgtttgccattacaatgttcacccaattcataatgagctaaaggactctacccagattaagccaatagtacacacatcattgacactatgctcgaccatctacatcacaacaagtttctttggatatctcctctttggtgaatctacactctctgatgtgctctccaactttgattcaaatcttgggatcccatacagttcagtcctcaatgatgctgtcagagtgagctatgctgttcacctgatgcttgtgttccccatgatattccatgcattgaggcttaatttggatgggctcctcttcgcctctgcaaggcctctgtcttctgacaacagaagattcggcataattacagcatcgctcctcctagtgatttttgggtctgcaatcttcattcctagtatttgggatgcctttcagtttactggggcaactgctgctgtctgtatcgcctttattttcccagctgcgatcactttaagggattcacaaggtattgccaagaagtgggacaaaattctggcgatcttcatgattgttcttgctgttgtatcaaatgtagtagcggtctacagcgatgcctacaaaatattcaacaaggaaagtgctccttctaatgcctggatcggggagtcaactgaaaatagatcttcgtggtggcttgtacgttagttggccaataaaatattcatagttcatttaggctttgtttttggtgatttgttccacgggccatggtctgctcaaatctcattgagttttgtgtgtatatctacgataggtatgaaaatttgcacaaaccgaagtgctccggtaccataaaaataattgtgtcaaatctgaaattacagagttacgatcatgatgactctttttgaaaaaaattgtatcggatgtgaagtaaccatcgatatctcttgcacgaagagattcagaatccctcaattgatttg

SEQ ID NO: 79796 - DNA, 1710 bp, Zea Mays
gccactaccaccgaaaccaaatggctctctccctatcaaaaaaattgctagggtgccccggtccttgtctcgcggttcacagtagagcggtggcaccacgtttttcctaatcctcttcctgttctacttctacccatttgttccgtcgcttcaacggcacggaagagaatcgctacccagccaatcgaagtcttctcttgccctgctgtatctcatatcctgttgcgcgagattcttggcgattctgctactggtttttatttttattttgctagttcttgaaatttctttcacgagtgtcagtagccaactgctgataacaacatcctatcgttcctgtagcccctttccgtgaccttgccaaagaatttgctcttctctgtgcgtgtgcaatttcttccgctacagctcaaggatccgctactctgctgttttgggagattcgccatgggcggcggggccgttaacgaccacttcccgggggccagcgacccgctgctccccacgaagcgggatggggacggggacgaggacgacgcaggtgcctccgcgttccacgagttcgacggcgcctccttcgccggcgcggtgttcaacctctccaccaccatcgtcggcgcgggcatcatggcgctaccggccaccatgaaggtgctcggtctcgtccctgggctcgtcatgatagtgctcgccgcgctcctcaccgacgcctccatcgagctgctcgtgcggttcagccgggccgcgggcgcgcgctcctacagcgcggccatggccgacgccttcggatggtggggtaggaggctgctccaggtctgcgtcgtcatcaacaacgtcggcgtcatgattgtgtacatgatcattataggcgatgtgctttctggatccacttctggtggtgagcatcactatggtgtgttagaaggatggtttggaatacactggtggaatgggcgtttatttgttctccttgtcacaaccctttgtgtgttcactccactagcatgcttgaagcgtattgattcactaagctatacatccacaatatctgttgctttggcggttgtattcgttattattactgcaggaattgctgtcatcaagttgataggtggacaaattccaatgcccaagttgtttcccactgtttctgatttggcatctgtttgggaactttttacagcagtgccggttcttgtcactgcttacgtttgccattacaatgggattcacaaggtattgccaagaagtgggacaaaattctggcgatcttcatgattgttcttgctgttgtatcaaatgtagtagcggtctacagcgatgcctacaaaatattcaacaaggaaagtgctccttctaatgcctggatcggggagtcaactgaaaatagatcttcgtggtggcttgtacgttagttggccaataaaatattcatagttcatttaggctttgtttttggtgatttgttccacgggccatggtctgctcaaatctcattgagttttgtgtgtatatctacgataggtatgaaaatttgcacaaaccgaagtgctccggtaccataaaaataattgtgtcaaatctgaaattacagagttacgatcatgatgactctttttgaaaaaaattgtatcggatgtgaagtaaccatcgatatctcttgtacgtgctctatgctttagtgcatttgttagaagattaagtgggaag

SEQ ID NO: 79797 - DNA, 516 bp, Zea Mays
caccccctcccctattcccctttgtggccgccaccccctctctctctctccctctccttcctccccaagtgattgcagcaccacccctcaaccctagccgccccccctcctcctctccatggtgcagcctccccgcttggtaccccgtcgtgtgggtgcgagtcttccattggagtttggagggaggaagaaggaagaaaggaaggaggaaaggaggaacccaaggtgattttaagatcattctttttagtatttgtgctgcaatccaattgattacatgtttacctatgcgaatcggtataggtgctgtccagatttttgtgggaggacgaacagcattagtattagcagattctggggatttttcgtggaaaattagtgataatcaatatgataatcatgtagagatttgtcatacctttccaacgagtacttatgcgcttgattcggagttataatttaggagctatcactgtttgaatccgggtatgttgctgtccaaaaaaacagatttcc

SEQ ID NO: 79798 - DNA, 750 bp, Zea Mays
gaaagaagaagagactcaaccgagtatttgatgcaattgggttcgtctaccccgactaccgttatccaacgcggggtcaaaaaagaaagaatacatcttctgcgaaggaagctgcttcagccgctcctagcgagccggcgccgaagaggaaaagggtaaaggttctgtaacaccctggggtccacaaacaccccggaatggtactaaacaacacttctgacatctatatataaaatttcggcagcatcccctttgcaaaattgcataaatgagggggcaacagtgtataaacatatatcatgacaaaaacatactaagtattattaagcggcttgcaaagagaaattaaacatatgacatgaactgaattaactagtgtgcacgactagtaaaaaaacaaacttcctttgacaataagtttctaattaaatcatggctgcgcctgggcagcgttattgtgagagtgaaagtggacgtgctgctactcccctcattcccaacatgtatcaagtacctgcattgagtaatgcaagagtgagatgacacatctcagcaagtaaaataatatcaaactgtttaaccacataagaacattgttttaccaccacttgattccacaactttcttattacgaaggtgcaacacgtatacaacgtacaacacacctagtcaccacaccgcgcaggtagaaaccacaatagtaacatagtaatgtcacacttcatatatacctcatgagtgcaaatgtct

SEQ ID NO: 79799 - DNA, 2920 bp, Zea Mays
aaaaactaaacacatctctatattacacgaactatactgagttcttacgaaacactgaaaaccaagggcgaagattgctttgttcgactttgatctcgctctcgctcgcaactcacctctccctctccactcgcacctcgccgccgtctacccgtctgctgtcctagccccgcttctgccgcagccatgaacccttccatgccaccgcctccgccgcgtaaccctaattccttttcgtcatccgcctccatgccaccttctccgctcccaaacccctcgccgccgacggcacggccggaggcggcgtccgagcccgacttgtcttcagcggagatggaagcgaaggcggcagaggctgagggaggcgctgtcccgagcccgagcgtgagcggttcgtcagcgaaggaggcgcccaacagcagcggggcctcctccggcaacaacgtgatggaggaagcggccgcgtcgccggtggagcggcagagggctcgcgcgccgtacgccattcccgagtggagcaccgcgccgagccaacccttcttccttgaggtgctcaaggacgggacgatcgttgatcagcttgacgtgtccaagaaaggagcttacatgtttggtcgaattgatctgtgcgattttgtattggagcatccaaccatttctcgattccatgctgttttgcagttcagaaatgatgggaaggttttcctttttgatcttggaagcacacatggatcctttatcaataaaaatctgatcaagaagaagctgtacacagagattcatgttggagatgtaattcgatttgggcaatcatcacggctgtacatttttcaaggaccatctgagctaatgcctccagaaaaagacttgcagaagcttcgggatgctagaattcagcaagacatgcttgatcgtgaagcttccattttacgtgcaaaaactcaagcagctttggcagagggaatctcatggggtatgacagatgatgcaatagaagagtctgcagaggatgatgcagatgaaattacttggcaaacctacaaaggtcagcttactgatagacaagagaaaactcgtagcaagatagtaaaacgaatggagaagattgccaacatgaaaaaagaaattgatgcaataagagttaaggacatttctcaaggtgggctaacccaaggtcaacaaacacaaattgcacgaaatgaacaacggatgtctcagattatggaggagctagataatctagaagaaactttaaatgacagtatacgggaaagtattggtgctcgttctggaaaggcaaagcgtggcagctataaagcaagtctcgaggaagaagatgacgttcttagtgacgatgatgaattttatgatcgaacgaagaagaaatctactcagaaatcaagtgagcaacaatcggttgagactgctgacagccttcttgagaaaaaagatttcatcaccaatgatattgaaagtaaaacaaaattgctggaagaagagaagcataagctgtctcagagtgatacaccagatctcagggatgaccttgatgcttatatgagtggcttgtcatctcaattagtacatgataagattgcccgaattcagaaggagctctctgatcttcaggatgagctggacagagtagtgtacctactgaaaatagctgaccctacgggagaagcagctcgtaagagggatctaaagccaagagaagcgaaacctccaacatctaatgataatccaagactagaatcaaagaaacaaaataaaattggaaaagctacagctgaggagaaacccaaggattcttctagcgaagtgggcacagataaacctgctaaattacagacagatatctccaagaaccaagaagatggcagcaaacctgcattcgccatgccaaaacctcaatggcttggtgacaaaaggatcataaaacctgaagaaaaccttataaatgaagaaaagtctgatgcagaggaacctgataattttgtggactacaaagaccggaaaattattctttcttcaggcagtgaaaagaagcttgaagaggctgcccctgggcttattttacggaagagaaagtctgctgacgagtcagttgctagcgaggcaaattcatcttcggttgaaagtgaagcatcagttgctgatgctgtggcccttctgcttaagcataaacgtggtctacaaacctcagaagaaatggagaatgagactgaaccatattctagcaagaccgaagggaagaagtcgaaacaaaaacgtgtattgggcccagcaagaccagatttccttgaagccagacaagactctgaaacatgggtgccacctgaaggtcaaactggtgatgggcgcactgcattgaatgaccgtttgggttattgaaaagctcttccagcaacagttcccttgtggagaagtgcagtatcgtgcctatggttttgagcctgtttggggctccatattctgtgaagacaacgcaatagaagttaagaatgcttattctgttgatggcaagtttggtgaaggaactattcattgactttttagggcgctagtgggactgtagctcggctaatcctctcacactctaagggtttgttcggttattttcaatctatatggattggaggggattgatataaattgggagagattttgagtactaggaattgaaaccccatcaattcctctcaatccatttcgattgtggtagaaccgaacatgacctaaagaggatatttaggctataaagaggttcaatgtgttaaggcctattaggtctaggcctactgcacacacacacacacacacatatatatatatatatatatatatatatagggaagaggtaatggaagccctgggcttcccctactaatggaagccccagccaggacgcggtcaaccc

SEQ ID NO: 79800 - DNA, 2956 bp, Zea Mays
aaacactgaaaaccaagggcgaagattgctttgttcgactttgatctcgctctcgctcgcaactcacctctccctctccactcgcacctcgccgccgtctacccgtctgctgtcctagccccgcttctgccgcagccatgaacccttccatgccaccgcctccgccgcgtaaccctaattccttttcgtcatccgcctccatgccaccttctccgctcccaaacccctcgccgccgacggcacggccggaggcggcgtccgagcccgacttgtcttcagcggaggtgaacggtcgcgctaaccctagcacatcctcctcgatgcctccgcctccgcctcaaaaacccgccccaccggcaccgcagatggaagcgaaggcggcagaggctgagggaggcgctgtcccgagcccgagcgtgagcggttcgtcagcgaaggaggcgcccaacagcagcggggcctcctccggcaacaacgtgatggaggaagcggccgcgtcgccggtggagcggcagagggctcgcgcgccgtacgccattcccgagtggagcaccgcgccgagccaacccttcttccttgaggtgctcaaggacgggacgatcgttgatcagcttgacgtgtccaagaaaggagcttacatgtttggtcgaattgatctgtgcgattttgtattggagcatccaaccatttctcgattccatgctgttttgcagttcagaaatgatgggaaggttttcctttttgatcttggaagcacacatggatcctttatcaataaaaatctgatcaagaagaagctgtacacagagattcatgttggagatgtaattcgatttgggcagtaaatcatcacggctgtacatttttcaaggaccatctgagctaatgcctccagaaaaagacttgcagaagcttcgggatgctagaattcagcaagacatgcttgatcgtgaagcttccattttacgtgcaaaaactcaagcagctttggcagagggaatctcatggggtatgacagatgatgcaatagaagagtctgcagaggatgatgcagatgaaattacttggcaaacctacaaaggtcagcttactgatagacaagagaaaactcgtagcaagatagtaaaacgaatggagaagattgccaacatgaaaaaagaaattgatgcaataagagttaaggacatttctcaaggtgggctaacccaaggtcaacaaacacaaattgcacgaaatgaacaacggatgtctcagattatggaggagctagataatctagaagaaactttaaatgacagtatacgggaaagtattggtgctcgttctggaaaggcaaagcgtggcagctataaagcaagtctcgaggaagaagatgacgttcttagtgacgatgatgaattttatgatcgaacgaagaagaaatctactcagaaatcaagtgagcaacaatcggttgagactgctgacagccttcttgagaaaaaagatttcatcaccaatgatattgaaagtaaaacaaaattgctggaagaagagaagcataagctgtctcagagtgatacaccagatctcagggatgaccttgatgcttatatgagtggcttgtcatctcaattagtacatgataagattgcccgaattcagaaggagctctctgatcttcaggatgagctggacagagtagtgtacctactgaaaatagctgaccctacgggagaagcagctcgtaagagggatctaaagccaagagaagcgaaacctccaacatctaatgataatccaagactagaatcaaagaaacaaaataaaattggaaaagctacagctgaggagaaacccaaggattcttctagcgaagtgggcacagataaacctgctaaattacagacagatatctccaagaaccaagaagatggcagcaaacctgcattcgccatgccaaaacctcaatggcttggtgacaaaaggatcataaaacctgaagaaaaccttataaatgaagaaaagtctgatgcagaggaacctgataattttgtggactacaaagaccggaaaattattctttcttcaggcagtgaaaagaagcttgaagaggctgcccctgggcttattttacggaagagaaagtctgctgacgagtcagttgctagcgaggcaaattcatcttcggttgaaagtgaagcatcagttgctgatgctgtggcccttctgcttaagcataaacgtggtctacaaacctcagaagaaatggagaatgagactgaaccatattctagcaagaccgaagggaagaagtcgaaacaaaaacgtgtattgggcccagcaagaccagatttccttgaagccagacaagactctgaaacatgggtgccacctgaaggtcaaactggtgatgggcgcactgcattgaatgaccgtttgggttattgaaaagctcttccagcaacagttcccttgtggagaagtgcagtatcgtgcctatggttttgagcctgtttggggctccatattctgtgaagacaacgcaatagaagttaagaatgcttattctgttgatggcaagtttggtgaaggaactattcattgactttttagggcgctagtgggactgtagctcggctaatcctctcacactctaagggtttgttcggttattttcaatctatatggattggaggggattgatataaattgggagagattttgagtactaggaattgaaaccccatcaattcctctcaatccatttcgattgtggtagaaccgaacatgacctaaagaggatatttaggctataaagaggttcaatgtgttaaggcctattaggtctaggcctactgcacacacacacacacacacatatatatatatatatatatatatatatagggaagaggtaatggaagccctgggcttcccctactaatggaagccccagccaggacgcggtcaaccc

SEQ ID NO: 79801 - DNA, 2920 bp, Zea Mays
attgctttgttcgactttgatctcgctctcgctcgcaactcacctctccctctccactcgcacctcgccgccgtctacccgtctgctgtcctagccccgcttctgccgcagccatgaacccttccatgccaccgcctccgccgcgtaaccctaattccttttcgtcatccgcctccatgccaccttctccgctcccaaacccctcgccgccgacggcacggccggaggcggcgtccgagcccgacttgtcttcagcggaggtgaacggtcgcgctaaccctagcacatcctcctcgatgcctccgcctccgcctcaaaaacccgccccaccggcaccgcagatggaagcgaaggcggcagaggctgagggaggcgctgtcccgagcccgagcgtgagcggttcgtcagcgaaggaggcgcccaacagcagcggggcctcctccggcaacaacgtgatggaggaagcggccgcgtcgccggtggagcggcagagggctcgcgcgccgtacgccattcccgagtggagcaccgcgccgagccaacccttcttccttgaggtgctcaaggacgggacgatcgttgatcagcttgacgtgtccaagaaaggagcttacatgtttggtcgaattgatctgtgcgattttgtattggagcatccaaccatttctcgattccatgctgttcagaaatgatgggaaggttttcctttttgatcttggaagcacacatggatcctttatcaataaaaatctgatcaagaagaagctgtacacagagattcatgttggagatgtaattcgatttgggcaatcatcacggctgtacatttttcaaggaccatctgagctaatgcctccagaaaaagacttgcagaagcttcgggatgctagaattcagcaagacatgcttgatcgtgaagcttccattttacgtgcaaaaactcaagcagctttggcagagggaatctcatggggtatgacagatgatgcaatagaagagtctgcagaggatgatgcagatgaaattacttggcaaacctacaaaggtcagcttactgatagacaagagaaaactcgtagcaagatagtaaaacgaatggagaagattgccaacatgaaaaaagaaattgatgcaataagagttaaggacatttctcaaggtgggctaacccaaggtcaacaaacacaaattgcacgaaatgaacaacggatgtctcagattatggaggagctagataatctagaagaaactttaaatgacagtatacgggaaagtattggtgctcgttctggaaaggcaaagcgtggcagctataaagcaagtctcgaggaagaagatgacgttcttagtgacgatgatgaattttatgatcgaacgaagaagaaatctactcagaaatcaagtgagcaacaatcggttgagactgctgacagccttcttgagaaaaaagatttcatcaccaatgatattgaaagtaaaacaaaattgctggaagaagagaagcataagctgtctcagagtgatacaccagatctcagggatgaccttgatgcttatatgagtggcttgtcatctcaattagtacatgataagattgcccgaattcagaaggagctctctgatcttcaggatgagctggacagagtagtgtacctactgaaaatagctgaccctacgggagaagcagctcgtaagagggatctaaagccaagagaagcgaaacctccaacatctaatgataatccaagactagaatcaaagaaacaaaataaaattggaaaagctacagctgaggagaaacccaaggattcttctagcgaagtgggcacagataaacctgctaaattacagacagatatctccaagaaccaagaagatggcagcaaacctgcattcgccatgccaaaacctcaatggcttggtgacaaaaggatcataaaacctgaagaaaaccttataaatgaagaaaagtctgatgcagaggaacctgataattttgtggactacaaagaccggaaaattattctttcttcaggcagtgaaaagaagcttgaagaggctgcccctgggcttattttacggaagagaaagtctgctgacgagtcagttgctagcgaggcaaattcatcttcggttgaaagtgaagcatcagttgctgatgctgtggcccttctgcttaagcataaacgtggtctacaaacctcagaagaaatggagaatgagactgaaccatattctagcaagaccgaagggaagaagtcgaaacaaaaacgtgtattgggcccagcaagaccagatttccttgaagccagacaagactctgaaacatgggtgccacctgaaggtcaaactggtgatgggcgcactgcattgaatgaccgtttgggttattgaaaagctcttccagcaacagttcccttgtggagaagtgcagtatcgtgcctatggttttgagcctgtttggggctccatattctgtgaagacaacgcaatagaagttaagaatgcttattctgttgatggcaagtttggtgaaggaactattcattgactttttagggcgctagtgggactgtagctcggctaatcctctcacactctaagggtttgttcggttattttcaatctatatggattggaggggattgatataaattgggagagattttgagtactaggaattgaaaccccatcaattcctctcaatccatttcgattgtggtagaaccgaacatgacctaaagaggatatttaggctataaagaggttcaatgtgttaaggcctattaggtctaggcctactgcacacacacacacacacacatatatatatatatatatatatatatatagggaagaggtaatggaagccctgggcttcccctactaatggaagccccagccaggacgcggtcaaccc

SEQ ID NO: 79802 - DNA, 2816 bp, Zea Mays
ccgccgtctacccgtctgctgtcctagccccgcttctgccgcagccatgaacccttccatgccaccgcctccgccgcgtaaccctaattccttttcgtcatccgcctccatgccaccttctccgctcccaaacccctcgccgccgacggcacggccggaggcggcgtccgagcccgacttgtcttcagcggaggtgaacggtcgcgctaaccctagcacatcctcctcgatgcctccgcctccgcctcaaaaacccgccccaccggcaccgcagatggaagcgaaggcggcagaggctgagggaggcgctgtcccgagcccgagcgtgagcggttcgtcagcgaaggaggcgcccaacagcagcggggcctcctccggcaacaacgtgatggaggaagcggccgcgtcgccggtggagcggcagagggctcgcgcgccgtacgccattcccgagtggagcaccgcgccgagccaacccttcttccttgaggtgctcaaggacgggacgatcgttgatcagcttgacgtgtccaagaaaggagcttacatgtttggtcgaattgatctgtgcgattttgtattggagcatccaaccatttctcgattccatgctgttttgcagttcagaaatgatgggaaggttttcctttttgatcttggaagcacacatggatcctttatcaataaaaatctgatcaagaagaagctgtacacagagattcatgttggagatgtaattcgatttgggcagtaagaaaaagacttgcagaagcttcgggatgctagaattcagcaagacatgcttgatcgtgaagcttccattttacgtgcaaaaactcaagcagctttggcagagggaatctcatggggtatgacagatgatgcaatagaagagtctgcagaggatgatgcagatgaaattacttggcaaacctacaaaggtcagcttactgatagacaagagaaaactcgtagcaagatagtaaaacgaatggagaagattgccaacatgaaaaaagaaattgatgcaataagagttaaggacatttctcaaggtgggctaacccaaggtcaacaaacacaaattgcacgaaatgaacaacggatgtctcagattatggaggagctagataatctagaagaaactttaaatgacagtatacgggaaagtattggtgctcgttctggaaaggcaaagcgtggcagctataaagcaagtctcgaggaagaagatgacgttcttagtgacgatgatgaattttatgatcgaacgaagaagaaatctactcagaaatcaagtgagcaacaatcggttgagactgctgacagccttcttgagaaaaaagatttcatcaccaatgatattgaaagtaaaacaaaattgctggaagaagagaagcataagctgtctcagagtgatacaccagatctcagggatgaccttgatgcttatatgagtggcttgtcatctcaattagtacatgataagattgcccgaattcagaaggagctctctgatcttcaggatgagctggacagagtagtgtacctactgaaaatagctgaccctacgggagaagcagctcgtaagagggatctaaagccaagagaagcgaaacctccaacatctaatgataatccaagactagaatcaaagaaacaaaataaaattggaaaagctacagctgaggagaaacccaaggattcttctagcgaagtgggcacagataaacctgctaaattacagacagatatctccaagaaccaagaagatggcagcaaacctgcattcgccatgccaaaacctcaatggcttggtgacaaaaggatcataaaacctgaagaaaaccttataaatgaagaaaagtctgatgcagaggaacctgataattttgtggactacaaagaccggaaaattattctttcttcaggcagtgaaaagaagcttgaagaggctgcccctgggcttattttacggaagagaaagtctgctgacgagtcagttgctagcgaggcaaattcatcttcggttgaaagtgaagcatcagttgctgatgctgtggcccttctgcttaagcataaacgtggtctacaaacctcagaagaaatggagaatgagactgaaccatattctagcaagaccgaagggaagaagtcgaaacaaaaacgtgtattgggcccagcaagaccagatttccttgaagccagacaagactctgaaacatgggtgccacctgaaggtcaaactggtgatgggcgcactgcattgaatgaccgtttgggttattgaaaagctcttccagcaacagttcccttgtggagaagtgcagtatcgtgcctatggttttgagcctgtttggggctccatattctgtgaagacaacgcaatagaagttaagaatgcttattctgttgatggcaagtttggtgaaggaactattcattgactttttagggcgctagtgggactgtagctcggctaatcctctcacactctaagggtttgttcggttattttcaatctatatggattggaggggattgatataaattgggagagattttgagtactaggaattgaaaccccatcaattcctctcaatccatttcgattgtggtagaaccgaacatgacctaaagaggatatttaggctataaagaggttcaatgtgttaaggcctattaggtctaggcctactgcacacacacacacacacacatatatatatatatatatatatatatatagggaagaggtaatggaagccctgggcttcccctactaatggaagccccagccaggacgcggtcaaccc

SEQ ID NO: 79803 - DNA, 2781 bp, Zea Mays
ccgccgtctacccgtctgctgtcctagccccgcttctgccgcagccatgaacccttccatgccaccgcctccgccgcgtaaccctaattccttttcgtcatccgcctccatgccaccttctccgctcccaaacccctcgccgccgacggcacggccggaggcggcgtccgagcccgacttgtcttcagcggaggtgaacggtcgcgctaaccctagcacatcctcctcgatgcctccgcctccgcctcaaaaacccgccccaccggcaccgcagatggaagcgaaggcggcagaggctgagggaggcgctgtcccgagcccgagcgtgagcggttcgtcagcgaaggaggcgcccaacagcagcggggcctcctccggcaacaacgtgatggaggaagcggccgcgtcgccggtggagcggcagagggctcgcgcgccgtacgccattcccgagtggagcaccgcgccgagccaacccttcttccttgaggtgctcaaggacgggacgatcgttgatcagcttgacgtgtccaagaaaggagcttacatgtttggtcgaattgatctgtgcgattttgtattggagcatccaaccatttctcgattccatgctgatcaagaagaagctgtacacagagattcatgttggagatgtaattcgatttgggcaatcatcacggctgtacatttttcaaggaccatctgagctaatgcctccagaaaaagacttgcagaagcttcgggatgctagaattcagcaagacatgcttgatcgtgaagcttccattttacgtgcaaaaactcaagcagctttggcagagggaatctcatggggtatgacagatgatgcaatagaagagtctgcagaggatgatgcagatgaaattacttggcaaacctacaaaggtcagcttactgatagacaagagaaaactcgtagcaagatagtaaaacgaatggagaagattgccaacatgaaaaaagaaattgatgcaataagagttaaggacatttctcaaggtgggctaacccaaggtcaacaaacacaaattgcacgaaatgaacaacggatgtctcagattatggaggagctagataatctagaagaaactttaaatgacagtatacgggaaagtattggtgctcgttctggaaaggcaaagcgtggcagctataaagcaagtctcgaggaagaagatgacgttcttagtgacgatgatgaattttatgatcgaacgaagaagaaatctactcagaaatcaagtgagcaacaatcggttgagactgctgacagccttcttgagaaaaaagatttcatcaccaatgatattgaaagtaaaacaaaattgctggaagaagagaagcataagctgtctcagagtgatacaccagatctcagggatgaccttgatgcttatatgagtggcttgtcatctcaattagtacatgataagattgcccgaattcagaaggagctctctgatcttcaggatgagctggacagagtagtgtacctactgaaaatagctgaccctacgggagaagcagctcgtaagagggatctaaagccaagagaagcgaaacctccaacatctaatgataatccaagactagaatcaaagaaacaaaataaaattggaaaagctacagctgaggagaaacccaaggattcttctagcgaagtgggcacagataaacctgctaaattacagacagatatctccaagaaccaagaagatggcagcaaacctgcattcgccatgccaaaacctcaatggcttggtgacaaaaggatcataaaacctgaagaaaaccttataaatgaagaaaagtctgatgcagaggaacctgataattttgtggactacaaagaccggaaaattattctttcttcaggcagtgaaaagaagcttgaagaggctgcccctgggcttattttacggaagagaaagtctgctgacgagtcagttgctagcgaggcaaattcatcttcggttgaaagtgaagcatcagttgctgatgctgtggcccttctgcttaagcataaacgtggtctacaaacctcagaagaaatggagaatgagactgaaccatattctagcaagaccgaagggaagaagtcgaaacaaaaacgtgtattgggcccagcaagaccagatttccttgaagccagacaagactctgaaacatgggtgccacctgaaggtcaaactggtgatgggcgcactgcattgaatgaccgtttgggttattgaaaagctcttccagcaacagttcccttgtggagaagtgcagtatcgtgcctatggttttgagcctgtttggggctccatattctgtgaagacaacgcaatagaagttaagaatgcttattctgttgatggcaagtttggtgaaggaactattcattgactttttagggcgctagtgggactgtagctcggctaatcctctcacactctaagggtttgttcggttattttcaatctatatggattggaggggattgatataaattgggagagattttgagtactaggaattgaaaccccatcaattcctctcaatccatttcgattgtggtagaaccgaacatgacctaaagaggatatttaggctataaagaggttcaatgtgttaaggcctattaggtctaggcctactgcacacacacacacacacacatatatatatatatatatatatatatatagggaagaggtaatggaagccctgggcttcccctactaatggaagccccagccaggacgcggtcaaccc

SEQ ID NO: 79804 - DNA, 2364 bp, Zea Mays
gttaaccctcagtatccaaatgagcgttaaggtccaagaaaggagcttacatgtttggtcgaattgatctgtgcgattttgtattggagcatccaaccatttctcgattccatgctgttttgcagttcagaaatgatgggaaggttttcctttttgatcttggaagcacacatggatcctttatcaataaaaatctgatcaagaagaagctgtacacagagattcatgttggagatgtaattcgatttgggcaatcatcacggctgtacatttttcaaggaccatctgagctaatgcctccagaaaaagacttgcagaagcttcgggatgctagaattcagcaagacatgcttgatcgtgaagcttccattttacgtgcaaaaactcaagcagctttggcagagggaatctcatggggtatgacagatgatgcaatagaagagtctgcagaggatgatgcagatgaaattacttggcaaacctacaaaggtcagcttactgatagacaagagaaaactcgtagcaagatagtaaaacgaatggagaagattgccaacatgaaaaaagaaattgatgcaataagagttaaggacatttctcaaggtgggctaacccaaggtcaacaaacacaaattgcacgaaatgaacaacggatgtctcagattatggaggagctagataatctagaagaaactttaaatgacagtatacgggaaagtattggtgctcgttctggaaaggcaaagcgtggcagctataaagcaagtctcgaggaagaagatgacgttcttagtgacgatgatgaattttatgatcgaacgaagaagaaatctactcagaaatcaagtgagcaacaatcggttgagactgctgacagccttcttgagaaaaaagatttcatcaccaatgatattgaaagtaaaacaaaattgctggaagaagagaagcataagctgtctcagagtgatacaccagatctcagggatgaccttgatgcttatatgagtggcttgtcatctcaattagtacatgataagattgcccgaattcagaaggagctctctgatcttcaggatgagctggacagagtagtgtacctactgaaaatagctgaccctacgggagaagcagctcgtaagagggatctaaagccaagagaagcgaaacctccaacatctaatgataatccaagactagaatcaaagaaacaaaataaaattggaaaagctacagctgaggagaaacccaaggattcttctagcgaagtgggcacagataaacctgctaaattacagacagatatctccaagaaccaagaagatggcagcaaacctgcattcgccatgccaaaacctcaatggcttggtgacaaaaggatcataaaacctgaagaaaaccttataaatgaagaaaagtctgatgcagaggaacctgataattttgtggactacaaagaccggaaaattattctttcttcaggcagtgaaaagaagcttgaagaggctgcccctgggcttattttacggaagagaaagtctgctgacgagtcagttgctagcgaggcaaattcatcttcggttgaaagtgaagcatcagttgctgatgctgtggcccttctgcttaagcataaacgtggtctacaaacctcagaagaaatggagaatgagactgaaccatattctagcaagaccgaagggaagaagtcgaaacaaaaacgtgtattgggcccagcaagaccagatttccttgaagccagacaagactctgaaacatgggtgccacctgaaggtcaaactggtgatgggcgcactgcattgaatgaccgtttgggttattgaaaagctcttccagcaacagttcccttgtggagaagtgcagtatcgtgcctatggttttgagcctgtttggggctccatattctgtgaagacaacgcaatagaagttaagaatgcttattctgttgatggcaagtttggtgaaggaactattcattgactttttagggcgctagtgggactgtagctcggctaatcctctcacactctaagggtttgttcggttattttcaatctatatggattggaggggattgatataaattgggagagattttgagtactaggaattgaaaccccatcaattcctctcaatccatttcgattgtggtagaaccgaacatgacctaaagaggatatttaggctataaagaggttcaatgtgttaaggcctattaggtctaggcctactgcacacacacacacacacacatatatatatatatatatatatatatatagggaagaggtaatggaagccctgggcttcccctactaatggaagccccagccaggacgcggtcaaccc

SEQ ID NO: 79805 - DNA, 4269 bp, Zea Mays
caccagcccaatctagcccgtcccccaaccgtccatctccaaacaagcgagtcggttagatatttcctcaagccccagtcagccgcctcctctccctcccacagctcctgccgccgcctctccctccgtcggtatctcccacctcgcaatccactcccacctcccccctcgcccctaaaaccctagctaaacccaagccgaaagaaacaatggctctcctcgcctaagcgagctcgcgcccgccccttgctggccatggcgctccagctccgccgcttcctcccgcacggctacggccagcgacaccgcgctgtcacccacgtgctatcaccgccgccgccactcgcgatgcttcagttcgaggtgtttcagagatattcttccgcaccctggcccttgtcacctttccgcccttgtgaaatgtgtggggttgcattcaggagcaattcaacaaggaaaatgtgctcgagaaatatttttggggttgcatcacagcccaaaagtagcaccttttttactactggactctctggcaaccgtagctctgtatgtttcagagcgagggacagccgtggaattgctttaaagactaataatattgttaattcacgaccattctcaactatatacagtaaaaagctaaggtttcttattaaaaataagacttcatgcaataatctaaatgtgagaagggaagatggaagtgttgcacatagtttgttttgtagatctgagaaacgccaaagcacagttgctacgtgtagcaccattgctgacgaggcttcaacatctactagtaacagcagcaagagtgttactgattctaagactgacactgccaagatgaggcgttcaagaggaagcaaaaaagaagttgatggagttatgaaagataaggaagtacataccaagaaaaagagaatatcttctagaacttgtatagctgcaacaaagacgactgagagttctagtgcgaagcaagaaaacaagaagactgataattgtaaactgaaaaagggtactgatagtcctaaagagaaaaaagtgaataataggtcaaagtcaaaagcaaaggtttctgcttcttctgtatcttctgaagctgagatttgtatgaaatcctctatcgatggttctggtattgagaaaaagccactggtgccattgtatcctccgagagccaaatcagtcgtggttgtggaatcagccacgaaagcaaaagttattcagaattatcttggggacatgtatgaagtgttaccaagctatggtcatgtgagagatttagcaggtagatcaaaatctgtccgccctaatgatgacttcagcatggtctgggaggtgcctgctgctgcctggacacaccttaagagcattaaagttgcactgaaaggagcagaaaatttaattcttgcatctgatcctgatcgtgaaggtgaagcgattgcttggcacatcaaagaaatgcttgaacaacaaggtgcattgggctgtgatgtgactgttgcaagagttgttttccatgaaataactgagaatgcaataaaaaaggctttaatgtccccaaggtatattgatatggacttggtcaatgcttatcttgcacgccgttcccttgattatgtaattgggtttggcatatcaccacttctgtggaggaagttgcctggttgccaatcagctggacgggtccaatctgctgctttggcccttgtgtgcgatcgagaatctgaaatagaacagtttaagccacaggaatactggacagtacgggcagacttcaaaatgcaatttgcagatctgtcaaatggcacatgtattccatttcatataaagcatttgaattcaaaaaagctgggtcaactttccataccctctcaagaagaagcgcaagctatagaaaaaaggattcattcttctaagtttgaagttttaggtgttaaaagaagtaaaattcacaagaatcctccaatgccatatattacatccagccttcagcaggatgcagcaaacaaacttcattttactgcagggtataccatgaagattgcccaaaagctttatgagggtatcaatctttcctcagaagaaacaactgggttaataacatacataagaactgatgggtttcatatttctgatggagccgcagaagacatccgttcattagtcaaagaaagatacggccagaagtacgttttagaggacactaggaagtatttaaagaaggtgaaaaatgctcaagaagcccacgaagcaattaggcccaccagtataaggaggttgccatcatctttggttggaatacttgacgatgattctctaaaactgtacactctaatatggaaaaggacaatggcttgccaaatggaagcttctagaactcagatgattcaagtggatgttggcactcctgaaggagagatgatttttcattcagctgcatcaaagctagacttcaagggataccaatctgtttatgaggacactgagggagattctgtgcatgaggataactttgaggccttgtcaaaattaatggttaaggacttggtgtcccctgttaacgtgcatcttggacagcactttactaagccaccatcacgttattctgagggtgcattgattaaaaagctagaagaacttggaattggaaggccatctacttatgcatctataatgaaagtattacaggataggaagtacgtgacagcaaaaagtcgagttctacaccctgagttccgtggtcgaatggtctcggcattccttttgcaccatttctctgaggttgctgattacagctttacagctaacatggagacagagctagataatgtctctgctgggctaactgaatggaagggtcttctaaaaggctactgggaacgattcagcaaatattgtgcagatgcgagtaatctggatggcagaaaggtagagagaatgctcgaagaaaaatttggtcctatcctcttccctaatgttgacacagacaatagaatttgccctagttgttctgaaggaaccttgagattcaaagttagtaggtatggtgaaggctattttataggctgtgatcgacatccaaaatgcaagtacattgctcgctcattatcacaacaagaagatgaaaccgaacccaccgaagaatgtcaaaaaacttttacacccagattacttggtgtcatgcctgattctgatgaaaaggtttttttgaaacaaggcccatatggccactatgttcagattggagaggacaaaaagggactgtttccgaaaagggcttccctttccaaggtcaaagatatagactctgttactctagaagatgcaatcgagcttttgcaatatcccaaaattttgggaaaacatcctgaagatgattatcctgtacttataacacattctaaagttggatacaacatcaagcataggagatctctagctctagtgccaaagagtgttgacccaaagaagatgacacttgagcgtgcgctcaagctactaagcggtaaaagtgtcagacgaattggtcgaccgaaggggaaggttgaaaacaaggaacccatggaatggcattagctgcctgcactcgttacaagatcctaaacgtgtgtggtttgatagtcagtcagccttatatccatgcaaaaaattcagagagaagtcaatattcatagcatccgaggttcagcctttggtgtgcttaactgcttatgatgagagcggagaaggcaatgtgtgacaaagaatctggtcaacaagaacaaggactgtcctccgctaactgataacttatactccctcagtgccaagtgttgttctcgctttcggagtagtcaaatatatacaacgacaacatagtcttttgtcccactgcaagaaaaaggatagaaaaaaacgctgaaaaggtaaatgaaagacggtagagttaatggtaaccctgcctatgagttgtcaggttattctcattctttaacagccatgcggttagagatcactttctcctttctcctactgcttggaaactcagcatggcttcgtgttctattttactgccattggggtccacatttgggactcatgtttgtccggtgaattgagtttctatttttttacacttataaatctcactctatcttgttttttgatactatctaaaataatcgatgaattatgaccccttcatgcgtactataattagttatttttaaacttaggtaagtgctttaccaacatatgtagtgtagtaaaaacatggaatttgac

SEQ ID NO: 79806 - DNA, 4255 bp, Zea Mays
cccgtcccccaaccgtccatctccaaacaagcgagtcggttagatatttcctcaagccccagtcagccgcctcctctccctcccacagctcctgccgccgcctctccctccgtcggtatctcccacctcgcaatccactcccacctcccccctcgcccctaaaaccctagctaaacccaagccgaaagaaacaatggctctcctcgcctaagcgagctcgcgcccgccccttgctggccatggcgctccagctccgccgcttcctcccgcacggctacggccagcgacaccgcgctgtcacccacgtgctatcaccgccgccgccactcgcgatgcttcagttcgaggtgtttcagagatattcttccgcaccctggcccttgtcacctttccgcccttgtgaaatgtgtggggttgcattcaggagcaattcaacaaggaaaatgtgctcgagaaatatttttggggttgcatcacagcccaaaagtagcaccttttttactactggactctctggcaaccgtagctctgtatgtttcagagcgagggacagccgtggaattgctttaaagactaataatattgttaattcacgaccattctcaactatatacagtaaaaagctaaggtttcttattaaaaataagacttcatgcaataatctaaatgtgagaagggaagatggaagtgttgcacatagtttgttttgtagatctgagaaacgccaaagcacagttgctacgtgtagcaccattgctgacgaggcttcaacatctactagtaacagcagcaagagtgttactgattctaagactgacactgccaagatgaggcgttcaagaggaagcaaaaaagaagttgatggagttatgaaagataaggaagtacataccaagaaaaagagaatatcttctagaacttgtatagctgcaacaaagacgactgagagttctagtgcgaagcaagaaaacaagaagactgataattgtaaactgaaaaagggtactgatagtcctaaagagaaaaaagtgaataataggtcaaagtcaaaagcaaaggtttctgcttcttctgtatcttctgaagctgagatttgtatgaaatcctctatcgatggttctggtattgagaaaaagccactggtgccattgtatcctccgagagccaaatcagtcgtggttgtggaatcagccacgaaagcaaaagttattcagaattatcttggggacatgtatgaagtgttaccaagctatggtcatgtgagagatttagcaggtagatcaaaatctgtccgccctaatgatgacttcagcatggtctgggaggtgcctgctgctgcctggacacaccttaagagcattaaagttgcactgaaaggagcagaaaatttaattcttgcatctgatcctgatcgtgaaggtgaagcgattgcttggcacatcaaagaaatgcttgaacaacaaggtgcattgggctgtgatgtgactgttgcaagagttgttttccatgaaataactgagaatgcaataaaaaaggctttaatgtccccaaggtatattgatatggacttggtcaatgcttatcttgcacgccgttcccttgattatgtaattgggtttggcatatcaccacttctgtggaggaagttgcctggttgccaatcagctggacgggtccaatctgctgctttggcccttgtgtgcgatcgagaatctgaaatagaacagtttaagccacaggaatactggacagtacgggcagacttcaaaatgcaatttgcagatctgtcaaatggcacatgtattccatttcatataaagcatttgaattcaaaaaagctgggtcaactttccataccctctcaagaagaagcgcaagctatagaaaaaaggattcattcttctaagtttgaagttttaggtgttaaaagaagtaaaattcacaagaatcctccaatgccatatattacatccagccttcagcaggatgcagcaaacaaacttcattttactgcagggtataccatgaagattgcccaaaagctttatgagggtatcaatctttcctcagaagaaacaactgggttaataacatacataagaactgatgggtttcatatttctgatggagccgcagaagacatccgttcattagtcaaagaaagatacggccagaagtacgttttagaggacactaggaagtatttaaagaaggtgaaaaatgctcaagaagcccacgaagcaattaggcccaccagtataaggaggttgccatcatctttggttggaatacttgacgatgattctctaaaactgtacactctaatatggaaaaggacaatggcttgccaaatggaagcttctagaactcagatgattcaagtggatgttggcactcctgaaggagagatgatttttcattcagctgcatcaaagctagacttcaagggataccaatctgtttatgaggacactgagggagattctgtgcatgaggataactttgaggccttgtcaaaattaatggttaaggacttggtgtcccctgttaacgtgcatcttggacagcactttactaagccaccatcacgttattctgagggtgcattgattaaaaagctagaagaacttggaattggaaggccatctacttatgcatctataatgaaagtattacaggataggaagtacgtgacagcaaaaagtcgagttctacaccctgagttccgtggtcgaatggtctcggcattccttttgcaccatttctctgaggttgctgattacagctttacagctaacatggagacagagctagataatgtctctgctgggctaactgaatggaagggtcttctaaaaggctactgggaacgattcagcaaatattgtgcagatgcgagtaatctggatggcagaaagaggtagagagaatgctcgaagaaaaatttggtcctatcctcttccctaatgttgacacagacaatagaatttgccctagttgttctgaaggaaccttgagattcaaagttagtaggtatggtgaaggctattttataggctgtgatcgacatccaaaatgcaagtacattgctcgctcattatcacaacaagaagatgaaaccgaacccaccgaagaatgtcaaaaaacttttacacccagattacttggtgtcatgcctgattctgatgaaaaggtttttttgaaacaaggcccatatggccactatgttcagattggagaggacaaaaagggactgtttccgaaaagggcttccctttccaaggtcaaagatatagactctgttactctagaagatgcaatcgagcttttgcaatatcccaaaattttgggaaaacatcctgaagatgattatcctgtacttataacacattctaaagttggatacaacatcaagcataggagatctctagctctagtgccaaagagtgttgacccaaagaagatgacacttgagcgtgcgctcaagctactaagcggtaaaagtgtcagacgaattggtcgaccgaaggggaaggttgaaaacaaggaacccatggaatggcattagctgcctgcactcgttacaagatcctaaacgtgtgtggtttgatagtcagtcagccttatatccatgcaaaaaattcagagagaagtcaatattcatagcatccgaggttcagcctttggtgtgcttaactgcttatgatgagagcggagaaggcaatgtgtgacaaagaatctggtcaacaagaacaaggactgtcctccgctaactgataacttatactccctcagtgccaagtgttgttctcgctttcggagtagtcaaatatatacaacgacaacatagtcttttgtcccactgcaagaaaaaggatagaaaaaaacgctgaaaaggtaaatgaaagacggtagagttaatggtaaccctgcctatgagttgtcaggttattctcattctttaacagccatgcggttagagatcactttctcctttctcctactgcttggaaactcagcatggcttcgtgttctattttactgccattggggtccacatttgggactcatgtttgtccggtgaattgagtttctatttttttacacttataaatctcactctatcttgttttttgatactatctaaaataatcgatgaattatgaccccttcatgcgtactataattagttatttttaaacttaggtaagtgctttaccaacatatgtagtgtagtaaaaacatggaatttgac

SEQ ID NO: 79807 - DNA, 3008 bp, Zea Mays
cgtcccccaaccgtccatctccaaacaagcgagtcggttagatatttcctcaagccccagtcagccgcctcctctccctcccacagctcctgccgccgcctctccctccgtcggtatctcccacctcgcaatccactcccacctcccccctcgcccctaaaaccctagctaaacccaagccgaaagaaacaatggctctcctcgcctaagcgagctcgcgcccgccccttgctggccatggcgctccagctccgccgcttcctcccgcacggctacggccagcgacaccgcgctgtcacccacgtgctatcaccgccgccgccactcgcgatgcttcagttcgaggtgtttcagagatattcttccgcaccctggcccttgtcacctttccgcccttgtgaaatgtgtggggttgcattcaggagcaattcaacaaggaaaatgtgctcgagaaatatttttggggttgcatcacagcccaaaagtagcaccttttttactactggactctctggcaaccgtagctctgtatgtttcagagcgagggacagccgtggaattgctttaaagactaataatattgttaattcacgaccattctcaactatatacagtaaaaagctaaggtttcttattaaaaataagacttcatgcaataatctaaatgtgagaagggaagatggaagtgttgcacatagtttgttttgtagatctgagaaacgccaaagcacagttgctacgtgtagcaccattgctgacgaggcttcaacatctactagtaacagcagcaagagtgttactgattctaagactgacactgccaagatgaggcgttcaagaggaagcaaaaaagaagttgatggagttatgaaagataaggaagtacataccaagaaaaagagaatatcttctagaacttgtatagctgcaacaaagacgactgagagttctagtgcgaagcaagaaaacaagaagactgataattgtaaactgaaaaagggtactgatagtcctaaagagaaaaaagtgaataataggtcaaagtcaaaagcaaaggtttctgcttcttctgtatcttctgaagctgagatttgtatgaaatcctctatcgatggttctggtattgagaaaaagccactggtgccattgtatcctccgagagccaaatcagtcgtggttgtggaatcagccacgaaagcaaaagttattcagaattatcttggggacatgtatgaagtgttaccaagctatggtcatgtgagagatttagcaggtagatcaaaatctgtccgccctaatgatgacttcagcatggtctgggaggtgcctgctgctgcctggacacaccttaagagcattaaagttgcactgaaaggagcagaaaatttaattcttgcatctgatcctgatcgtgaaggtgaagcgattgcttggcacatcaaagaaatgcttgaacaacaaggtgcattgggctgtgatgtgactgttgcaagagttgttttccatgaaataactgagaatgcaataaaaaaggctttaatgtccccaaggtatattgatatggacttggtcaatgcttatcttgcacgccgttcccttgattatgtaattgggtttggcatatcaccacttctgtggaggaagttgcctggttgccaatcagctggacgggtccaatctgctgctttggcccttgtgtgcgatcgagaatctgaaatagaacagtttaagccacaggaatactggacaattgcccaaaagctttatgagggtatcaatctttcctcagaagaaacaactgggttaataacatacataagaactgatgggtttcatatttctgatggagccgcagaagacatccgttcattagtcaaagaaagatacggccagaagtacgttttagaggacactaggaagtatttaaagaaggtgaaaaatgctcaagaagcccacgaagcaattaggcccaccagtataaggaggttgccatcatctttggttggaatacttgacgatgattctctaaaactgtacactctaatatggaaaaggacaatggcttgccaaatggaagcttctagaactcagatgattcaagtggatgttggcactcctgaaggagagatgatttttcattcagctgcatcaaagctagacttcaagggataccaatctgtttatgaggacactgagggagattctgtgcatgaggataactttgaggccttgtcaaaattaatggttaaggacttggtgtcccctgttaacgtgcatcttggacagcactttactaagccaccatcacgttattctgagggtgcattgattaaaaagctagaagaacttggaattggaaggccatctacttatgcatctataatgaaagtattacaggataggaagtacgtgacagcaaaaagtcgagttctacaccctgagttccgtggtcgaatggtctcggcattccttttgcaccatttctctgaggttgctgattacagctttacagctaacatggagacagagctagataatgtctctgctgggctaactgaatggaagggtcttctaaaaggctactgggaacgattcagcaaatattgtgcagatgcgagtaatctggatggcagaaaggtagagagaatgctcgaagaaaaatttggtcctatcctcttccctaatgttgacacagacaatagaatttgccctaggtacattgctcgctcattatcacaacaagaagatgaaaccgaacccaccgaagaatgtcaaaaaacttttacacccagattacttggtgtcatgcctgattctgatgaaaaggattggtgttgccaatgaaatctgttaagaatctatggcagaccaataggataggaattggttcacaataacataacaccccgacttcctaacaaaaatgtggccacttagtcactcatcgctcacaatcgcccacgccggggtacacccacggcaaagacctgcgaccgtgtcgggggaca

SEQ ID NO: 79808 - DNA, 3092 bp, Zea Mays
cgtcccccaaccgtccatctccaaacaagcgagtcggttagatatttcctcaagccccagtcagccgcctcctctccctcccacagctcctgccgccgcctctccctccgtcggtatctcccacctcgcaatccactcccacctcccccctcgcccctaaaaccctagctaaacccaagccgaaagaaacaatggctctcctcgcctaagcgagctcgcgcccgccccttgctggccatggcgctccagctccgccgcttcctcccgcacggctacggccagcgacaccgcgctgtcacccacgtgctatcaccgccgccgccactcgcgatgcttcagttcgaggtgtttcagagatattcttccgcaccctggcccttgtcacctttccgcccttgtgaaatgtgtggggttgcattcaggagcaattcaacaaggaaaatgtgctcgagaaatatttttggggttgcatcacagcccaaaagtagcaccttttttactactggactctctggcaaccgtagctctgtatgtttcagagcgagggacagccgtggaattgctttaaagactaataatattgttaattcacgaccattctcaactatatacagtaaaaagctaaggtttcttattaaaaataagacttcatgcaataatctaaatgtgagaagggaagatggaagtgttgcacatagtttgttttgtagatctgagaaacgccaaagcacagttgctacgtgtagcaccattgctgacgaggcttcaacatctactagtaacagcagcaagagtgttactgattctaagactgacactgccaagatgaggcgttcaagaggaagcaaaaaagaagttgatggagttatgaaagataaggaagtacataccaagaaaaagagaatatcttctagaacttgtatagctgcaacaaagacgactgagagttctagtgcgaagcaagaaaacaagaagactgataattgtaaactgaaaaagggtactgatagtcctaaagagaaaaaagtgaataataggtcaaagtcaaaagcaaaggtttctgcttcttctgtatcttctgaagctgagatttgtatgaaatcctctatcgatggttctggtattgagaaaaagccactggtgccattgtatcctccgagagccaaatcagtcgtggttgtggaatcagccacgaaagcaaaagttattcagaattatcttggggacatgtatgaagtgttaccaagctatggtcatgtgagagatttagcaggtagatcaaaatctgtccgccctaatgatgacttcagcatggtctgggaggtgcctgctgctgcctggacacaccttaagagcattaaagttgcactgaaaggagcagaaaatttaattcttgcatctgatcctgatcgtgaaggtgaagcgattgcttggcacatcaaagaaatgcttgaacaacaaggtgcattgggctgtgatgtgactgttgcaagagttgttttccatgaaataactgagaatgcaataaaaaaggctttaatgtccccaaggtatattgatatggacttggtcaatgcttatcttgcacgccgttcccttgattatgtaattgggtttggcatatcaccacttctgtggaggaagttgcctggttgccaatcagctggacgggtccaatctgctgctttggcccttgtgtgcgatcgagaatctgaaatagaacagtttaagccacaggaatactggacaattgcccaaaagctttatgagggtatcaatctttcctcagaagaaacaactgggttaataacatacataagaactgatgggtttcatatttctgatggagccgcagaagacatccgttcattagtcaaagaaagatacggccagaagtacgttttagaggacactaggaagtatttaaagaaggtgaaaaatgctcaagaagcccacgaagcaattaggcccaccagtataaggaggttgccatcatctttggttggaatacttgacgatgattctctaaaactgtacactctaatatggaaaaggacaatggcttgccaaatggaagcttctagaactcagatgattcaagtggatgttggcactcctgaaggagagatgatttttcattcagctgcatcaaagctagacttcaagggataccaatctgtttatgaggacactgagggagattctgtgcatgaggataactttgaggccttgtcaaaattaatggttaaggacttggtgtcccctgttaacgtgcatcttggacagcactttactaagccaccatcacgttattctgagggtgcattgattaaaaagctagaagaacttggaattggaaggccatctacttatgcatctataatgaaagtattacaggataggaagtacgtgacagcaaaaagtcgagttctacaccctgagttccgtggtcgaatggtctcggcattccttttgcaccatttctctgaggttgctgattacagctttacagctaacatggagacagagctagataatgtctctgctgggctaactgaatggaagggtcttctaaaaggctactgggaacgattcagcaaatattgtgcagatgcgagtaatctggatggcagaaaggtagagagaatgctcgaagaaaaatttggtcctatcctcttccctaatgttgacacagacaatagaatttgccctagttgttctgaaggaaccttgagattcaaagttagtaggtatggtgaaggctattttataggctgtgatcgacatccaaaatgcaagtacattgctcgctcattatcacaacaagaagatgaaaccgaacccaccgaagaatgtcaaaaaacttttacacccagattacttggtgtcatgcctgattctgatgaaaaggattggtgttgccaatgaaatctgttaagaatctatggcagaccaataggataggaattggttcacaataacataacaccccgacttcctaacaaaaatgtggccacttagtcactcatcgctcacaatcgcccacgccggggtacacccacggcaaagacctgcgaccgtgtcgggggaca

SEQ ID NO: 79809 - DNA, 3972 bp, Zea Mays
cgtcccccaaccgtccatctccaaacaagcgagtcggttagatatttcctcaagccccagtcagccgcctcctctccctcccacagctcctgccgccgcctctccctccgtcggtatctcccacctcgcaatccactcccacctcccccctcgcccctaaaaccctagctaaacccaagccgaaagaaacaatggctctcctcgcctaagcgagctcgcgcccgccccttgctggccatggcgctccagctccgccgcttcctcccgcacggctacggccagcgacaccgcgctgtcacccacgtgctatcaccgccgccgccactcgcgatgcttcagttcgaggtgtttcagagatattcttccgcaccctggcccttgtcacctttccgcccttgtgaaatgtgtggggttgcattcaggagcaattcaacaaggaaaatgtgctcgagaaatatttttggggttgcatcacagcccaaaagtagcaccttttttactactggactctctggcaaccgtagctctgtatgtttcagagcgagggacagccgtggaattgctttaaagactaataatattgttaattcacgaccattctcaactatatacagtaaaaagctaaggtttcttattaaaaataagacttcatgcaataatctaaatgtgagaagggaagatggaagtgttgcacatagtttgttttgtagatctgagaaacgccaaagcacagttgctacgtgtagcaccattgctgacgaggcttcaacatctactagtaacagcagcaagagtgttactgattctaagactgacactgccaagatgaggcgttcaagaggaagcaaaaaagaagttgatggagttatgaaagataaggaagtacataccaagaaaaagagaatatcttctagaacttgtatagctgcaacaaagacgactgagagttctagtgcgaagcaagaaaacaagaagactgataattgtaaactgaaaaagggtactgatagtcctaaagagaaaaaagtgaataataggtcaaagtcaaaagcaaaggtttctgcttcttctgtatcttctgaagctgagatttgtatgaaatcctctatcgatggttctggtattgagaaaaagccactggtgccattgtatcctccgagagccaaatcagtcgtggttgtggaatcagccacgaaagcaaaagttattcagaattatcttggggacatgtatgaagtgttaccaagctatggtcatgtgagagatttagcaggtagatcaaaatctgtccgccctaatgatgacttcagcatggtctgggaggtgcctgctgctgcctggacacaccttaagagcattaaagttgcactgaaaggagcagaaaatttaattcttgcatctgatcctgatcgtgaaggtgaagcgattgcttggcacatcaaagaaatgcttgaacaacaaggtgcattgggctgtgatgtgactgttgcaagagttgttttccatgaaataactgagaatgcaataaaaaaggctttaatgtccccaaggtatattgatatggacttggtcaatgcttatcttgcacgccgttcccttgattatgtaattgggtttggcatatcaccacttctgtggaggaagttgcctggttgccaatcagctggacgggtccaatctgctgctttggcccttgtgtgcgatcgagaatctgaaatagaacagtttaagccacaggaatactggacaattgcccaaaagctttatgagggtatcaatctttcctcagaagaaacaactgggttaataacatacataagaactgatgggtttcatatttctgatggagccgcagaagacatccgttcattagtcaaagaaagatacggccagaagtacgttttagaggacactaggaagtatttaaagaaggtgaaaaatgctcaagaagcccacgaagcaattaggcccaccagtataaggaggttgccatcatctttggttggaatacttgacgatgattctctaaaactgtacactctaatatggaaaaggacaatggcttgccaaatggaagcttctagaactcagatgattcaagtggatgttggcactcctgaaggagagatgatttttcattcagctgcatcaaagctagacttcaagggataccaatctgtttatgaggacactgagggagattctgtgcatgaggataactttgaggccttgtcaaaattaatggttaaggacttggtgtcccctgttaacgtgcatcttggacagcactttactaagccaccatcacgttattctgagggtgcattgattaaaaagctagaagaacttggaattggaaggccatctacttatgcatctataatgaaagtattacaggataggaagtacgtgacagcaaaaagtcgagttctacaccctgagttccgtggtcgaatggtctcggcattccttttgcaccatttctctgaggttgctgattacagctttacagctaacatggagacagagctagataatgtctctgctgggctaactgaatggaagggtcttctaaaaggctactgggaacgattcagcaaatattgtgcagatgcgagtaatctggatggcagaaaggtagagagaatgctcgaagaaaaatttggtcctatcctcttccctaatgttgacacagacaatagaatttgccctagttgttctgaaggaaccttgagattcaaagttagtaggtatggtgaaggctattttataggctgtgatcgacatccaaaatgcaagtacattgctcgctcattatcacaacaagaagatgaaaccgaacccaccgaagaatgtcaaaaaacttttacacccagattacttggtgtcatgcctgattctgatgaaaaggtttttttgaaacaaggcccatatggccactatgttcagattggagaggacaaaaagggactgtttccgaaaagggcttccctttccaaggtcaaagatatagactctgttactctagaagatgcaatcgagcttttgcaatatcccaaaattttgggaaaacatcctgaagatgattatcctgtacttataacacattctaaagttggatacaacatcaagcataggagatctctagctctagtgccaaagagtgttgacccaaagaagatgacacttgagcgtgcgctcaagctactaagcggtaaaagtgtcagacgaattggtcgaccgaaggggaaggttgaaaacaaggaacccatggaatggcattagctgcctgcactcgttacaagatcctaaacgtgtgtggtttgatagtcagtcagccttatatccatgcaaaaaattcagagagaagtcaatattcatagcatccgaggttcagcctttggtgtgcttaactgcttatgatgagagcggagaaggcaatgtgtgacaaagaatctggtcaacaagaacaaggactgtcctccgctaactgataacttatactccctcagtgccaagtgttgttctcgctttcggagtagtcaaatatatacaacgacaacatagtcttttgtcccactgcaagaaaaaggatagaaaaaaacgctgaaaaggtaaatgaaagacggtagagttaatggtaaccctgcctatgagttgtcaggttattctcattctttaacagccatgcggttagagatcactttctcctttctcctactgcttggaaactcagcatggcttcgtgttctattttactgccattggggtccacatttgggactcatgtttgtccggtgaattgagtttctatttttttacacttataaatctcactctatcttgttttttgatactatctaaaataatcgatgaattatgaccccttcatgcgtactataattagttatttttaaacttaggtaagtgctttaccaacatatgtagtgtagtaaaaacatggaatttgac

SEQ ID NO: 79810 - DNA, 2226 bp, Zea Mays
ccatctccaaacaagcgagtcggttagatatttcctcaagccccagtcagccgcctcctctccctcccacagctcctgccgccgcctctccctccgtcggtatctcccacctcgcaatccactcccacctcccccctcgcccctaaaaccctagctaaacccaagccgaaagaaacaatggctctcctcgcctaagcgagctcgcgcccgccccttgctggccatggcgctccagctccgccgcttcctcccgcacggctacggccagcgacaccgcgctgtcacccacgtgctatcaccgccgccgccactcgcgatgcttcagttcgaggtgtttcagagatattcttccgcaccctggcccttgtcacctttccgcccttgtgaaatgtgtggggttgcattcaggagcaattcaacaaggaaaatgtgctcgagaaatatttttggggttgcatcacagcccaaaagtagcaccttttttactactggactctctggcaaccgtagctctgtatgtttcagagcgagggacagccgtggaattgctttaaagactaataatattgttaattcacgaccattctcaactatatacagtaaaaagctaaggtttcttattaaaaataagacttcatgcaataatctaaatgtgagaagggaagatggaagtgttgcacatagtttgttttgtagatctgagaaacgccaaagcacagttgctacgtgtagcaccattgctgacgaggcttcaacatctactagtaacagcagcaagagtgttactgattctaagactgacactgccaagatgaggcgttcaagaggaagcaaaaaagaagttgatggagttatgaaagataaggaagtacataccaagaaaaagagaatatcttctagaacttgtatagctgcaacaaagacgactgagagttctagtgcgaagcaagaaaacaagaagactgataattgtaaactgaaaaagggtactgatagtcctaaagagaaaaaagtgaataataggtcaaagtcaaaagcaaaggtttctgcttcttctgtatcttctgaagctgagatttgtatgaaatcctctatcgatggttctggtattgagaaaaagccactggtgccattgtatcctccgagagccaaatcagtcgtggttgtggaatcagccacgaaagcaaaagttattcagaattatcttggggacatgtatgaagtgttaccaagctatggtcatgtgagagatttagcaggtagatcaaaatctgtccgccctaatgatgacttcagcatggtctgggaggtgcctgctgctgcctggacacaccttaagagcattaaagttgcactgaaaggagcagaaaatttaattcttgcatctgatcctgatcgtgaaggtgaagcgattgcttggcacatcaaagaaatgcttgaacaacaaggtgcattgggctgtgatgtgactgttgcaagagttgttttccatgaaataactgagaatgcaataaaaaaggctttaatgtccccaaggtatattgatatggacttggtcaatgcttatcttgcacgccgttcccttgattatgtaattgggtttggcatatcaccacttctgtggaggaagttgcctggttgccaatcagctggacgggtccaatctgctgctttggcccttgtgtgcgatcgagaatctgaaatagaacagtttaagccacaggaatactggacagtacgggcagacttcaaaatgcaatttgcagatctgtcaaatggcacatgtattccatttcatataaagcatttgaattcaaaaaagctgggtcaactttccataccctctcaagaagaagcgcaagctatagaaaaaaggattcattcttctaagtttgaagttttaggtgttaaaagaagtaaaattcacaagaatcctccaatgccatatattacatccagccttcagcaggatgcagcaaacaaacttcattttactgcagggtataccatgaagattgcccaaaagctttatgagggtatcaatctttcctcagaagaaacaactgggttaataacatacataagaactgatgggtttcatatttctgatggagccgcagaagacatccgttcattagtcaaagaaagatgaatcgacaactgaagacacattattcaagattttaactgaatcatttaactctttaactggtctggactcttaat

SEQ ID NO: 79811 - DNA, 3357 bp, Zea Mays
ccatctccaaacaagcgagtcggttagatatttcctcaagccccagtcagccgcctcctctccctcccacagctcctgccgccgcctctccctccgtcggtatctcccacctcgcaatccactcccacctcccccctcgcccctaaaaccctagctaaacccaagccgaaagaaacaatggctctcctcgcctaagcgagctcgcgcccgccccttgctggccatggcgctccagctccgccgcttcctcccgcacggctacggccagcgacaccgcgctgtcacccacgtgctatcaccgccgccgccactcgcgatgcttcagttcgaggtgtttcagagatattcttccgcaccctggcccttgtcacctttccgcccttgtgaaatgtgtggggttgcattcaggagcaattcaacaaggaaaatgtgctcgagaaatatttttggggttgcatcacagcccaaaagtagcaccttttttactactggactctctggcaaccgtagctctgtatgtttcagagcgagggacagccgtggaattgctttaaagactaataatattgttaattcacgaccattctcaactatatacagtaaaaagctaaggtttcttattaaaaataagacttcatgcaataatctaaatgtgagaagggaagatggaagtgttgcacatagtttgttttgtagatctgagaaacgccaaagcacagttgctacgtgtagcaccattgctgacgaggcttcaacatctactagtaacagcagcaagagtgttactgattctaagactgacactgccaagatgaggcgttcaagaggaagcaaaaaagaagttgatggagttatgaaagataaggaagtacataccaagaaaaagagaatatcttctagaacttgtatagctgcaacaaagacgactgagagttctagtgcgaagcaagaaaacaagaagactgataattgtaaactgaaaaagggtactgatagtcctaaagagaaaaaagtgaataataggtcaaagtcaaaagcaaaggtttctgcttcttctgtatcttctgaagctgagatttgtatgaaatcctctatcgatggttctggtattgagaaaaagccactggtgccattgtatcctccgagagccaaatcagtcgtggttgtggaatcagccacgaaagcaaaagttattcagaattatcttggggacatgtatgaagtgttaccaagctatggtcatgtgagagatttagcaggtagatcaaaatctgtccgccctaatgatgacttcagcatggtctgggaggtgcctgctgctgcctggacacaccttaagagcattaaagttgcactgaaaggagcagaaaatttaattcttgcatctgatcctgatcgtgaaggtgaagcgattgcttggcacatcaaagaaatgcttgaacaacaaggtgcattgggctgtgatgtgactgttgcaagagttgttttccatgaaataactgagaatgcaataaaaaaggctttaatgtccccaaggtatattgatatggacttggtcaatgcttatcttgcacgccgttcccttgattatgtaattgggtttggcatatcaccacttctgtggaggaagttgcctggttgccaatcagctggacgggtccaatctgctgctttggcccttgtgtgcgatcgagaatctgaaatagaacagtttaagccacaggaatactggacagtacgggcagacttcaaaatgcaatttgcagatctgtcaaatggcacatgtattccatttcatataaagcatttgaattcaaaaaagctgggtcaactttccataccctctcaagaagaagcgcaagctatagaaaaaaggattcattcttctaagtttgaagttttaggtgttaaaagaagtaaaattcacaagaatcctccaatgccatatattacatccagccttcagcaggatgcagcaaacaaacttcattttactgcagggtataccatgaagattgcccaaaagctttatgagggtatcaatctttcctcagaagaaacaactgggttaataacatacataagaactgatgggtttcatatttctgatggagccgcagaagacatccgttcattagtcaaagaaagatacggccagaagtacgttttagaggacactaggaagtatttaaagaaggtgaaaaatgctcaagaagcccacgaagcaattaggcccaccagtataaggaggttgccatcatctttggttggaatacttgacgatgattctctaaaactgtacactctaatatggaaaaggacaatggcttgccaaatggaagcttctagaactcagatgattcaagtggatgttggcactcctgaaggagagatgatttttcattcagctgcatcaaagctagacttcaagggataccaatctgtttatgaggacactgagggagattctgtgcatgaggataactttgaggccttgtcaaaattaatggttaaggacttggtgtcccctgttaacgtgcatcttggacagcactttactaagccaccatcacgttattctgagggtgcattgattaaaaagctagaagaacttggaattggaaggccatctacttatgcatctataatgaaagtattacaggataggaagtacgtgacagcaaaaagtcgagttctacaccctgagttccgtggtcgaatggtctcggcattccttttgcaccatttctctgaggttgctgattacagctttacagctaacatggagacagagctagataatgtctctgctgggctaactgaatggaagggtcttctaaaaggctactgggaacgattcagcaaatattgtgcagatgcgagtaatctggatggcagaaaggtagagagaatgctcgaagaaaaatttggtcctatcctcttccctaatgttgacacagacaatagaatttgccctagttgttctgaaggaaccttgagattcaaagttagtaggtatggtgaaggctattttataggctgtgatcgacatccaaaatgcaagtacattgctcgctcattatcacaacaagaagatgaaaccgaacccaccgaagaatgtcaaaaaacttttacacccagattacttggtgtcatgcctgattctgatgaaaaggattggtgttgccaatgaaatctgttaagaatctatggcagaccaataggataggaattggttcacaataacataacaccccgacttcctaacaaaaatgtggccacttagtcactcatcgctcacaatcgcccacgccggggtacacccacggcaaagacctgcgaccgtgtcgggggaca

SEQ ID NO: 79812 - DNA, 3273 bp, Zea Mays
ccatctccaaacaagcgagtcggttagatatttcctcaagccccagtcagccgcctcctctccctcccacagctcctgccgccgcctctccctccgtcggtatctcccacctcgcaatccactcccacctcccccctcgcccctaaaaccctagctaaacccaagccgaaagaaacaatggctctcctcgcctaagcgagctcgcgcccgccccttgctggccatggcgctccagctccgccgcttcctcccgcacggctacggccagcgacaccgcgctgtcacccacgtgctatcaccgccgccgccactcgcgatgcttcagttcgaggtgtttcagagatattcttccgcaccctggcccttgtcacctttccgcccttgtgaaatgtgtggggttgcattcaggagcaattcaacaaggaaaatgtgctcgagaaatatttttggggttgcatcacagcccaaaagtagcaccttttttactactggactctctggcaaccgtagctctgtatgtttcagagcgagggacagccgtggaattgctttaaagactaataatattgttaattcacgaccattctcaactatatacagtaaaaagctaaggtttcttattaaaaataagacttcatgcaataatctaaatgtgagaagggaagatggaagtgttgcacatagtttgttttgtagatctgagaaacgccaaagcacagttgctacgtgtagcaccattgctgacgaggcttcaacatctactagtaacagcagcaagagtgttactgattctaagactgacactgccaagatgaggcgttcaagaggaagcaaaaaagaagttgatggagttatgaaagataaggaagtacataccaagaaaaagagaatatcttctagaacttgtatagctgcaacaaagacgactgagagttctagtgcgaagcaagaaaacaagaagactgataattgtaaactgaaaaagggtactgatagtcctaaagagaaaaaagtgaataataggtcaaagtcaaaagcaaaggtttctgcttcttctgtatcttctgaagctgagatttgtatgaaatcctctatcgatggttctggtattgagaaaaagccactggtgccattgtatcctccgagagccaaatcagtcgtggttgtggaatcagccacgaaagcaaaagttattcagaattatcttggggacatgtatgaagtgttaccaagctatggtcatgtgagagatttagcaggtagatcaaaatctgtccgccctaatgatgacttcagcatggtctgggaggtgcctgctgctgcctggacacaccttaagagcattaaagttgcactgaaaggagcagaaaatttaattcttgcatctgatcctgatcgtgaaggtgaagcgattgcttggcacatcaaagaaatgcttgaacaacaaggtgcattgggctgtgatgtgactgttgcaagagttgttttccatgaaataactgagaatgcaataaaaaaggctttaatgtccccaaggtatattgatatggacttggtcaatgcttatcttgcacgccgttcccttgattatgtaattgggtttggcatatcaccacttctgtggaggaagttgcctggttgccaatcagctggacgggtccaatctgctgctttggcccttgtgtgcgatcgagaatctgaaatagaacagtttaagccacaggaatactggacagtacgggcagacttcaaaatgcaatttgcagatctgtcaaatggcacatgtattccatttcatataaagcatttgaattcaaaaaagctgggtcaactttccataccctctcaagaagaagcgcaagctatagaaaaaaggattcattcttctaagtttgaagttttaggtgttaaaagaagtaaaattcacaagaatcctccaatgccatatattacatccagccttcagcaggatgcagcaaacaaacttcattttactgcagggtataccatgaagattgcccaaaagctttatgagggtatcaatctttcctcagaagaaacaactgggttaataacatacataagaactgatgggtttcatatttctgatggagccgcagaagacatccgttcattagtcaaagaaagatacggccagaagtacgttttagaggacactaggaagtatttaaagaaggtgaaaaatgctcaagaagcccacgaagcaattaggcccaccagtataaggaggttgccatcatctttggttggaatacttgacgatgattctctaaaactgtacactctaatatggaaaaggacaatggcttgccaaatggaagcttctagaactcagatgattcaagtggatgttggcactcctgaaggagagatgatttttcattcagctgcatcaaagctagacttcaagggataccaatctgtttatgaggacactgagggagattctgtgcatgaggataactttgaggccttgtcaaaattaatggttaaggacttggtgtcccctgttaacgtgcatcttggacagcactttactaagccaccatcacgttattctgagggtgcattgattaaaaagctagaagaacttggaattggaaggccatctacttatgcatctataatgaaagtattacaggataggaagtacgtgacagcaaaaagtcgagttctacaccctgagttccgtggtcgaatggtctcggcattccttttgcaccatttctctgaggttgctgattacagctttacagctaacatggagacagagctagataatgtctctgctgggctaactgaatggaagggtcttctaaaaggctactgggaacgattcagcaaatattgtgcagatgcgagtaatctggatggcagaaaggtagagagaatgctcgaagaaaaatttggtcctatcctcttccctaatgttgacacagacaatagaatttgccctaggtacattgctcgctcattatcacaacaagaagatgaaaccgaacccaccgaagaatgtcaaaaaacttttacacccagattacttggtgtcatgcctgattctgatgaaaaggattggtgttgccaatgaaatctgttaagaatctatggcagaccaataggataggaattggttcacaataacataacaccccgacttcctaacaaaaatgtggccacttagtcactcatcgctcacaatcgcccacgccggggtacacccacggcaaagacctgcgaccgtgtcgggggaca

SEQ ID NO: 79813 - DNA, 2377 bp, Zea Mays
ctccaaacaagcgagtcggttagatatttcctcaagccccagtcagccgcctcctctccctcccacagctcctgccgccgcctctccctccgtcggtatctcccacctcgcaatccactcccacctcccccctcgcccctaaaaccctagctaaacccaagccgaaagaaacaatggctctcctcgcctaagcgagctcgcgcccgccccttgctggccatggcgctccagctccgccgcttcctcccgcacggctacggccagcgacaccgcgctgtcacccacgtgctatcaccgccgccgccactcgcgatgcttcagttcgaggtgtttcagagatattcttccgcaccctggcccttgtcacctttccgcccttgtgaaatgtgtggggttgcattcaggagcaattcaacaaggaaaatgtgctcgagaaatatttttggggttgcatcacagcccaaaagtagcaccttttttactactggactctctggcaaccgtagctctgtatgtttcagagcgagggacagccgtggaattgctttaaagactaataatattgttaattcacgaccattctcaactatatacagtaaaaagctaaggtttcttattaaaaataagacttcatgcaataatctaaatgtgagaagggaagatggaagtgttgcacatagtttgttttgtagatctgagaaacgccaaagcacagttgctacgtgtagcaccattgctgacgaggcttcaacatctactagtaacagcagcaagagtgttactgattctaagactgacactgccaagatgaggcgttcaagaggaagcaaaaaagaagttgatggagttatgaaagataaggaagtacataccaagaaaaagagaatatcttctagaacttgtatagctgcaacaaagacgactgagagttctagtgcgaagcaagaaaacaagaagactgataattgtaaactgaaaaagggtactgatagtcctaaagagaaaaaagtgaataataggtcaaagtcaaaagcaaaggtttctgcttcttctgtatcttctgaagctgagatttgtatgaaatcctctatcgatggttctggtattgagaaaaagccactggtgccattgtatcctccgagagccaaatcagtcgtggttgtggaatcagccacgaaagcaaaagttattcagaattatcttggggacatgtatgaagtgttaccaagctatggtcatgtgagagatttagcaggtagatcaaaatctgtccgccctaatgatgacttcagcatggtctgggaggtgcctgctgctgcctggacacaccttaagagcattaaagttgcactgaaaggagcagaaaatttaattcttgcatctgatcctgatcgtgaaggtgaagcgattgcttggcacatcaaagaaatgcttgaacaacaaggtgcattgggctgtgatgtgactgttgcaagagttgttttccatgaaataactgagaatgcaataaaaaaggctttaatgtccccaaggtatattgatatggacttggtcaatgcttatcttgcacgccgttcccttgattatgtaattgggtttggcatatcaccacttctgtggaggaagttgcctggttgccaatcagctggacgggtccaatctgctgctttggcccttgtgtgcgatcgagaatctgaaatagaacagtttaagccacaggaatactggacagtacgggcagacttcaaaatgcaatttgcagatctgtcaaatggcacatgtattccatttcatataaagcatttgaattcaaaaaagctgggtcaactttccataccctctcaagaagaagcgcaagctatagaaaaaaggattcattcttctaagtttgaagttttaggtgttaaaagaagtaaaattcacaagaatcctccaatgccatatattacatccagccttcagcaggatgcagcaaacaaacttcattttactgcagggtataccatgaagattgcccaaaagctttatgagggtatcaatctttcctcagaagaaacaactgggttaataacatacataagaactgatgggtttcatatttctgatggagccgcagaagacatccgttcattagtcaaagaaagatacggccagaagtacgttttagaggacactaggaagtatttaaagaaggtgaaaaatgctcaagaagcccacgaagcaattaggcccaccagtataaggaggttgccatcatctttggttggaatacttgacgatgattctctaaaactgtacactctaatatggaaaaggacaatggcttgccaaatggaagcttctagaactcagatggcatgctgatggaaaaaggatg

SEQ ID NO: 79814 - DNA, 1409 bp, Zea Mays
gtcggttagatatttcctcaagccccagtcagccgcctcctctccctcccacagctcctgccgccgcctctccctccgtcggtatctcccacctcgcaatccactcccacctcccccctcgcccctaaaaccctagctaaacccaagccgaaagaaacaatggctctcctcgcctaagcgagctcgcgcccgccccttgctggccatggcgctccagctccgccgcttcctcccgcacggctacggccagcgacaccgcgctgtcacccacgtgctatcaccgccgccgccactcgcgatgcttcagttcgaggtgtttcagagatattcttccgcaccctggcccttgtcacctttccgcccttgtgaaatgtgtggggttgcattcaggagcaattcaacaaggaaaatgtgctcgagaaatatttttggggttgcatcacagcccaaaagtagcaccttttttactactggactctctggcaaccgtagctctgtatgtttcagagcgagggacagccgtggaattgctttaaagactaataatattgttaattcacgaccattctcaactatatacagtaaaaagctaaggtttcttattaaaaataagacttcatgcaataatctaaatgtgagaagggaagatggaagtgttgcacatagtttgttttgtagatctgagaaacgccaaagcacagttgctacgtgtagcaccattgctgacgaggcttcaacatctactagtaacagcagcaagagtgttactgattctaagactgacactgccaagatgaggcgttcaagaggaagcaaaaaagaagttgatggagttatgaaagataaggaagtacataccaagaaaaagagaatatcttctagaacttgtatagctgcaacaaagacgactgagagttctagtgcgaagcaagaaaacaagaagactgataattgtaaactgaaaaagggtactgatagtcctaaagagaaaaaagtgaataataggtcaaagtcaaaagcaaaggtttctgcttcttctgtatcttctgaagctgagatttgtatgaaatcctctatcgatggttctggtattgagaaaaagccactggtgccattgtatcctccgagagccaaatcagtcgtggttgtggaatcagccacgaaagcaaaagttattcagaattatcttggggacatgtatgaagtgttaccaagctatggtcatgtgagagatttagcaggtagatcaaaatctgtccgccctaatgatgacttcagcatggtctgggaggtgcctgctgctgcctggacacaccttaagagcattaaagttgcactgaaaggtattactatcatcaattgaagggcaggcctgatgcagtggtgagagctgtttcactgagtcatca

SEQ ID NO: 79815 - DNA, 3261 bp, Zea Mays
gtcggttagatatttcctcaagccccagtcagccgcctcctctccctcccacagctcctgccgccgcctctccctccgtcggtatctcccacctcgcaatccactcccacctcccccctcgcccctaaaaccctagctaaacccaagccgaaagaaacaatggctctcctcgcctaagcgagctcgcgcccgccccttgctggccatggcgctccagctccgccgcttcctcccgcacggctacggccagcgacaccgcgctgtcacccacgtgctatcaccgccgccgccactcgcgatgcttcagttcgaggtgtttcagagatattcttccgcaccctggcccttgtcacctttccgcccttgtgaaatgtgtggggttgcattcaggagcaattcaacaaggaaaatgtgctcgagaaatatttttggggttgcatcacagcccaaaagtagcaccttttttactactggactctctggcaaccgtagctctgtatgtttcagagcgagggacagccgtggaattgctttaaagactaataatattgttaattcacgaccattctcaactatatacagtaaaaagctaaggtttcttattaaaaataagacttcatgcaataatctaaatgtgagaagggaagatggaagtgttgcacatagtttgttttgtagatctgagaaacgccaaagcacagttgctacgtgtagcaccattgctgacgaggcttcaacatctactagtaacagcagcaagagtgttactgattctaagactgacactgccaagatgaggcgttcaagaggaagcaaaaaagaagttgatggagttatgaaagataaggaagtacataccaagaaaaagagaatatcttctagaacttgtatagctgcaacaaagacgactgagagttctagtgcgaagcaagaaaacaagaagactgataattgtaaactgaaaaagggtactgatagtcctaaagagaaaaaagtgaataataggtcaaagtcaaaagcaaaggtttctgcttcttctgtatcttctgaagctgagatttgtatgaaatcctctatcgatggttctggtattgagaaaaagccactggtgccattgtatcctccgagagccaaatcagtcgtggttgtggaatcagccacgaaagcaaaagttattcagaattatcttggggacatgtatgaagtgttaccaagctatggtcatgtgagagatttagcaggtagatcaaaatctgtccgccctaatgatgacttcagcatggtctgggaggtgcctgctgctgcctggacacaccttaagagcattaaagttgcactgaaaggagcagaaaatttaattcttgcatctgatcctgatcgtgaaggtgaagcgattgcttggcacatcaaagaaatgcttgaacaacaaggtgcattgggctgtgatgtgactgttgcaagagttgttttccatgaaataactgagaatgcaataaaaaaggctttaatgtccccaaggtatattgatatggacttggtcaatgcttatcttgcacgccgttcccttgattatgtaattgggtttggcatatcaccacttctgtggaggaagttgcctggttgccaatcagctggacgggtccaatctgctgctttggcccttgtgtgcgatcgagaatctgaaatagaacagtttaagccacaggaatactggacagtacgggcagacttcaaaatgcaatttgcagatctgtcaaatggcacatgtattccatttcatataaagcatttgaattcaaaaaagctgggtcaactttccataccctctcaagaagaagcgcaagctatagaaaaaaggattcattcttctaagtttgaagttttaggtgttaaaagaagtaaaattcacaagaatcctccaatgccatatattacatccagccttcagcaggatgcagcaaacaaacttcattttactgcagggtataccatgaagattgcccaaaagctttatgagggtatcaatctttcctcagaagaaacaactgggttaataacatacataagaactgatgggtttcatatttctgatggagccgcagaagacatccgttcattagtcaaagaaagatacggccagaagtacgttttagaggacactaggaagtatttaaagaaggtgaaaaatgctcaagaagcccacgaagcaattaggcccaccagtataaggaggttgccatcatctttggttggaatacttgacgatgattctctaaaactgtacactctaatatggaaaaggacaatggcttgccaaatggaagcttctagaactcagatgattcaagtggatgttggcactcctgaaggagagatgatttttcattcagctgcatcaaagctagacttcaagggataccaatctgtttatgaggacactgagggagattctgtgcatgaggataactttgaggccttgtcaaaattaatggttgcggttaaggacttggtgtcccctgttaacgtgcatcttggacagcactttactaagccaccatcacgttattctgagggtgcattgattaaaaagctagaagaacttggaattggaaggccatctacttatgcatctataatgaaagtattacaggataggaagtacgtgacagcaaaaagtcgagttctacaccctgagttccgtggtcgaatggtctcggcattccttttgcaccatttctctgaggttgctgattacagctttacagctaacatggagacagagctagataatgtctctgctgggctaactgaatggaagggtcttctaaaaggctactgggaacgattcagcaaatattgtgcagatgcgagtaatctggatggcagaaaggtagagagaatgctcgaagaaaaatttggtcctatcctcttccctaatgttgacacagacaatagaatttgccctaggtacattgctcgctcattatcacaacaagaagatgaaaccgaacccaccgaagaatgtcaaaaaacttttacacccagattacttggtgtcatgcctgattctgatgaaaaggattggtgttgccaatgaaatctgttaagaatctatggcagaccaataggataggaattggttcacaataacataacaccccgacttcctaacaaaaatgtggccacttagtcactcatcgctcacaatcgcccacgccggggtacacccacggcaaagacctgcgaccgtgtcgggggaca

SEQ ID NO: 79816 - DNA, 4210 bp, Zea Mays
gtcggttagatatttcctcaagccccagtcagccgcctcctctccctcccacagctcctgccgccgcctctccctccgtcggtatctcccacctcgcaatccactcccacctcccccctcgcccctaaaaccctagctaaacccaagccgaaagaaacaatggctctcctcgcctaagcgagctcgcgcccgccccttgctggccatggcgctccagctccgccgcttcctcccgcacggctacggccagcgacaccgcgctgtcacccacgtgctatcaccgccgccgccactcgcgatgcttcagttcgaggtgtttcagagatattcttccgcaccctggcccttgtcacctttccgcccttgtgaaatgtgtggggttgcattcaggagcaattcaacaaggaaaatgtgctcgagaaatatttttggggttgcatcacagcccaaaagtagcaccttttttactactggactctctggcaaccgtagctctgtatgtttcagagcgagggacagccgtggaattgctttaaagactaataatattgttaattcacgaccattctcaactatatacagtaaaaagctaaggtttcttattaaaaataagacttcatgcaataatctaaatgtgagaagggaagatggaagtgttgcacatagtttgttttgtagatctgagaaacgccaaagcacagttgctacgtgtagcaccattgctgacgaggcttcaacatctactagtaacagcagcaagagtgttactgattctaagactgacactgccaagatgaggcgttcaagaggaagcaaaaaagaagttgatggagttatgaaagataaggaagtacataccaagaaaaagagaatatcttctagaacttgtatagctgcaacaaagacgactgagagttctagtgcgaagcaagaaaacaagaagactgataattgtaaactgaaaaagggtactgatagtcctaaagagaaaaaagtgaataataggtcaaagtcaaaagcaaaggtttctgcttcttctgtatcttctgaagctgagatttgtatgaaatcctctatcgatggttctggtattgagaaaaagccactggtgccattgtatcctccgagagccaaatcagtcgtggttgtggaatcagccacgaaagcaaaagttattcagaattatcttggggacatgtatgaagtgttaccaagctatggtcatgtgagagatttagcaggtagatcaaaatctgtccgccctaatgatgacttcagcatggtctgggaggtgcctgctgctgcctggacacaccttaagagcattaaagttgcactgaaaggagcagaaaatttaattcttgcatctgatcctgatcgtgaaggtgaagcgattgcttggcacatcaaagaaatgcttgaacaacaaggtgcattgggctgtgatgtgactgttgcaagagttgttttccatgaaataactgagaatgcaataaaaaaggctttaatgtccccaaggtatattgatatggacttggtcaatgcttatcttgcacgccgttcccttgattatgtaattgggtttggcatatcaccacttctgtggaggaagttgcctggttgccaatcagctggacgggtccaatctgctgctttggcccttgtgtgcgatcgagaatctgaaatagaacagtttaagccacaggaatactggacagtacgggcagacttcaaaatgcaatttgcagatctgtcaaatggcacatgtattccatttcatataaagcatttgaattcaaaaaagctgggtcaactttccataccctctcaagaagaagcgcaagctatagaaaaaaggattcattcttctaagtttgaagttttaggtgttaaaagaagtaaaattcacaagaatcctccaatgccatatattacatccagccttcagcaggatgcagcaaacaaacttcattttactgcagggtataccatgaagattgcccaaaagctttatgagggtatcaatctttcctcagaagaaacaactgggttaataacatacataagaactgatgggtttcatatttctgatggagccgcagaagacatccgttcattagtcaaagaaagatacggccagaagtacgttttagaggacactaggaagtatttaaagaaggtgaaaaatgctcaagaagcccacgaagcaattaggcccaccagtataaggaggttgccatcatctttggttggaatacttgacgatgattctctaaaactgtacactctaatatggaaaaggacaatggcttgccaaatggaagcttctagaactcagatgattcaagtggatgttggcactcctgaaggagagatgatttttcattcagctgcatcaaagctagacttcaagggataccaatctgtttatgaggacactgagggagattctgtgcatgaggataactttgaggccttgtcaaaattaatggttaaggacttggtgtcccctgttaacgtgcatcttggacagcactttactaagccaccatcacgttattctgagggtgcattgattaaaaagctagaagaacttggaattggaaggccatctacttatgcatctataatgaaagataggaagtacgtgacagcaaaaagtcgagttctacaccctgagttccgtggtcgaatggtctcggcattccttttgcaccatttctctgaggttgctgattacagctttacagctaacatggagacagagctagataatgtctctgctgggctaactgaatggaagggtcttctaaaaggctactgggaacgattcagcaaatattgtgcagatgcgagtaatctggatggcagaaaggtagagagaatgctcgaagaaaaatttggtcctatcctcttccctaatgttgacacagacaatagaatttgccctagttgttctgaaggaaccttgagattcaaagttagtaggtatggtgaaggctattttataggctgtgatcgacatccaaaatgcaagtacattgctcgctcattatcacaacaagaagatgaaaccgaacccaccgaagaatgtcaaaaaacttttacacccagattacttggtgtcatgcctgattctgatgaaaaggtttttttgaaacaaggcccatatggccactatgttcagattggagaggacaaaaagggactgtttccgaaaagggcttccctttccaaggtcaaagatatagactctgttactctagaagatgcaatcgagcttttgcaatatcccaaaattttgggaaaacatcctgaagatgattatcctgtacttataacacattctaaagttggatacaacatcaagcataggagatctctagctctagtgccaaagagtgttgacccaaagaagatgacacttgagcgtgcgctcaagctactaagcggtaaaagtgtcagacgaattggtcgaccgaaggggaaggttgaaaacaaggaacccatggaatggcattagctgcctgcactcgttacaagatcctaaacgtgtgtggtttgatagtcagtcagccttatatccatgcaaaaaattcagagagaagtcaatattcatagcatccgaggttcagcctttggtgtgcttaactgcttatgatgagagcggagaaggcaatgtgtgacaaagaatctggtcaacaagaacaaggactgtcctccgctaactgataacttatactccctcagtgccaagtgttgttctcgctttcggagtagtcaaatatatacaacgacaacatagtcttttgtcccactgcaagaaaaaggatagaaaaaaacgctgaaaaggtaaatgaaagacggtagagttaatggtaaccctgcctatgagttgtcaggttattctcattctttaacagccatgcggttagagatcactttctcctttctcctactgcttggaaactcagcatggcttcgtgttctattttactgccattggggtccacatttgggactcatgtttgtccggtgaattgagtttctatttttttacacttataaatctcactctatcttgttttttgatactatctaaaataatcgatgaattatgaccccttcatgcgtactataattagttatttttaaacttaggtaagtgctttaccaacatatgtagtgtagtaaaaacatggaatttgac

SEQ ID NO: 79817 - DNA, 4214 bp, Zea Mays
gtcggttagatatttcctcaagccccagtcagccgcctcctctccctcccacagctcctgccgccgcctctccctccgtcggtatctcccacctcgcaatccactcccacctcccccctcgcccctaaaaccctagctaaacccaagccgaaagaaacaatggctctcctcgcctaagcgagctcgcgcccgccccttgctggccatggcgctccagctccgccgcttcctcccgcacggctacggccagcgacaccgcgctgtcacccacgtgctatcaccgccgccgccactcgcgatgcttcagttcgaggtgtttcagagatattcttccgcaccctggcccttgtcacctttccgcccttgtgaaatgtgtggggttgcattcaggagcaattcaacaaggaaaatgtgctcgagaaatatttttggggttgcatcacagcccaaaagtagcaccttttttactactggactctctggcaaccgtagctctgtatgtttcagagcgagggacagccgtggaattgctttaaagactaataatattgttaattcacgaccattctcaactatatacagtaaaaagctaaggtttcttattaaaaataagacttcatgcaataatctaaatgtgagaagggaagatggaagtgttgcacatagtttgttttgtagatctgagaaacgccaaagcacagttgctacgtgtagcaccattgctgacgaggcttcaacatctactagtaacagcagcaagagtgttactgattctaagactgacactgccaagatgaggcgttcaagaggaagcaaaaaagaagttgatggagttatgaaagataaggaagtacataccaagaaaaagagaatatcttctagaacttgtatagctgcaacaaagacgactgagagttctagtgcgaagcaagaaaacaagaagactgataattgtaaactgaaaaagggtactgatagtcctaaagagaaaaaagtgaataataggtcaaagtcaaaagcaaaggtttctgcttcttctgtatcttctgaagctgagatttgtatgaaatcctctatcgatggttctggtattgagaaaaagccactggtgccattgtatcctccgagagccaaatcagtcgtggttgtggaatcagccacgaaagcaaaagttattcagaattatcttggggacatgtatgaagtgttaccaagctatggtcatgtgagagatttagcaggtagatcaaaatctgtccgccctaatgatgacttcagcatggtctgggaggtgcctgctgctgcctggacacaccttaagagcattaaagttgcactgaaaggagcagaaaatttaattcttgcatctgatcctgatcgtgaaggtgaagcgattgcttggcacatcaaagaaatgcttgaacaacaaggtgcattgggctgtgatgtgactgttgcaagagttgttttccatgaaataactgagaatgcaataaaaaaggctttaatgtccccaaggtatattgatatggacttggtcaatgcttatcttgcacgccgttcccttgattatgtaattgggtttggcatatcaccacttctgtggaggaagttgcctggttgccaatcagctggacgggtccaatctgctgctttggcccttgtgtgcgatcgagaatctgaaatagaacagtttaagccacaggaatactggacagtacgggcagacttcaaaatgcaatttgcagatctgtcaaatggcacatgtattccatttcatataaagcatttgaattcaaaaaagctgggtcaactttccataccctctcaagaagaagcgcaagctatagaaaaaaggattcattcttctaagtttgaagttttaggtgttaaaagaagtaaaattcacaagaatcctccaatgccatatattacatccagccttcagcaggatgcagcaaacaaacttcattttactgcagggtataccatgaagattgcccaaaagctttatgagggtatcaatctttcctcagaagaaacaactgggttaataacatacataagaactgatgggtttcatatttctgatggagccgcagaagacatccgttcattagtcaaagaaagatacggccagaagtacgttttagaggacactaggaagtatttaaagaaggtgaaaaatgctcaagaagcccacgaagcaattaggcccaccagtataaggaggttgccatcatctttggttggaatacttgacgatgattctctaaaactgtacactctaatatggaaaaggacaatggcttgccaaatggaagcttctagaactcagatgattcaagtggatgttggcactcctgaaggagagatgatttttcattcagctgcatcaaagctagacttcaagggataccaatctgtttatgaggacactgagggagattctgtgcatgaggataactttgaggccttgtcaaaattaatggttaaggacttggtgtcccctgttaacgtgcatcttggacagcactttactaagccaccatcacgttattctgagggtgcattgattaaaaagctagaagaacttggaattggaaggccatctacttatgcatctataatgaaagtattacaggaagtacgtgacagcaaaaagtcgagttctacaccctgagttccgtggtcgaatggtctcggcattccttttgcaccatttctctgaggttgctgattacagctttacagctaacatggagacagagctagataatgtctctgctgggctaactgaatggaagggtcttctaaaaggctactgggaacgattcagcaaatattgtgcagatgcgagtaatctggatggcagaaaggtagagagaatgctcgaagaaaaatttggtcctatcctcttccctaatgttgacacagacaatagaatttgccctagttgttctgaaggaaccttgagattcaaagttagtaggtatggtgaaggctattttataggctgtgatcgacatccaaaatgcaagtacattgctcgctcattatcacaacaagaagatgaaaccgaacccaccgaagaatgtcaaaaaacttttacacccagattacttggtgtcatgcctgattctgatgaaaaggtttttttgaaacaaggcccatatggccactatgttcagattggagaggacaaaaagggactgtttccgaaaagggcttccctttccaaggtcaaagatatagactctgttactctagaagatgcaatcgagcttttgcaatatcccaaaattttgggaaaacatcctgaagatgattatcctgtacttataacacattctaaagttggatacaacatcaagcataggagatctctagctctagtgccaaagagtgttgacccaaagaagatgacacttgagcgtgcgctcaagctactaagcggtaaaagtgtcagacgaattggtcgaccgaaggggaaggttgaaaacaaggaacccatggaatggcattagctgcctgcactcgttacaagatcctaaacgtgtgtggtttgatagtcagtcagccttatatccatgcaaaaaattcagagagaagtcaatattcatagcatccgaggttcagcctttggtgtgcttaactgcttatgatgagagcggagaaggcaatgtgtgacaaagaatctggtcaacaagaacaaggactgtcctccgctaactgataacttatactccctcagtgccaagtgttgttctcgctttcggagtagtcaaatatatacaacgacaacatagtcttttgtcccactgcaagaaaaaggatagaaaaaaacgctgaaaaggtaaatgaaagacggtagagttaatggtaaccctgcctatgagttgtcaggttattctcattctttaacagccatgcggttagagatcactttctcctttctcctactgcttggaaactcagcatggcttcgtgttctattttactgccattggggtccacatttgggactcatgtttgtccggtgaattgagtttctatttttttacacttataaatctcactctatcttgttttttgatactatctaaaataatcgatgaattatgaccccttcatgcgtactataattagttatttttaaacttaggtaagtgctttaccaacatatgtagtgtagtaaaaacatggaatttgac

SEQ ID NO: 79818 - DNA, 4058 bp, Zea Mays
gtcggttagatatttcctcaagccccagtcagccgcctcctctccctcccacagctcctgccgccgcctctccctccgtcggtatctcccacctcgcaatccactcccacctcccccctcgcccctaaaaccctagctaaacccaagccgaaagaaacaatggctctcctcgcctaagcgagctcgcgcccgccccttgctggccatggcgctccagctccgccgcttcctcccgcacggctacggccagcgacaccgcgctgtcacccacgtgctatcaccgccgccgccactcgcgatgcttcagttcgaggtgtttcagagatattcttccgcaccctggcccttgtcacctttccgcccttgtgaaatgtgtggggttgcattcaggagcaattcaacaaggaaaatgtgctcgagaaatatttttggggttgcatcacagcccaaaagtagcaccttttttactactggactctctggcaaccgtagctctgtatgtttcagagcgagggacagccgtggaattgctttaaagactaataatattgttaattcacgaccattctcaactatatacagtaaaaagctaaggtttcttattaaaaataagacttcatgcaataatctaaatgtgagaagggaagatggaagtgttgcacatagtttgttttgtagatctgagaaacgccaaagcacagttgctacgtgtagcaccattgctgacgaggcttcaacatctactagtaacagcagcaagagtgttactgattctaagactgacactgccaagatgaggcgttcaagaggaagcaaaaaagaagttgatggagttatgaaagataaggaagtacataccaagaaaaagagaatatcttctagaacttgtatagctgcaacaaagacgactgagagttctagtgcgaagcaagaaaacaagaagactgataattgtaaactgaaaaagggtactgatagtcctaaagagaaaaaagtgaataataggtcaaagtcaaaagcaaaggtttctgcttcttctgtatcttctgaagctgagatttgtatgaaatcctctatcgatggttctggtattgagaaaaagccactggtgccattgtatcctccgagagccaaatcagtcgtggttgtggaatcagccacgaaagcaaaagttattcagaattatcttggggacatgtatgaagtgttaccaagctatggtcatgtgagagatttagcaggtagatcaaaatctgtccgccctaatgatgacttcagcatggtctgggaggtgcctgctgctgcctggacacaccttaagagcattaaagttgcactgaaaggagcagaaaatttaattcttgcatctgatcctgatcgtgaaggtgaagcgattgcttggcacatcaaagaaatgcttgaacaacaaggtgcattgggctgtgatgtgactgttgcaagagttgttttccatgaaataactgagaatgcaataaaaaaggctttaatgtccccaaggtatattgatatggacttggtcaatgcttatcttgcacgccgttcccttgattatgtaattgggtttggcatatcaccacttctgtggaggaagttgcctggttgccaatcagctggacgggtccaatctgctgctttggcccttgtgtgcgatcgagaatctgaaatagaacagtttaagccacaggaatactggacagtacgggcagacttcaaaatgcaatttgcagatctgtcaaatggcacatgtattccatttcatataaagcatttgaattcaaaaaagctgggtcaactttccataccctctcaagaagaagcgcaagctatagaaaaaaggattcattcttctaagtttgaagttttaggtgttaaaagaagtaaaattcacaagaatcctccaatgccatatattacatccagccttcagcaggatgcagcaaacaaacttcattttactgcagggtataccatgaagattgcccaaaagctttatgagggtatcaatctttcctcagaagaaacaactgggttaataacatacataagaactgatgggtttcatatttctgatggagccgcagaagacatccgttcattagtcaaagaaagatacggccagaagtacgttttagaggacactaggaagtatttaaagaaggtgaaaaatgctcaagaagcccacgaagcaattaggcccaccagtataaggaggttgccatcatctttggttggaatacttgacgatgattctctaaaactgtacactctaatatggaaaaggacaatggcttgccaaatggaagcttctagaactcagatgattcaagtggatgttggcactcctgaaggagagatgatttttcattcagctgcatcaaagctagacttcaagggataccaatctgtttatgaggacactgagggagattctgtgcatgaggataactttgaggccttgtcaaaattaatggttaaggacttggtgtcccctgttaacgtgcatcttggacagcactttactaagccaccatcacgttattctgagggtgcattgattaaaaagctagaagaacttggaattggaaggccatctacttatgcatctataatgaaagtattacaggataggaagtacgtgacagcaaaaagtcgagttctacaccctgagttccgtggtcgaatggtctcggcattccttttgcaccatttctctgaggttgctgattacagctttacagctaacatggagacagagctagataatgtctctgctgggctaactgaatggaagggtcttctaaaaggctactgggaacgattcagcaaatattgtgcagatgcgagtaatctggatggcagaaaggtacattgctcgctcattatcacaacaagaagatgaaaccgaacccaccgaagaatgtcaaaaaacttttacacccagattacttggtgtcatgcctgattctgatgaaaaggtttttttgaaacaaggcccatatggccactatgttcagattggagaggacaaaaagggactgtttccgaaaagggcttccctttccaaggtcaaagatatagactctgttactctagaagatgcaatcgagcttttgcaatatcccaaaattttgggaaaacatcctgaagatgattatcctgtacttataacacattctaaagttggatacaacatcaagcataggagatctctagctctagtgccaaagagtgttgacccaaagaagatgacacttgagcgtgcgctcaagctactaagcggtaaaagtgtcagacgaattggtcgaccgaaggggaaggttgaaaacaaggaacccatggaatggcattagctgcctgcactcgttacaagatcctaaacgtgtgtggtttgatagtcagtcagccttatatccatgcaaaaaattcagagagaagtcaatattcatagcatccgaggttcagcctttggtgtgcttaactgcttatgatgagagcggagaaggcaatgtgtgacaaagaatctggtcaacaagaacaaggactgtcctccgctaactgataacttatactccctcagtgccaagtgttgttctcgctttcggagtagtcaaatatatacaacgacaacatagtcttttgtcccactgcaagaaaaaggatagaaaaaaacgctgaaaaggtaaatgaaagacggtagagttaatggtaaccctgcctatgagttgtcaggttattctcattctttaacagccatgcggttagagatcactttctcctttctcctactgcttggaaactcagcatggcttcgtgttctattttactgccattggggtccacatttgggactcatgtttgtccggtgaattgagtttctatttttttacacttataaatctcactctatcttgttttttgatactatctaaaataatcgatgaattatgaccccttcatgcgtactataattagttatttttaaacttaggtaagtgctttaccaacatatgtagtgtagtaaaaacatggaatttgac

SEQ ID NO: 79819 - DNA, 4107 bp, Zea Mays
gtcggttagatatttcctcaagccccagtcagccgcctcctctccctcccacagctcctgccgccgcctctccctccgtcggtatctcccacctcgcaatccactcccacctcccccctcgcccctaaaaccctagctaaacccaagccgaaagaaacaatggctctcctcgcctaagcgagctcgcgcccgccccttgctggccatggcgctccagctccgccgcttcctcccgcacggctacggccagcgacaccgcgctgtcacccacgtgctatcaccgccgccgccactcgcgatgcttcagttcgaggtgtttcagagatattcttccgcaccctggcccttgtcacctttccgcccttgtgaaatgtgtggggttgcattcaggagcaattcaacaaggaaaatgtgctcgagaaatatttttggggttgcatcacagcccaaaagtagcaccttttttactactggactctctggcaaccgtagctctgtatgtttcagagcgagggacagccgtggaattgctttaaagactaataatattgttaattcacgaccattctcaactatatacagtaaaaagctaaggtttcttattaaaaataagacttcatgcaataatctaaatgtgagaagggaagatggaagtgttgcacatagtttgttttgtagatctgagaaacgccaaagcacagttgctacgtgtagcaccattgctgacgaggcttcaacatctactagtaacagcagcaagagtgttactgattctaagactgacactgccaagatgaggcgttcaagaggaagcaaaaaagaagttgatggagttatgaaagataaggaagtacataccaagaaaaagagaatatcttctagaacttgtatagctgcaacaaagacgactgagagttctagtgcgaagcaagaaaacaagaagactgataattgtaaactgaaaaagggtactgatagtcctaaagagaaaaaagtgaataataggtcaaagtcaaaagcaaaggtttctgcttcttctgtatcttctgaagctgagatttgtatgaaatcctctatcgatggttctggtattgagaaaaagccactggtgccattgtatcctccgagagccaaatcagtcgtggttgtggaatcagccacgaaagcaaaagttattcagaattatcttggggacatgtatgaagtgttaccaagctatggtcatgtgagagatttagcaggtagatcaaaatctgtccgccctaatgatgacttcagcatggtctgggaggtgcctgctgctgcctggacacaccttaagagcattaaagttgcactgaaaggaaaatttaattcttgcatctgatcctgatcgtgaaggtgaagcgattgcttggcacatcaaagaaatgcttgaacaacaaggtgcattgggctgtgatgtgactgttgcaagagttgttttccatgaaataactgagaatgcaataaaaaaggctttaatgtccccaaggtatattgatatggacttggtcaatgcttatcttgcacgccgttcccttgattatgtaattgggtttggcatatcaccacttctgtggaggaagttgcctggttgccaatcagctggacgggtccaatctgctgctttggcccttgtgtgcgatcgagaatctgaaatagaacagtttaagccacaggaatactggacagtacgggcagacttcaaaatgcaatttgcagatctgtcaaatggcacatgtattccatttcatataaagcatttgaattcaaaaaagctgggtcaactttccataccctctcaagaagaagcgcaagctatagaaaaaaggattcattcttctaagtttgaagttttaggtgttaaaagaagtaaaattcacaagaatcctccaatgccatatattacatccagccttcagcaggatgcagcaaacaaacttcattttactgcagggtataccatgaagattgcccaaaagctttatgagggtatcaatctttcctcagaagaaacaactgggttaataacatacataagaactgatgggtttcatatttctgatggagccgcagaagacatccgttcattagtcaaagaaagatacggccagaagtacgttttagaggacactaggaagtatttaaagaaggtgaaaaatgctcaagaagcccacgaagcaattaggcccaccagtataaggaggttgccatcatctttggttggaatacttgacgatgattctctaaaactgtacactctaatatggaaaaggacaatggcttgccaaatggaagcttctagaactcagatgattcaagtggatgttggcactcctgaaggagagatgatttttcattcagctgcatcaaagctagacttcaagggataccaatctgtttatgaggacactgagggagattctgtgcatgaggataactttgaggccttgtcaaaattaatggttaaggacttggtgtcccctgttaacgtgcatcttggacagcactttactaagccaccatcacgttattctgagggtgcattgattaaaaagctagaagaacttggaattggaaggccatctacttatgcatctataatgaaagtattacagctttacagctaacatggagacagagctagataatgtctctgctgggctaactgaatggaagggtcttctaaaaggctactgggaacgattcagcaaatattgtgcagatgcgagtaatctggatggcagaaaggtagagagaatgctcgaagaaaaatttggtcctatcctcttccctaatgttgacacagacaatagaatttgccctagttgttctgaaggaaccttgagattcaaagttagtaggtatggtgaaggctattttataggctgtgatcgacatccaaaatgcaagtacattgctcgctcattatcacaacaagaagatgaaaccgaacccaccgaagaatgtcaaaaaacttttacacccagattacttggtgtcatgcctgattctgatgaaaaggtttttttgaaacaaggcccatatggccactatgttcagattggagaggacaaaaagggactgtttccgaaaagggcttccctttccaaggtcaaagatatagactctgttactctagaagatgcaatcgagcttttgcaatatcccaaaattttgggaaaacatcctgaagatgattatcctgtacttataacacattctaaagttggatacaacatcaagcataggagatctctagctctagtgccaaagagtgttgacccaaagaagatgacacttgagcgtgcgctcaagctactaagcggtaaaagtgtcagacgaattggtcgaccgaaggggaaggttgaaaacaaggaacccatggaatggcattagctgcctgcactcgttacaagatcctaaacgtgtgtggtttgatagtcagtcagccttatatccatgcaaaaaattcagagagaagtcaatattcatagcatccgaggttcagcctttggtgtgcttaactgcttatgatgagagcggagaaggcaatgtgtgacaaagaatctggtcaacaagaacaaggactgtcctccgctaactgataacttatactccctcagtgccaagtgttgttctcgctttcggagtagtcaaatatatacaacgacaacatagtcttttgtcccactgcaagaaaaaggatagaaaaaaacgctgaaaaggtaaatgaaagacggtagagttaatggtaaccctgcctatgagttgtcaggttattctcattctttaacagccatgcggttagagatcactttctcctttctcctactgcttggaaactcagcatggcttcgtgttctattttactgccattggggtccacatttgggactcatgtttgtccggtgaattgagtttctatttttttacacttataaatctcactctatcttgttttttgatactatctaaaataatcgatgaattatgaccccttcatgcgtactataattagttatttttaaacttaggtaagtgctttaccaacatatgtagtgtagtaaaaacatggaatttgac

SEQ ID NO: 79820 - DNA, 711 bp, Zea Mays
ccttttgcaccatttctctgaggttgctgattacagctttacagctaacatggagacagaggtagtaaacatttctcagttcatggtttctttgtgctttgttttcagtttatgccatagttttagaaacctgcttaagctggctcgttagttgttactgctatgtgttaaaccaatatgagaattcaggaaatcagcgcttaattgacattggtacacttccaattttggtcatgaatattcttggatttaagacatcaggtacaatggtgattgtagttgtgaagctaattgaagacatagttgtcatgtgctcaaaatgctttggtctattatccaagtgtaggtcattttagccttctcaactattctccatatgcaagtaatttgataacttgtaggcattttttatgttctctttctttgtttcccttgctgaataatgtgactcataagttaatgaatcatcactcccacttttccgtcatactatataaatgagggaacaagttcatttaacctactttcttaatcttcgtccaccactctagaacaacctacaattggaagaaatggtagtgatccttttacaagatctttcagtaatatggtagcacgagaattagtttttttttttctgaatgacgcaggatagctacatgtcattccattaagaaaggagtaagaaaaaaatacaagtggtaggccgag

SEQ ID NO: 79821 - DNA, 1686 bp, Zea Mays
atgggggagggagagtcgacacttggcgccggaaagaaggcctcagggaaaacaatgctcgccgccgatgaggaaggaatgctggtgggggcagcgctggtaatagggagaagcaggaagcgggggaaggagatggtgctcccgcccacgctccatggtggggagatgggccaccacagagtgcagaggagagggtggcgaggtagatgtcagcgcctcgaagggagacgtcggggctggtgcaagcacactagggcccggagcagggtggcgcacggagagggtggcacaggcaggcttggaagaggtggcacgagcgcgggaattgaaactgaatttgacattgtgcaggtagagagaatgctcgaagaaaaatttggtcctatcctcttccctaatgttgacacagacaatagaatttgccctagttgttctgaaggaaccttgagattcaaagttagtaggtatggtgaaggctattttataggctgtgatcgacatccaaaatgcaagtacattgctcgctcattatcacaacaagaagatgaaaccgaacccaccgaagaatgtcaaaaaacttttacacccagattacttggtgtcatgcctgattctgatgaaaaggtttttttgaaacaaggcccatatggccactatgttcagattggagaggacaaaaagggactgtttccgaaaagggcttccctttccaaggtcaaagatatagactctgttactctagaagatgcaatcgagcttttgcaatatcccaaaattttgggaaaacatcctgaagatgattatcctgtacttataacacattctaaagttggatacaacatcaagcataggagatctctagctctagtgccaaagagtgttgacccaaagaagatgacacttgagcgtgcgctcaagctactaagcggtaaaagtgtcagacgaattggtcgaccgaaggggaaggttgaaaacaaggaacccatggaatggcattagctgcctgcactcgttacaagatcctaaacgtgtgtggtttgatagtcagtcagccttatatccatgcaaaaaattcagagagaagtcaatattcatagcatccgaggttcagcctttggtgtgcttaactgcttatgatgagagcggagaaggcaatgtgtgacaaagaatctggtcaacaagaacaaggactgtcctccgctaactgataacttatactccctcagtgccaagtgttgttctcgctttcggagtagtcaaatatatacaacgacaacatagtcttttgtcccactgcaagaaaaaggatagaaaaaaacgctgaaaaggtaaatgaaagacggtagagttaatggtaaccctgcctatgagttgtcaggttattctcattctttaacagccatgcggttagagatcactttctcctttctcctactgcttggaaactcagcatggcttcgtgttctattttactgccattggggtccacatttgggactcatgtttgtccggtgaattgagtttctatttttttacacttataaatctcactctatcttgttttttgatactatctaaaataatcgatgaattatgaccccttcatgcgtactataattagttatttttaaacttaggtaagtgctttaccaacatatgtagtgtagtaaaaacatggaatttgac

SEQ ID NO: 79822 - DNA, 404 bp, Zea Mays
cgacaaacatacttttaagttgttctgaaggaaccttgagattcaaagttagtaggtatggtgaaggctattttataggctgtgatcgacatccaaaatgcaagtacattgctcgctcattatcacaacaagaagatgaaaccgaacccaccgaagaatgtcaaaaaacttttacacccagattacttggtgtcatgcctgattctgatgaaaaggtttttttgaaacaaggcccatatggccactatgttcagattggagaggacaaaaagggactgtttccgaaaagggcttccctttccaagcctgcgtgctggttgggcctaaggcttgtaatgggagaacttggagtgtttgagggtggttttggtagaattttctacaagagaacatatgccatgtaa

SEQ ID NO: 79823 - DNA, 386 bp, Zea Mays
cttttaagttgttctgaaggaaccttgagattcaaagttagtaggtatggtgaaggctattttataggctgtgatcgacatccaaaatgcaagtacattgctcgctcattatcacaacaagaagatgaaaccgaacccaccgaagaatgtcaaaaaacttttacacccagattacttggtgtcatgcctgattctgatgaaaaggattggtgttgccaatgaaatctgttaagaatctatggcagaccaataggataggaattggttcacaataacataacaccccgacttcctaacaaaaatgtggccacttagtcactcatcgctcacaatcgcccacgccggggtacacccacggcaaagacctgcgaccgtgtcgggggaca

SEQ ID NO: 79824 - DNA, 1259 bp, Zea Mays
gttgttctgaaggaaccttgagattcaaagttagtaggtatggtgaaggctattttataggctgtgatcgacatccaaaatgcaagtacattgctcgctcattatcacaacaagaagatgaaaccgaacccaccgaagaatgtcaaaaaacttttacacccagattacttggtgtcatgcctgattctgatgaaaaggtttttttgaaacaaggcccatatggccactatgttcagattggagaggacaaaaagggactgtttccgaaaagggcttccctttccaaggtcaaagatatagactctgttactctagaagatgcaatcgagcttttgcaatatcccaaaattttgggaaaacatcctgaagatgattatcctgtacttataacacattctaaagttggatacaacatcaagcataggagatctctagctctagtgccaaagagtgttgacccaaagaagatgacacttgagcgtgcgctcaagctactaagcggtaaaagtgtcagacgaattggtcgaccgaaggggaaggttgaaaacaaggaacccatggaatggcattagctgcctgcactcgttacaagatcctaaacgtgtgtggtttgatagtcagtcagccttatatccatgcaaaaaattcagagagaagtcaatattcatagcatccgaggttcagcctttggtgtgcttaactgcttatgatgagagcggagaaggcaatgtgtgacaaagaatctggtcaacaagaacaaggactgtcctccgctaactgataacttatactccctcagtgccaagtgttgttctcgctttcggagtagtcaaatatatacaacgacaacatagtcttttgtcccactgcaagaaaaaggatagaaaaaaacgctgaaaaggtaaatgaaagacggtagagttaatggtaaccctgcctatgagttgtcaggttattctcattctttaacagccatgcggttagagatcactttctcctttctcctactgcttggaaactcagcatggcttcgtgttctattttactgccattggggtccacatttgggactcatgtttgtccggtgaattgagtttctatttttttacacttataaatctcactctatcttgttttttgatactatctaaaataatcgatgaattatgaccccttcatgcgtactataattagttatttttaaacttaggtaagtgctttaccaacatatgtagtgtagtaaaaacatggaatttgac

SEQ ID NO: 79825 - DNA, 1066 bp, Zea Mays
aatggtttttttgaaacaaggcccatatggccactatgttcagattggagaggacaaaaagggactgtttccgaaaagggcttccctttccaaggtcaaagatatagactctgttactctagaagatgcaatcgagcttttgcaatatcccaaaattttgggaaaacatcctgaagatgattatcctgtacttataacacattctaaagttggatacaacatcaagcataggagatctctagctctagtgccaaagagtgttgacccaaagaagatgacacttgagcgtgcgctcaagctactaagcggtaaaagtgtcagacgaattggtcgaccgaaggggaaggttgaaaacaaggaacccatggaatggcattagctgcctgcactcgttacaagatcctaaacgtgtgtggtttgatagtcagtcagccttatatccatgcaaaaaattcagagagaagtcaatattcatagcatccgaggttcagcctttggtgtgcttaactgcttatgatgagagcggagaaggcaatgtgtgacaaagaatctggtcaacaagaacaaggactgtcctccgctaactgataacttatactccctcagtgccaagtgttgttctcgctttcggagtagtcaaatatatacaacgacaacatagtcttttgtcccactgcaagaaaaaggatagaaaaaaacgctgaaaaggtaaatgaaagacggtagagttaatggtaaccctgcctatgagttgtcaggttattctcattctttaacagccatgcggttagagatcactttctcctttctcctactgcttggaaactcagcatggcttcgtgttctattttactgccattggggtccacatttgggactcatgtttgtccggtgaattgagtttctatttttttacacttataaatctcactctatcttgttttttgatactatctaaaataatcgatgaattatgaccccttcatgcgtactataattagttatttttaaacttaggtaagtgctttaccaacatatgtagtgtagtaaaaacatggaatttgac

SEQ ID NO: 79826 - DNA, 925 bp, Zea Mays
cctaaatcatcacatcctctcctcacttcctccctctcatctggaggcggccgggcggcgcccccgtcacctgcaccgctgccggcgctgcgcctcccctccccacggttccagcagtccagccacgcctcccctcacaggcgcggcccctccccatctcaggcgctgccgtcgagcacctccccatcacaagtgcaatcgtccagccacgcctccactccacgtggctccaatagtctagtagccacgccacacgcttcaggctacacgtcgtccaggcatccagctcaggtcgcacgctccagccacgccatccaggcatccagctccatgccacgcgctccagccatgtcgcgtccagcggtccagcggctccagcagactagcacaacactcagttttacttgtgatggaaggaggcagtgtacggagcaagggaaaagagccatgtattggtaaatcatcatctgctacagcctgtgaatgggtggttactactgatggcttcatgatatgttgaaagagaagataggtggagagcttgttagatggaatgccacgaagtttggcacacttttttgttcctacagagtttttgggacagacaagacaagttccaagcttggatggtgtctagtgattggaaaaataatgattggagagatgaagaagaccacaaattcacctacaattgtttgataaataggatatggtgggagaaggttgaaatggtactgaaaactgtgacaccactctattctgtgcttcgatttgctgaccaatagaaaaaatggaaccatttctagctttcttctaaaaattttatctactcaagctgagatcttttgctaagttaaagcatgacaaaaatgtcaaaagagatttcatgaagaaagtgaatgaaataattaaaaagagaactcag

SEQ ID NO: 79827 - DNA, 891 bp, Zea Mays
tcacatcctctcctcacttcctccctctcatctggaggcggccgggcggcgcccccgtcacctgcaccgctgccggcgctgcgcctcccctccccacggttccagcagtccagccacgcctcccctcacaggcgcggcccctccccatctcaggcgctgccgtcgagcacctccccatcacaagtgcaatcgtccagccacgcctccactccacgtggctccaatagtctagtagccacgccacacgcttcaggctacacgtcgtccaggcatccagctcaggtcgcacgctccagccacgccatccaggcatccagctccatgccacgcgctccagccatgtcgcgtccagcggtccagcggctccagcagactagcacaacactcagtgtacggagcaagggaaaagagccatgtattggtaaatcatcatctgctacagcctgtgaatgggtggttactactgatggcttcatgatatgttgaaagagaagataggtggagagcttgttagatggaatgccacgaagtttggcacacttttttgttcctacagagtttttgggacagacaagacaagttccaagcttggatggtgtctagtgattggaaaaataatgattggagagatgaagaagaccacaaattcacctacaattgtttgataaataggatatggtgggagaaggttgaaatggtactgaaaactgtgacaccactctattctgtgcttcgatttgctgaccaatagaaaaaatggaaccatttctagctttcttctaaaaattttatctactcaagctgagatcttttgctaagttaaagcatgacaaaaatgtcaaaagagatttcatgaagaaagtgaatgaaataattaaaaagagaactcag

SEQ ID NO: 79828 - DNA, 2369 bp, Zea Mays
atgagtcaattttttcctgatggatatggatatggtttcgtgtgtccactcggtaccttacccactgccatccatagtacatgcacacgcacgactcctgtgcacatggcaattgacagggtctcgacagtcgacaacacggtcaccaactgctcccgtctaacgatcaggatccagacgccaaggaagaagggtgaggtagaggttgacacagaaatcaattttctcctttctcggtctcgcgagcaagcctcgccatggatatctgcaccagttgcttccaagccagatattagagctgcctactacttgcgtcgcgcggagagcgggttgggaccagaaacaagagtagagcaagactcctatcttttttccacgcgccagtcttctctgaaccggtgaacccattcctcctcctcttcctactcaacgccacgatcgaagaggagactcagtcaatctcgccttgctctcctcttcgacccatcgtcggttcctgggatcagcatcgacgagcaggatttttccggctgtggaggattactgctgcttgacaaatccgagcgcaaaggttgcttcctgacgcgttcccccatggcacgagcaggagcacgagcacgagcaggagaaggcggctagaaggttcctgctcccgggcgtgacctctcacacggcatggtcgttgcttcgccggggaggcgcagcggggatggtcgataggagcagggccgtgctcatcggggtcaccgccggcgtcgcggccgcgctggtcgcggcggcgggcgtgcttctggccgtctggctctaccgccggcgggccagcgtcgccgcacggacgcgctccccggagtcgccctcggcgacgctgcgggccggcggcgccggtcgcgccagcctcgactccagcgtctccgtctcggtggtctccgagagcgccgccgactggggccacccgccaccgcacaaacgcgccgcgttctgggcctggagaggcggcgccggccacaacggcagggagccgccaccgctgtccgtctccgggatcccaaaataccattacaaggatctgcagaaggctaccagcaactttaccacaattcttgggcaaggatcgttcggccctgtgtacaaagctgtaatggccactggtgaagtggtagctgtaaaggtgctcgcgagtgattcaaggcaaggggaaagagagttccagactgaggtagcattgcttagcaggttgcatcataggaatcttgttaatttggttgggtattgtgtagaaaaaggtcagcgcattctgatttatgagtacatgagcaatgggagtttggcaagacttttatatggcgacaataaacgaagtttgagctggcaagaaaggctgcaaattgctcacgatgtttctcatgggattgagtacctgcatgaaggggctgttccttctgttattcacagggacctaaagtctgataatatacttttggaccattcaatgagagccaaggttgcagactttggtctatcaaaggaggaagtgtatgatggaaggaagtctggccttaagggcacctatggctatatggatcctgattacatgtccacaaataagctaacaaagaagagcgacgtgtatagctttggcataatactttttgaactgataactgccataaatccacaacaaggtctgatggagtacattaatctgcgattggaggggaggggagggttgattgggacgagatactggacaaggacctcctagtagggaacatccctgaagaggttcggatgcttgctgatgttgcctaccgatgcgttaacaagaatccgaggaagcgcccctggatatcagaggtcacacaggccatctcaagactcagacagcaccagctgataaagcatgatgcgataactctgccgaggagtgagaccaggaccgtccttaggaggatagactaccagcacgtggagcttagtgacctcactagcatcaaagaacttacgccgataagggcatcatgaactcgtgagcttgttctagtatgtaggttgctttatagagttagatttggacttggttcggcgatgttgtagctgtttgatgaaagcatcaggtagctagatcgttgaaagatgtcttggctgcaatgagagctctccttaattggagttctgtactgacctgaggtttgaaatcgttgtaaaaaaatcaacagtagtagctgtagcatttgataaaaaaagactttataaactgcatttttaccatggccatgtgagtacagacactgaattcgacagtagtagctcagtgtgagtaaagacactggatttttaccattgccatgtgaataacaaaacgaattcag

SEQ ID NO: 79829 - DNA, 2200 bp, Zea Mays
cgacagtcgacaacacggtcaccaactgctcccgtctaacgatcaggatccagacgccaaggaagaagggtgaggtagaggttgacacagaaatcaattttctcctttctcggtctcgcgagcaagcctcgccatggatatctgcaccagttgcttccaagccagatattagagctgcctactacttgcgtcgcgcggagagcgggttgggaccagaaacaagagtagagcaagactcctatcttttttccacgcgccagtcttctctgaaccggtgaacccattcctcctcctcttcctactcaacgccacgatcgaagaggagactcagtcaatctcgccttgctctcctcttcgacccatcgtcggttcctgggatcagcatcgacgagcaggatttttccggctgtggaggattactgctgcttgacaaatccgagcgcaaaggttgcttcctgacgcgttcccccatggcacgagcaggagcacgagcacgagcaggagaaggcggctagaaggttcctgctcccgggcgtgacctctcacacggcatggtcgttgcttcgccggggaggcgcagcggggatggtcgataggagcagggccgtgctcatcggggtcaccgccggcgtcgcggccgcgctggtcgcggcggcgggcgtgcttctggccgtctggctctaccgccggcgggccagcgtcgccgcacggacgcgctccccggagtcgccctcggcgacgctgcgggccggcggcgccggtcgcgccagcctcgactccagcgtctccgtctcggtggtctccgagagcgccgccgactggggccacccgccaccgcacaaacgcgccgcgttctgggcctggagaggcggcgccggccacaacggcagggagccgccaccgctgtccgtctccgggatcccaaaataccattacaaggatctgcagaaggctaccagcaactttaccacaattcttgggcaaggatcgttcggccctgtgtacaaagctgtaatggccactggtgaagtggtagctgtaaaggtgctcgcgagtgattcaaggcaaggggaaagagagttccagactgaggtagcattgcttagcaggttgcatcataggaatcttgttaatttggttgggtattgtgtagaaaaaggtcagcgcattctgatttatgagtacatgagcaatgggagtttggcaagacttttatatggcgacaataaacgaagtttgagctggcaagaaaggctgcaaattgctcacgatgtttctcatgggattgagtacctgcatgaaggggtacgttaacatttgataactattaaggttgcagactttggtctatcaaaggaggaagtgtatgatggaaggaagtctggccttaagggcacctatggctatatggatcctgattacatgtccacaaataagctaacaaagaagagcgacgtgtatagctttggcataatactttttgaactgataactgccataaatccacaacaaggtctgatggagtacattaatctgcgattggaggggaggggagggttgattgggacgagatactggacaaggacctcctagtagggaacatccctgaagaggttcggatgcttgctgatgttgcctaccgatgcgttaacaagaatccgaggaagcgcccctggatatcagaggtcacacaggccatctcaagactcagacagcaccagctgataaagcatgatgcgataactctgccgaggagtgagaccaggaccgtccttaggaggatagactaccagcacgtggagcttagtgacctcactagcatcaaagaacttacgccgataagggcatcatgaactcgtgagcttgttctagtatgtaggttgctttatagagttagatttggacttggttcggcgatgttgtagctgtttgatgaaagcatcaggtagctagatcgttgaaagatgtcttggctgcaatgagagctctccttaattggagttctgtactgacctgaggtttgaaatcgttgtaaaaaaatcaacagtagtagctgtagcatttgataaaaaaagactttataaactgcatttttaccatggccatgtgagtacagacactgaattcgacagtagtagctcagtgtgagtaaagacactggatttttaccattgccatgtgaataacaaaacgaattcag

SEQ ID NO: 79830 - DNA, 2169 bp, Zea Mays
aacacggtcaccaactgctcccgtctaacgatcaggatccagacgccaaggaagaagggtgaggtagaggttgacacagaaatcaattttctcctttctcggtctcgcgagcaagcctcgccatggatatctgcaccagttgcttccaagccagatattagagctgcctactacttgcgtcgcgcggagagcgggttgggaccagaaacaagagtagagcaagactcctatcttttttccacgcgccagtcttctctgaaccggtgaacccattcctcctcctcttcctactcaacgccacgatcgaagaggagactcagtcaatctcgccttgctctcctcttcgacccatcgtcggttcctgggatcagcatcgacgagcaggatttttccggctgtggaggagcacgagcacgagcaggagaaggcggctagaaggttcctgctcccgggcgtgacctctcacacggcatggtcgttgcttcgccggggaggcgcagcggggatggtcgataggagcagggccgtgctcatcggggtcaccgccggcgtcgcggccgcgctggtcgcggcggcgggcgtgcttctggccgtctggctctaccgccggcgggccagcgtcgccgcacggacgcgctccccggagtcgccctcggcgacgctgcgggccggcggcgccggtcgcgccagcctcgactccagcgtctccgtctcggtggtctccgagagcgccgccgactggggccacccgccaccgcacaaacgcgccgcgttctgggcctggagaggcggcgccggccacaacggcagggagccgccaccgctgtccgtctccgggatcccaaaataccattacaaggatctgcagaaggctaccagcaactttaccacaattcttgggcaaggatcgttcggccctgtgtacaaagctgtaatggccactggtgaagtggtagctgtaaaggtgctcgcgagtgattcaaggcaaggggaaagagagttccagactgaggtagcattgcttagcaggttgcatcataggaatcttgttaatttggttgggtattgtgtagaaaaaggtcagcgcattctgatttatgagtacatgagcaatgggagtttggcaagacttttatatggcgacaataaacgaagtttgagctggcaagaaaggctgcaaattgctcacgatgtttctcatgggattgagtacctgcatgaaggggctgttccttctgttattcacagggacctaaagtctgataatatacttttggaccattcaatgagagccaaggttgcagactttggtctatcaaaggaggaagtgtatgatggaaggaagtctggccttaagggcacctatggctatatggatcctgattacatgtccacaaataagctaacaaagaagagcgacgtgtatagctttggcataatactttttgaactgataactgccataaatccacaacaaggtctgatggagtacattaatctggcagcgattggaggggaggggagggttgattgggacgagatactggacaaggacctcctagtagggaacatccctgaagaggttcggatgcttgctgatgttgcctaccgatgcgttaacaagaatccgaggaagcgcccctggatatcagaggtcacacaggccatctcaagactcagacagcaccagctgataaagcatgatgcgataactctgccgaggagtgagaccaggaccgtccttaggaggatagactaccagcacgtggagcttagtgacctcactagcatcaaagaacttacgccgataagggcatcatgaactcgtgagcttgttctagtatgtaggttgctttatagagttagatttggacttggttcggcgatgttgtagctgtttgatgaaagcatcaggtagctagatcgttgaaagatgtcttggctgcaatgagagctctccttaattggagttctgtactgacctgaggtttgaaatcgttgtaaaaaaatcaacagtagtagctgtagcatttgataaaaaaagactttataaactgcatttttaccatggccatgtgagtacagacactgaattcgacagtagtagctcagtgtgagtaaagacactggatttttaccattgccatgtgaataacaaaacgaattcag

SEQ ID NO: 79831 - DNA, 2042 bp, Zea Mays
aacacggtcaccaactgctcccgtctaacgatcaggatccagacgccaaggaagaagggtgaggtagaggttgacacagaaatcaattttctcctttctcggtctcgcgagcaagcctcgccatggatatctgcaccagttgcttccaagccagatattagagctgcctactacttgcgtcgcgcggagagcgggttgggaccagaaacaagagtagagcaagactcctatcttttttccacgcgccagtcttctctgaaccggtgaacccattcctcctcctcttcctactcaacgccacgatcgaagaggagactcagtcaatctcgccttgctctcctcttcgacccatcgtcggttcctgggatcagcatcgacgagcaggatttttccggctgtggaggagcacgagcacgagcaggagaaggcggctagaaggttcctgctcccgggcgtgacctctcacacggcatggtcgttgcttcgccggggaggcgcagcggggatggtcgataggagcagggccgtgctcatcggggtcaccgccggcgtcgcggccgcgctggtcgcggcggcgggcgtgcttctggccgtctggctctaccgccggcgggccagcgtcgccgcacggacgcgctccccggagtcgccctcggcgacgctgcgggccggcggcgccggtcgcgccagcctcgactccagcgtctccgtctcggtggtctccgagagcgccgccgactggggccacccgccaccgcacaaacgcgccgcgttctgggcctggagaggcggcgccggccacaacggcagggagccgccaccgctgtccgtctccgggatcccaaaataccattacaaggatctgcagaaggctaccagcaactttaccacaattcttgggcaaggatcgttcggccctgtgtacaaagctgtaatggccactggtgaagtggtagctgtaaaggtgctcgcgagtgattcaaggcaaggggaaagagagttccagactgaggcgacaataaacgaagtttgagctggcaagaaaggctgcaaattgctcacgatgtttctcatgggattgagtacctgcatgaaggggctgttccttctgttattcacagggacctaaagtctgataatatacttttggaccattcaatgagagccaaggttgcagactttggtctatcaaaggaggaagtgtatgatggaaggaagtctggccttaagggcacctatggctatatggatcctgattacatgtccacaaataagctaacaaagaagagcgacgtgtatagctttggcataatactttttgaactgataactgccataaatccacaacaaggtctgatggagtacattaatctggcagcgattggaggggaggggagggttgattgggacgagatactggacaaggacctcctagtagggaacatccctgaagaggttcggatgcttgctgatgttgcctaccgatgcgttaacaagaatccgaggaagcgcccctggatatcagaggtcacacaggccatctcaagactcagacagcaccagctgataaagcatgatgcgataactctgccgaggagtgagaccaggaccgtccttaggaggatagactaccagcacgtggagcttagtgacctcactagcatcaaagaacttacgccgataagggcatcatgaactcgtgagcttgttctagtatgtaggttgctttatagagttagatttggacttggttcggcgatgttgtagctgtttgatgaaagcatcaggtagctagatcgttgaaagatgtcttggctgcaatgagagctctccttaattggagttctgtactgacctgaggtttgaaatcgttgtaaaaaaatcaacagtagtagctgtagcatttgataaaaaaagactttataaactgcatttttaccatggccatgtgagtacagacactgaattcgacagtagtagctcagtgtgagtaaagacactggatttttaccattgccatgtgaataacaaaacgaattcag

SEQ ID NO: 79832 - DNA, 2248 bp, Zea Mays
aacacggtcaccaactgctcccgtctaacgatcaggatccagacgccaaggaagaagggtgaggtagaggttgacacagaaatcaattttctcctttctcggtctcgcgagcaagcctcgccatggatatctgcaccagttgcttccaagccagatattagagctgcctactacttgcgtcgcgcggagagcgggttgggaccagaaacaagagtagagcaagactcctatcttttttccacgcgccagtcttctctgaaccggtgaacccattcctcctcctcttcctactcaacgccacgatcgaagaggagactcagtcaatctcgccttgctctcctcttcgacccatcgtcggttcctgggatcagcatcgacgagcaggatttttccggctgtggaggagcacgagcacgagcaggagaaggcggctagaaggttcctgctcccgggcgtgacctctcacacggcatggtcgttgcttcgccggggaggcgcagcggggatggtcgataggagcagggccgtgctcatcggggtcaccgccggcgtcgcggccgcgctggtcgcggcggcgggcgtgcttctggccgtctggctctaccgccggcgggccagcgtcgccgcacggacgcgctccccggagtcgccctcggcgacgctgcgggccggcggcgccggtcgcgccagcctcgactccagcgtctccgtctcggtggtctccgagagcgccgccgactggggccacccgccaccgcacaaacgcgccgcgttctgggcctggagaggcggcgccggccacaacggcagggagccgccaccgctgtccgtctccgggatcccaaaataccattacaaggatctgcagaaggctaccagcaactttaccacaattcttgggcaaggatcgttcggccctgtgtacaaagctgtaatggccactggtgaagtggtagctgtaaaggtgctcgcgagtgattcaaggcaaggggaaagagagttccagactgaggtagcattgcttagcaggttgcatcataggaatcttgttaatttggttgggtattgtgtagaaaaaggtcagcgcattctgatttatgagtacatgagcaatgggagtttggcaagacttttatatggcgacaataaacgaagtttgagctggcaagaaaggctgcaaattgctcacgatgtttctcatgggattgagtacctgcatgaaggggtacgttaacatttgataactattaaggtatgtattctcgaataatgggaattaatgaaacctgctatgtttcatgagtgcaggctgttccttctgttattcacagggacctaaagtctgataatatacttttggaccattcaatgagagccaaggttgcagactttggtctatcaaaggaggaagtgtatgatggaaggaagtctggccttaagggcacctatggctatatggatcctgattacatgtccacaaataagctaacaaagaagagcgacgtgtatagctttggcataatactttttgaactgataactgccataaatccacaacaaggtctgatggagtacattaatctgcgattggaggggaggggagggttgattgggacgagatactggacaaggacctcctagtagggaacatccctgaagaggttcggatgcttgctgatgttgcctaccgatgcgttaacaagaatccgaggaagcgcccctggatatcagaggtcacacaggccatctcaagactcagacagcaccagctgataaagcatgatgcgataactctgccgaggagtgagaccaggaccgtccttaggaggatagactaccagcacgtggagcttagtgacctcactagcatcaaagaacttacgccgataagggcatcatgaactcgtgagcttgttctagtatgtaggttgctttatagagttagatttggacttggttcggcgatgttgtagctgtttgatgaaagcatcaggtagctagatcgttgaaagatgtcttggctgcaatgagagctctccttaattggagttctgtactgacctgaggtttgaaatcgttgtaaaaaaatcaacagtagtagctgtagcatttgataaaaaaagactttataaactgcatttttaccatggccatgtgagtacagacactgaattcgacagtagtagctcagtgtgagtaaagacactggatttttaccattgccatgtgaataacaaaacgaattcag

SEQ ID NO: 79833 - DNA, 2149 bp, Zea Mays
aacacggtcaccaactgctcccgtctaacgatcaggatccagacgccaaggaagaagggtgaggtagaggttgacacagaaatcaattttctcctttctcggtctcgcgagcaagcctcgccatggatatctgcaccagttgcttccaagccagatattagagctgcctactacttgcgtcgcgcggagagcgggttgggaccagaaacaagagtagagcaagactcctatcttttttccacgcgccagtcttctctgaaccggtgaacccattcctcctcctcttcctactcaacgccacgatcgaagaggagactcagtcaatctcgccttgctctcctcttcgacccatcgtcggttcctgggatcagcatcgacgagcaggatttttccggctgtggaggattactgctgcttgacaaatccgagcgcaaaggttgcttcctgacgcgttcccccatggcacgagcaggagcacgagcacgagcaggagaaggcggctagaaggttcctgctcccgggcgtgacctctcacacggcatggtcgttgcttcgccggggaggcgcagcggggatggtcgataggagcagggccgtgctcatcggggtcaccgccggcgtcgcggccgcgctggtcgcggcggcgggcgtgcttctggccgtctggctctaccgccggcgggccagcgtcgccgcacggacgcgctccccggagtcgccctcggcgacgctgcgggccggcggcgccggtcgcgccagcctcgactccagcgtctccgtctcggtggtctccgagagcgccgccgactggggccacccgccaccgcacaaacgcgccgcgttctgggcctggagaggcggcgccggccacaacggcagggagccgccaccgctgtccgtctccgggatcccaaaataccattacaaggatctgcagaaggctaccagcaactttaccacaattcttgggcaaggatcgttcggccctgtgtacaaagctgtaatggccactggtgaagtggtagctgtaaaggtgctcgcgagtgattcaagaaaaaggtcagcgcattctgatttatgagtacatgagcaatgggagtttggcaagacttttatatggcgacaataaacgaagtttgagctggcaagaaaggctgcaaattgctcacgatgtttctcatgggattgagtacctgcatgaaggggctgttccttctgttattcacagggacctaaagtctgataatatacttttggaccattcaatgagagccaaggttgcagactttggtctatcaaaggaggaagtgtatgatggaaggaagtctggccttaagggcacctatggctatatggatcctgattacatgtccacaaataagctaacaaagaagagcgacgtgtatagctttggcataatactttttgaactgataactgccataaatccacaacaaggtctgatggagtacattaatctggcagcgattggaggggaggggagggttgattgggacgagatactggacaaggacctcctagtagggaacatccctgaagaggttcggatgcttgctgatgttgcctaccgatgcgttaacaagaatccgaggaagcgcccctggatatcagaggtcacacaggccatctcaagactcagacagcaccagctgataaagcatgatgcgataactctgccgaggagtgagaccaggaccgtccttaggaggatagactaccagcacgtggagcttagtgacctcactagcatcaaagaacttacgccgataagggcatcatgaactcgtgagcttgttctagtatgtaggttgctttatagagttagatttggacttggttcggcgatgttgtagctgtttgatgaaagcatcaggtagctagatcgttgaaagatgtcttggctgcaatgagagctctccttaattggagttctgtactgacctgaggtttgaaatcgttgtaaaaaaatcaacagtagtagctgtagcatttgataaaaaaagactttataaactgcatttttaccatggccatgtgagtacagacactgaattcgacagtagtagctcagtgtgagtaaagacactggatttttaccattgccatgtgaataacaaaacgaattcag

SEQ ID NO: 79834 - DNA, 2111 bp, Zea Mays
aacacggtcaccaactgctcccgtctaacgatcaggatccagacgccaaggaagaagggtgaggtagaggttgacacagaaatcaattttctcctttctcggtctcgcgagcaagcctcgccatggatatctgcaccagttgcttccaagccagatattagagctgcctactacttgcgtcgcgcggagagcgggttgggaccagaaacaagagtagagcaagactcctatcttttttccacgcgccagtcttctctgaaccggtgaacccattcctcctcctcttcctactcaacgccacgatcgaagaggagactcagtcaatctcgccttgctctcctcttcgacccatcgtcggttcctgggatcagcatcgacgagcaggatttttccggctgtggaggattactgctgcttgacaaatccgagcgcaaaggttgcttcctgacgcgttcccccatggcacgagcaggagcacgagcacgagcaggagaaggcggctagaaggttcctgctcccgggcgtgacctctcacacggcatggtcgttgcttcgccggggaggcgcagcggggatggtcgataggagcagggccgtgctcatcggggtcaccgccggcgtcgcggccgcgctggtcgcggcggcgggcgtgcttctggccgtctggctctaccgccggcgggccagcgtcgccgcacggacgcgctccccggagtcgccctcggcgacgctgcgggccggcggcgccggtcgcgccagcctcgactccagcgtctccgtctcggtggtctccgagagcgccgccgactggggccacccgccaccgcacaaacgcgccgcgttctgggcctggagaggcggcgccggccacaacggcagggagccgccaccgctgtccgtctccgggatcccaaaataccattacaaggatctgcagaaggctaccagcaactttaccacaattcttgggcaaggatcgttcggccctgtgtacaaagctgtaatggccactggtgaagtggtagctgtaaaggtgctcgcgagtgattcaaggcaaggggaaagagagttccagactgaggcgacaataaacgaagtttgagctggcaagaaaggctgcaaattgctcacgatgtttctcatgggattgagtacctgcatgaaggggctgttccttctgttattcacagggacctaaagtctgataatatacttttggaccattcaatgagagccaaggttgcagactttggtctatcaaaggaggaagtgtatgatggaaggaagtctggccttaagggcacctatggctatatggatcctgattacatgtccacaaataagctaacaaagaagagcgacgtgtatagctttggcataatactttttgaactgataactgccataaatccacaacaaggtctgatggagtacattaatctggcagcgattggaggggaggggagggttgattgggacgagatactggacaaggacctcctagtagggaacatccctgaagaggttcggatgcttgctgatgttgcctaccgatgcgttaacaagaatccgaggaagcgcccctggatatcagaggtcacacaggccatctcaagactcagacagcaccagctgataaagcatgatgcgataactctgccgaggagtgagaccaggaccgtccttaggaggatagactaccagcacgtggagcttagtgacctcactagcatcaaagaacttacgccgataagggcatcatgaactcgtgagcttgttctagtatgtaggttgctttatagagttagatttggacttggttcggcgatgttgtagctgtttgatgaaagcatcaggtagctagatcgttgaaagatgtcttggctgcaatgagagctctccttaattggagttctgtactgacctgaggtttgaaatcgttgtaaaaaaatcaacagtagtagctgtagcatttgataaaaaaagactttataaactgcatttttaccatggccatgtgagtacagacactgaattcgacagtagtagctcagtgtgagtaaagacactggatttttaccattgccatgtgaataacaaaacgaattcag

SEQ ID NO: 79835 - DNA, 7177 bp, Zea Mays
ccccccccccgccatggcttcgaggcggacgcagaggcgacggtgggatcgtgccaacgaagcacaacaatgggtggcacgcagcggccgccgacgggcgatgacgcgcctccatgaacggccatgagcgctgacgcttctctcgcctcctccaccaacaacggattctccacaaacggccctggatccgttcgtcgctgctctcttatctgctcttccatccaagcatgtatgcccacccccaatcggaccatcgctggcctcctgcagctaggccgccatcacctccttcaagaaagaaaagccaacgttcccatagtctgcctccagaactcccttgatgaaaggactgccaagttctactgtaattttgtcttgtgtcctatcaaattaattctgctttttgcaggattttcagtgaactcctataatattcattggctgtcgtctctgccattggcgtgcacatacgtgtacagttgggggtcgagcagccagctgctggacgaggatggatggatcggaggatgcatgcatggatcgagcagcggggtgtccaaatcgcgcgcctgtgagcggctcacaggatacgcatcaccggcggggcgttgtgccatgacaaagctccagggcctaacctcatctctcctgtcgcaggacgctaagttttgtggaccttgctggttctgagagggtgaaaaaatctggttcagcaggaaagcaattgaaagaagcgcaaggtataaataaatctctttctgctttggctgatgttattggtgctttatcttctgatggacaacatataccttaccggaaccataatgcttatgagtgattatctaatgtggattgtctgcaaaaaagctaagttttgtggaccttggtggttctgagaggggtgaaaaaatctggttccgcaggaaagcaattgaaagaagcgcaaagtataaataaatctctttctgctttggctgatgttattggttctttatcttctgatggacaacatataccttaccggaaccataagttaacaatgcttatgagtgattatctaatgtggattgtctacaaaaaaaaggaaaactataaagtcttcatttttcactttcttgtcagtatttacgaacaaacaaccattactaacgaatataaaaatgtattgttgtgttctacaaatgcttaccaacagtttgaacaattaaggtcaatgttttttgtatttttcttagaaattgtttctgttattgattagttaatgtctataatactttgatggttatgtcttcatccatattaatttgtttgatattattgaatacgaatgaattagtactatttctaataagactcgattatctaatgcgtgtttattaatacttttaagcttaatagtttaatcccaactgcatgtatggtttttcttttggaaaactaaaaataaaataaaatgattggtagttgtggtagcgaagaggaaatgtataatttaatcccaactgcatgtatactttaacgtgtgtcagtggaagggttctagcagggattctcttcccttccgccgaaaatcaccgaggatctattcagggtggaactaactcacatcgaggtttgctcgagctcgctcagcacatagctgaacaaggtccggacgaccgctgttatctgcgtacactggtccaaattatctgcactgaccagaagaggctcatctacgacacgaggacgatgaaggagtgcaacattcagatatttttagatattttacggccagttcagatcagacaagaaagggtcatctagcaaaggttatcgggatgtcaatctttttgtcaaacaagtagatgggaaaaatgttactgattcagagaaattgagattttgacttggagaaggcccagcttgacctaaggcatggctacaacagggctgagatgaagttcaatgtgaatcgtgttgataacatggtgatctaggcaatctttctattggatatgcttaacaaggacatcaattccttctccatgagagtcagcccctcaaatcaactttggaacccaaatggtcaagcctttggacggagcaaaggtaatcgattaaagcggcttcacaacagtggctgagggacccaggagttgtggggcgtcacagataatcggcatggaatttagtagtttataacagtgcctgaaggagctaggatttatgaatcattctccaccaccttgaggtactcaccggagccagaatttatgaatcgttgtccaccatctcgagacagagcagttcggaaccttggacatctgatcaggaatgaagaggaaaacaaaaacaaacagtttgttcattactactcaaaagaacttggccattcgtatgccatatgatttcctctcgctggtacctgtcattgaaggagctggaggatcaataactgattggagaggggacaagctctattggcctgttactgcagaatcacaatccacaagttttaacgtggtagcagttggggatgcccgtgtccacaaagaggcccttgatgcgttgcagtggcgctagcgtgctctttagataagcattatactaataaccaactatttagacatttacatgtgatatttgtatgaccaataataagctttacctgtatgcttgttggttggcctcaacctttgcactaataatagacagcttggttgtaaactaccaagcagtggcttgctgtttgcaccaagcagatattatgtcttgggaacgctaaatgtgtgaggtattaccttagtgtgagcttcccttgcacccagcaattcagctccattgtgcagtgcttggggatgcttaatcgagagtttgattgttgttgcttccatggctttctgggtgctgcaccatagctgaattgcgaactatgatttccagccttgaactttggatcgaagtctagggtcagtctgggctttaggcgatgacgttttctggcttcagatgcccaagggtcattgagccatgtctccaatcgtccaatggttataaaaaaagaataggtacacatatatattgtttgttttcatggtattataatgttttcaaattaaattctttttttgcatgcgtggcatttattctgcataatattttttctatggatttaacttgtgagtcattttcataaaccaacaccaaggatgaatccatgtttgttactcggaaaccttgaacaaacaccactaatagaaggcgctcgcaatggcgtcgctcatcgacgacgagaagaagcttggcgactgccagttcgacatctggaagcagttctacgtggctgcatgcgccactatagacgacaagctccggcgccgctgtcgcttggacacagtccaaagcggctgcaccgtgctgtccatcatcaagtagggggacctcatggtcggcgccaacgccgccgactcccgggttgttctggacaccgcatccgacaacggtgccatcacgccgtccaactcatcgtccacctgaagcccaatctgccacgtaagtcgctactgaccggccataaattcttatgcgctaggacgacgtccgttgctgacgttgtgtgagcgttctcgaacatgatgtatgcagaggggtagcgcatccagtggtgcaacgaccaggtgtactacctcgctgatgagtccgggtgcacttcgtctggcagcctagccaagagctgtctgtactcgctatgtcgcgcgcgttcgacgactactatatcaaggactgtggcgtcatctcggcgccggaggtgacgcagatgatgaccgacaacaatgaccagttagtcatccttgtcgtagttggggtagtttttgtgctggtctgcctttaattctcttcataaacacacacatttgtctttttgtttaagcaagcgcgtatgttggtgtgtgcctgatgactgacaatgtacgagggaacttcttctggcaggtgtgggacgtgctctccaacgacgagaccatgcaaatcttgacatatattgaagtctgcatagtactgatgattgcaatgtagtggtgaaataactagattaaaataacaaatttatgtatggctaggatcataaatggattatgaaactttttcttataacattataatacacattttgtatataagttatcgtggtattatatgttcccgttgcaacgcacgggcactcacctagtataaaaactaagcatggatcgttataaagcaaaacttagtgagagatgtgtttgcaaggcgtaaatacatgttgtaccttgtcttctgaaccgcctaaacatagtctcaattattatgccataatcctccttagccaacgtcctgcggagtgcatttttgtttagtaggtcaccccaaactttaatgatatgcaaagaccccctacaacattgattttgttaagaataggttagtaatatttagatttgaatatataaatacaattactgaaatatacctagcatccattataacaatctttctgaaagggccccacattgtgcgatgaattgtatccaagtggactacaatagccataatgtctataaaaataacaatttataaatggattaatactgaattttgtgtaaacgatattttaataatattaagagatcgatatattcttaccgactaaagtcctgtttggcaattcgacaatatcagcaaggttcaagaatatttgttttgggaatggcgccacttgaattggaacaatgtatggctccacgatagtttgttggttgagatacaattccatgggactatttagatgtcgaaaattaaattcacccggatgaagaccaaactttacattatgcatcttgtaaacatgcttttcatggagcaaattgtcgaaatgtttgactgtctgatacaaatatgttatgacctcgatcttggctccctaaatgtatttcagtaggagaagagtcgatggtatgaagatcgtgtaaccttaaaaatgaaacttaaagaattgttggcttacattgatgtcagataaaacgaaatgttgtctgtcacgaaaacgtggttcaatcgggaatttaacttctacccgagcgacaatactgtatttccgcggtagcccataataaaaatcttcatcacggtagtcgtcaaacaacctgaagctatattaaatatacgacttaataacggtcataactttgatagacaaatttgtgtaaatatatttatataataacttacattggcatccgttttaggcggtccgctacggctttttcacggttcaatacgaccggttccatcaaaaccttgtagcctttaacataaatttaaatttaaatttaaatggaacacatgtcttctggtaataaattatttttaataatgatcaaagaatactttggagaaactaataatatatgagtgtttttatatatatatatggatttttttagttctgatttgggattggatttccaaaactttagtttggacacagatactttgagaagcattaaaactcgaaacactattgtcatgatcagttttggttcataagattggaaaaataaagttccctaaaataccatgacataaatgagaatatattgctaatagctacacaccggttcttttttctgtttcacagaagcagccggagatccatcagtagtgctcgctttaaggagtctgtaacttcctaatcaaatataacttgatatgtgcgccatttgttggtgttgaccaccattggtagaatgttgtttttggctgcgcgttcttgttagatgagactgtaacttcctatgcatgggtatttaaatcattcttggagtcaatgggagggcgatcgccaaaatcaatattcactgatcaggatgaagctattatgcaggcagtcaaacaaattttccctaatacgcaacattgtttttcctactggcatattctgaagaatgcacaatctcatttaggctcactaaatacgtctcaagcatttgaaattatgtttaccaagtgtatgcaaggatctgactcggaaacaattagtttgagaattgttaagttaacaaatcagatgtattttagttacgatggtttcttgattttgtctgttgttctttatatattgaagcagcacagaccatggtgtcagcagcacagatcctggaactgtctaaagactacagggcaaaattttaactacagaaacctgacagcacaaggatatctgatgacagtgataagagggctggaaaacatggcttggatcagaacagaagcattttccaccgataagttgaagtgtgactggaggaaggaaccctaccttccaagttaaagatggagaggttggtcagcaagatgcaggtcatcagagtgcaaactttatagacataggaccaggttttcctactattaaagtgggaaaaccaggatacatattatggactcgcactactgataaactgaaaggtgtaacaggtgctgatttttgcccaggatcaagttctagggaggccaaaggggaattgatcactaacaaggtcattgcaggacctacaagccctctgtgtgtttttcctcgaaggcatgtgcaccatagaaaaaaggttggtatgcaatggatgtatttccccctctaacatagccaagacaaatgtaaaagttaatgaaaaacaggaaatgtgctcttaaagtacttcttatggcggtgatgctgcttacactaaacatgaaattgtggatttattactggaatctgttgagctgtcttataggcttgattagtattgatgaactttgccactcatgtgttgggcatcttgtagcagtttcctgtgaagccgaactccttctcatgcaaaaggaatgagacacaacaaaaactgaactacttctgccgagattttatttggagacgagcagcaaaataaggccttcgactctacagagagaatgtctaatgcctccccacgcacaattttatctaaaaattagcatcaaccgatatataccggaagaatgcatatataaactttataccccaataaaaaaccccacaacacacaagctcattgtattacttaacatatgtcatatataaaagttatattaggggaagcattgaaaagaagttagttcattttatgtttgagcgacaaat

SEQ ID NO: 79836 - DNA, 7297 bp, Zea Mays
cccgccatggcttcgaggcggacgcagaggcgacggtgggatcgtgccaacgaagcacaacaatgggtggcacgcagcggccgccgacgggcgatgacgcgcctccatgaacggccatgagcgctgacgcttctctcgcctcctccaccaacaacggattctccacaaacggccctggatccgttcgtcgctgctctcttatctgctcttccatccaagcatgtatgcccacccccaatcggaccatcgctggcctcctgcagctaggccgccatcacctccttcaagaaagaaaagccaacgttcccatagtctgcctccagaactcccttgatgaaaggactgccaagttctactgtaattttgtcttgtgtcctatcaaattaattctgctttttgcaggattttcagtgaactcctataatattcattggctgtcgtctctgccattggcgtgcacatacgtgtacagttgggggtcgagcagccagctgctggacgaggatggatggatcggaggatgcatgcatggatcgagcagcggggtgtccaaatcgcgcgcctgtgagcggctcacaggatacgcatcaccggcggggcgttgtgccatgacaaagctccagggcctaacctcatctctcctgtcgcaggacgaccactccatctgtcgtcctccttcatctgtcctatttgtttctctgtttgaacagctaagttttgtggaccttgctggttctgagagggtgaaaaaatctggttcagcaggaaagcaattgaaagaagcgcaaggaaagcaattgaaagaagcgcaaagtataaataaatctctttctgctttggctgatgttattggttctttatcttctgatggacaacatataccttaccggaaccataagttaacaatgcttatgagtgattatctaatgtggattgtctacaaaaaaaaggtactatactttaatcatccgtttgtcttttcattatgattatataatgtggattgcctgcaaaaaaaaggtactatactttaatcagccgtttgtcttttcattattccaatctttattttaataggttgcatttccggtttttattcagtaccaacaaaaccattggagtacctgcgttctattcataacgtgtgaatatggaaattcacaacgattatatggtgaactcatgtttctttttctaatgcaaggaaaactataaagtcttcatttttcactttcttgtcagtatttacgaacaaacaaccattactaacgaatataaaaatgtattgttgtgttctacaaatgcttaccaacagtttgaacaattaaggtcaatgttttttgtatttttcttagaaattgtttctgttattgattagttaatgtctataatactttgatggttatgtcttcatccatattaatttgtttgatattattgaatacgaatgaattagtactatttctaataagactcgattatctaatgcgtgtttattaatacttttaagcttaatagtttaatcccaactgcatgtatggtttttcttttggaaaactaaaaataaaataaaatgattggtagttgtggtagcgaagaggaaatgtataatttaatcccaactgcatgtatactttaacgtgtgtcagtggaagggttctagcagggattctcttcccttccgccgaaaatcaccgaggatctattcagggtggaactaactcacatcgaggtttgctcgagctcgctcagcacatagctgaacaaggtccggacgaccgctgttatctgcgtacactggtccaaattatctgcactgaccagaagaggctcatctacgacacgaggacgatgaaggagtgcaacattcagatatttttagatattttacggccagttcagatcagacaagaaagggtcatctagcaaaggttatcgggatgtcaatctttttgtcaaacaagtagatgggaaaaatgttactgattcagagaaattgagattttgacttggagaaggcccagcttgacctaaggcatggctacaacagggctgagatgaagttcaatgtgaatcgtgttgataacatggtgatctaggcaatctttctattggatatgcttaacaaggacatcaattccttctccatgagagtcagcccctcaaatcaactttggaacccaaatggtcaagcctttggacggagcaaaggtaatcgattaaagcggcttcacaacagtggctgagggacccaggagttgtggggcgtcacagataatcggcatggaatttagtagtttataacagtgcctgaaggagctaggatttatgaatcattctccaccaccttgaggtactcaccggagccagaatttatgaatcgttgtccaccatctcgagacagagcagttcggaaccttggacatctgatcaggaatgaagaggaaaacaaaaacaaacagtttgttcattactactcaaaagaacttggccattcgtatgccatatgatttcctctcgctggtacctgtcattgaaggagctggaggatcaataactgattggagaggggacaagctctattggcctgttactgcagaatcacaatccacaagttttaacgtggtagcagttggggatgcccgtgtccacaaagaggcccttgatgcgttgcagtggcgctagcgtgctctttagataagcattatactaataaccaactatttagacatttacatgtgatatttgtatgaccaataataagctttacctgtatgcttgttggttggcctcaacctttgcactaataatagacagcttggttgtaaactaccaagcagtggcttgctgtttgcaccaagcagatattatgtcttgggaacgctaaatgtgtgaggtattaccttagtgtgagcttcccttgcacccagcaattcagctccattgtgcagtgcttggggatgcttaatcgagagtttgattgttgttgcttccatggctttctgggtgctgcaccatagctgaattgcgaactatgatttccagccttgaactttggatcgaagtctagggtcagtctgggctttaggcgatgacgttttctggcttcagatgcccaagggtcattgagccatgtctccaatcgtccaatggttataaaaaaagaataggtacacatatatattgtttgttttcatggtattataatgttttcaaattaaattctttttttgcatgcgtggcatttattctgcataatattttttctatggatttaacttgtgagtcattttcataaaccaacaccaaggatgaatccatgtttgttactcggaaaccttgaacaaacaccactaatagaaggcgctcgcaatggcgtcgctcatcgacgacgagaagaagcttggcgactgccagttcgacatctggaagcagttctacgtggctgcatgcgccactatagacgacaagctccggcgccgctgtcgcttggacacagtccaaagcggctgcaccgtgctgtccatcatcaagtagggggacctcatggtcggcgccaacgccgccgactcccgggttgttctggacaccgcatccgacaacggtgccatcacgccgtccaactcatcgtccacctgaagcccaatctgccacgtaagtcgctactgaccggccataaattcttatgcgctaggacgacgtccgttgctgacgttgtgtgagcgttctcgaacatgatgtatgcagaggggtagcgcatccagtggtgcaacgaccaggtgtactacctcgctgatgagtccgggtgcacttcgtctggcagcctagccaagagctgtctgtactcgctatgtcgcgcgcgttcgacgactactatatcaaggactgtggcgtcatctcggcgccggaggtgacgcagatgatgaccgacaacaatgaccagttagtcatccttgtcgtagttggggtagtttttgtgctggtctgcctttaattctcttcataaacacacacatttgtctttttgtttaagcaagcgcgtatgttggtgtgtgcctgatgactgacaatgtacgagggaacttcttctggcaggtgtgggacgtgctctccaacgacgagaccatgcaaatcttgacatatattgaagtctgcatagtactgatgattgcaatgtagtggtgaaataactagattaaaataacaaatttatgtatggctaggatcataaatggattatgaaactttttcttataacattataatacacattttgtatataagttatcgtggtattatatgttcccgttgcaacgcacgggcactcacctagtataaaaactaagcatggatcgttataaagcaaaacttagtgagagatgtgtttgcaaggcgtaaatacatgttgtaccttgtcttctgaaccgcctaaacatagtctcaattattatgccataatcctccttagccaacgtcctgcggagtgcatttttgtttagtaggtcaccccaaactttaatgatatgcaaagaccccctacaacattgattttgttaagaataggttagtaatatttagatttgaatatataaatacaattactgaaatatacctagcatccattataacaatctttctgaaagggccccacattgtgcgatgaattgtatccaagtggactacaatagccataatgtctataaaaataacaatttataaatggattaatactgaattttgtgtaaacgatattttaataatattaagagatcgatatattcttaccgactaaagtcctgtttggcaattcgacaatatcagcaaggttcaagaatatttgttttgggaatggcgccacttgaattggaacaatgtatggctccacgatagtttgttggttgagatacaattccatgggactatttagatgtcgaaaattaaattcacccggatgaagaccaaactttacattatgcatcttgtaaacatgcttttcatggagcaaattgtcgaaatgtttgactgtctgatacaaatatgttatgacctcgatcttggctccctaaatgtatttcagtaggagaagagtcgatggtatgaagatcgtgtaaccttaaaaatgaaacttaaagaattgttggcttacattgatgtcagataaaacgaaatgttgtctgtcacgaaaacgtggttcaatcgggaatttaacttctacccgagcgacaatactgtatttccgcggtagcccataataaaaatcttcatcacggtagtcgtcaaacaacctgaagctatattaaatatacgacttaataacggtcataactttgatagacaaatttgtgtaaatatatttatataataacttacattggcatccgttttaggcggtccgctacggctttttcacggttcaatacgaccggttccatcaaaaccttgtagcctttaacataaatttaaatttaaatttaaatggaacacatgtcttctggtaataaattatttttaataatgatcaaagaatactttggagaaactaataatatatgagtgtttttatatatatatatggatttttttagttctgatttgggattggatttccaaaactttagtttggacacagatactttgagaagcattaaaactcgaaacactattgtcatgatcagttttggttcataagattggaaaaataaagttccctaaaataccatgacataaatgagaatatattgctaatagctacacaccggttcttttttctgtttcacagaagcagccggagatccatcagtagtgctcgctttaaggagtctgtaacttcctaatcaaatataacttgatatgtgcgccatttgttggtgttgaccaccattggtagaatgttgtttttggctgcgcgttcttgttagatgagactgtaacttcctatgcatgggtatttaaatcattcttggagtcaatgggagggcgatcgccaaaatcaatattcactgatcaggatgaagctattatgcaggcagtcaaacaaattttccctaatacgcaacattgtttttcctactggcatattctgaagaatgcacaatctcatttaggctcactaaatacgtctcaagcatttgaaattatgtttaccaagtgtatgcaaggatctgactcggaaacaattagtttgagaattgttaagttaacaaatcagatgtattttagttacgatggtttcttgattttgtctgttgttctttatatattgaagcagcacagaccatggtgtcagcagcacagatcctggaactgtctaaagactacagggcaaaattttaactacagaaacctgacagcacaaggatatctgatgacagtgataagagggctggaaaacatggcttggatcagaacagaagcattttccaccgataagttgaagtgtgactggaggaaggaaccctaccttccaagttaaagatggagaggttggtcagcaagatgcaggtcatcagagtgcaaactttatagacataggaccaggttttcctactattaaagtgggaaaaccaggatacatattatggactcgcactactgataaactgaaaggtgtaacaggtgctgatttttgcccaggatcaagttctagggaggccaaaggggaattgatcactaacaaggtcattgcaggacctacaagccctctgtgtgtttttcctcgaaggcatgtgcaccatagaaaaaaggttggtatgcaatggatgtatttccccctctaacatagccaagacaaatgtaaaagttaatgaaaaacaggaaatgtgctcttaaagtacttcttatggcggtgatgctgcttacactaaacatgaaattgtggatttattactggaatctgttgagctgtcttataggcttgattagtattgatgaactttgccactcatgtgttgggcatcttgtagcagtttcctgtgaagccgaactccttctcatgcaaaaggaatgagacacaacaaaaactgaactacttctgccgagattttatttggagacgagcagcaaaataaggccttcgactctacagagagaatgtctaatgcctccccacgcacaattttatctaaaaattagcatcaaccgatatataccggaagaatgcatatataaactttataccccaataaaaaaccccacaacacacaagctcattgtattacttaacatatgtcatatataaaagttatattaggggaagcattgaaaagaagttagttcattttatgtttgagcgacaaat

SEQ ID NO: 79837 - DNA, 7784 bp, Zea Mays
ccgccatggcttcgaggcggacgcagaggcgacggtgggatcgtgccaacgaagcacaacaatgggtggcacgcagcggccgccgacgggcgatgacgcgcctccatgaacggccatgagcgctgacgcttctctcgcctcctccaccaacaacggattctccacaaacggccctggatccgttcgtcgctgctctcttatctgctcttccatccaagcatgtatgcccacccccaatcggaccatcgctggcctcctgcagctaggccgccatcacctccttcaagaaagaaaagccaacgttcccatagtctgcctccagaactcccttgatgaaaggactgccaagttctactgtaattttgtcttgtgtcctatcaaattaattctgctttttgcaggattttcagtgaactcctataatattcattggctgtcgtctctgccattggcgtgcacatacgtgtacagttgggggtcgagcagccagctgctggacgaggatggatggatcggaggatgcatgcatggatcgagcagcggggtgtccaaatcgcgcgcctgtgagcggctcacaggatacgcatcaccggcggggcgttgtgccatgacaaagctccagggcctaacctcatctctcctgtcgcaggacgaccactccatctgtcgtcctccttcatctgtcctatttgtttctctgtttgaacagctaagttttgtggaccttgctggttctgagagggtgaaaaaatctggttcagcaggaaagcaattgaaagaagcgcaaggaaagcaattgaaagaagcgcaaagtataaataaatctctttctgctttggctgatgttattggttctttatcttctgatggacaacatataccttaccggaaccataagttaacaatgcttatgagtgattatctaatgtggattgtctacaaaaaaaaggtactatactttaatcatccgtttgtcttttcattatgattatataatgtggattgcctgcaaaaaaaaggtactatactttaatcagccgtttgtcttttcattattccaatctttattttaataggttgcatttccggtttttattcagtaccaacaaaaccattggagtacctgcgttctattcataacgtgtgaatatggaaattcacaacgattatatggtgaactcatgtttctttttctaatgcaaggaaaactataaagtcttcatttttcactttcttgtcagtatttacgaacaaacaaccattactaacgaatataaaaatgtattgttgtgttctacaaatgcttaccaacagtttgaacaattaaggtcaatgttttttgtatttttcttagaaattgtttctgttattgattagttaatgtctataatactttgatggttatgtcttcatccatattaatttgtttgatattattgaatacgaatgaattagtactatttctaataagactcgattatctaatgcgtgtttattaatacttttaagcttaatagtttaatcccaactgcatgtatggtttttcttttggaaaactaaaaataaaataaaatgattggtagttgtggtagcgaagaggaaatgtataatttaatcccaactgcatgtatactttaacgtgtgtcagtggaagggttctagcagggattctcttcccttccgccgaaaatcaccgaggatctattcagggtggaactaactcacatcgaggtttgctcgagctcgctcagcacatagctgaacaaggtccggacgaccgctgttatctgcgtacactggtccaaattatctgcactgaccagaagaggctcatctacgacacgaggacgatgaaggagtgcaacattcagatatttttagatattttacggccagttcagatcagacaagaaagggtcatctagcaaaggttatcgggatgtcaatctttttgtcaaacaagtagatgggaaaaatgttactgattcagagaaattgagattttgacttggagaaggcccagcttgacctaaggcatggctacaacagggctgagatgaagttcaatgtgaatcgtgttgataacatggaatcagtttttaaagaaaatctttgtattctcattttaattttatatgcagcccctcaaatcaactttggaacccaaatggtcaagcctttggacggagcaaagggttttatcctcctatataagaagttcaaatggataaacaataaaggcaatgtcaaattttcatgggattctttggacatagcttcactgccattaacaacaccatttgtaattgcatattctacaaaaaagtggctgagggacccaggagttgtggggcgtcacagataatcggcatggaatttagtagtttataacagtgcctgaaggagctaggatttatgaatcattctccaccaccttgaggtactcaccggagccagaatttatgaatcgttgtccaccatctcgaggtattcaccatgttactttttccttttcaacactaaataattgtttgcttaaatgtcaatattatttagctattcctttgaaatttactaatctatattgaatagagacttgggtggctccatcgctagctttgatggcaatggttatacaagtaataagtttaaagacagagcagttcggaaccttggacatctgatcaggaatgaagaggaaaacaaaaacaaacagtttgttcattactactcaaaagaacttggccattcgtatgccatatgatttcctctcgctggtacctgtcattgaaggagctggaggatcaataactgattggagaggggacaagctctattggcctgttactgcagaatcacaatccacaagtataatcttcatccctctttaaaattcatgaagccctttttgatgtcttcaagtcctttctatgtttccttagctccagagtggccctctggtttcagtaatttcataggttaattgtgccaaactgcattatggcaaaaacttgccctatgtcacttcaatcgtgcactccttgctttttaatcaacaaagttttagttcatctcattctgcactattgatttttttgtaggttttaacgtggtagcagttggggatgcccgtgtccacaaagaggcccttgatgcgttgcagtggcgctagcgtgctctttagataagcattatactaataaccaactatttagacatttacatgtgatatttgtatgaccaataataagctttacctgtatgcttgttggttggcctcaacctttgcactaataatagacagcttggttgtaaactaccaagcagtggcttgctgtttgcaccaagcagatattatgtcttgggaacgctaaatgtgtgaggtattaccttagtgtgagcttcccttgcacccagcaattcagctccattgtgcagtgcttggggatgcttaatcgagagtttgattgttgttgcttccatggctttctgggtgctgcaccatagctgaattgcgaactatgatttccagccttgaactttggatcgaagtctagggtcagtctgggctttaggcgatgacgttttctggcttcagatgcccaagggtcattgagccatgtctccaatcgtccaatggttataaaaaaagaataggtacacatatatattgtttgttttcatggtattataatgttttcaaattaaattctttttttgcatgcgtggcatttattctgcataatattttttctatggatttaacttgtgagtcattttcataaaccaacaccaaggatgaatccatgtttgttactcggaaaccttgaacaaacaccactaatagaaggcgctcgcaatggcgtcgctcatcgacgacgagaagaagcttggcgactgccagttcgacatctggaagcagttctacgtggctgcatgcgccactatagacgacaagctccggcgccgctgtcgcttggacacagtccaaagcggctgcaccgtgctgtccatcatcaagtagggggacctcatggtcggcgccaacgccgccgactcccgggttgttctggacaccgcatccgacaacggtgccatcacgccgtccaactcatcgtccacctgaagcccaatctgccacgtaagtcgctactgaccggccataaattcttatgcgctaggacgacgtccgttgctgacgttgtgtgagcgttctcgaacatgatgtatgcagaggggtagcgcatccagtggtgcaacgaccaggtgtactacctcgctgatgagtccgggtgcacttcgtctggcagcctagccaagagctgtctgtactcgctatgtcgcgcgcgttcgacgactactatatcaaggactgtggcgtcatctcggcgccggaggtgacgcagatgatgaccgacaacaatgaccagttagtcatccttgtcgtagttggggtagtttttgtgctggtctgcctttaattctcttcataaacacacacatttgtctttttgtttaagcaagcgcgtatgttggtgtgtgcctgatgactgacaatgtacgagggaacttcttctggcaggtgtgggacgtgctctccaacgacgagaccatgcaaatcttgacatatattgaagtctgcatagtactgatgattgcaatgtagtggtgaaataactagattaaaataacaaatttatgtatggctaggatcataaatggattatgaaactttttcttataacattataatacacattttgtatataagttatcgtggtattatatgttcccgttgcaacgcacgggcactcacctagtataaaaactaagcatggatcgttataaagcaaaacttagtgagagatgtgtttgcaaggcgtaaatacatgttgtaccttgtcttctgaaccgcctaaacatagtctcaattattatgccataatcctccttagccaacgtcctgcggagtgcatttttgtttagtaggtcaccccaaactttaatgatatgcaaagaccccctacaacattgattttgttaagaataggttagtaatatttagatttgaatatataaatacaattactgaaatatacctagcatccattataacaatctttctgaaagggccccacattgtgcgatgaattgtatccaagtggactacaatagccataatgtctataaaaataacaatttataaatggattaatactgaattttgtgtaaacgatattttaataatattaagagatcgatatattcttaccgactaaagtcctgtttggcaattcgacaatatcagcaaggttcaagaatatttgttttgggaatggcgccacttgaattggaacaatgtatggctccacgatagtttgttggttgagatacaattccatgggactatttagatgtcgaaaattaaattcacccggatgaagaccaaactttacattatgcatcttgtaaacatgcttttcatggagcaaattgtcgaaatgtttgactgtctgatacaaatatgttatgacctcgatcttggctccctaaatgtatttcagtaggagaagagtcgatggtatgaagatcgtgtaaccttaaaaatgaaacttaaagaattgttggcttacattgatgtcagataaaacgaaatgttgtctgtcacgaaaacgtggttcaatcgggaatttaacttctacccgagcgacaatactgtatttccgcggtagcccataataaaaatcttcatcacggtagtcgtcaaacaacctgaagctatattaaatatacgacttaataacggtcataactttgatagacaaatttgtgtaaatatatttatataataacttacattggcatccgttttaggcggtccgctacggctttttcacggttcaatacgaccggttccatcaaaaccttgtagcctttaacataaatttaaatttaaatttaaatggaacacatgtcttctggtaataaattatttttaataatgatcaaagaatactttggagaaactaataatatatgagtgtttttatatatatatatggatttttttagttctgatttgggattggatttccaaaactttagtttggacacagatactttgagaagcattaaaactcgaaacactattgtcatgatcagttttggttcataagattggaaaaataaagttccctaaaataccatgacataaatgagaatatattgctaatagctacacaccggttcttttttctgtttcacagaagcagccggagatccatcagtagtgctcgctttaaggagtctgtaacttcctaatcaaatataacttgatatgtgcgccatttgttggtgttgaccaccattggtagaatgttgtttttggctgcgcgttcttgttagatgagactgtaacttcctatgcatgggtatttaaatcattcttggagtcaatgggagggcgatcgccaaaatcaatattcactgatcaggatgaagctattatgcaggcagtcaaacaaattttccctaatacgcaacattgtttttcctactggcatattctgaagaatgcacaatctcatttaggctcactaaatacgtctcaagcatttgaaattatgtttaccaagtgtatgcaaggatctgactcggaaacaattagtttgagaattgttaagttaacaaatcagatgtattttagttacgatggtttcttgattttgtctgttgttctttatatattgaagcagcacagaccatggtgtcagcagcacagatcctggaactgtctaaagactacagggcaaaattttaactacagaaacctgacagcacaaggatatctgatgacagtgataagagggctggaaaacatggcttggatcagaacagaagcattttccaccgataagttgaagtgtgactggaggaaggaaccctaccttccaagttaaagatggagaggttggtcagcaagatgcaggtcatcagagtgcaaactttatagacataggaccaggttttcctactattaaagtgggaaaaccaggatacatattatggactcgcactactgataaactgaaaggtgtaacaggtgctgatttttgcccaggatcaagttctagggaggccaaaggggaattgatcactaacaaggtcattgcaggacctacaagccctctgtgtgtttttcctcgaaggcatgtgcaccatagaaaaaaggttggtatgcaatggatgtatttccccctctaacatagccaagacaaatgtaaaagttaatgaaaaacaggaaatgtgctcttaaagtacttcttatggcggtgatgctgcttacactaaacatgaaattgtggatttattactggaatctgttgagctgtcttataggcttgattagtattgatgaactttgccactcatgtgttgggcatcttgtagcagtttcctgtgaagccgaactccttctcatgcaaaaggaatgagacacaacaaaaactgaactacttctgccgagattttatttggagacgagcagcaaaataaggccttcgactctacagagagaatgtctaatgcctccccacgcacaattttatctaaaaattagcatcaaccgatatataccggaagaatgcatatataaactttataccccaataaaaaaccccacaacacacaagctcattgtattacttaacatatgtcatatataaaagttatattaggggaagcattgaaaagaagttagttcattttatgtttgagcgacaaat

SEQ ID NO: 79838 - DNA, 2122 bp, Zea Mays
catggcttcgaggcggacgcagaggcgacggtgggatcgtgccaacgaagcacaacaatgggtggcacgcagcggccgccgacgggcgatgacgcgcctccatgaacggccatgagcgctgacgcttctctcgcctcctccaccaacaacggattctccacaaacggccctggatccgttcgtcgctgctctcttatctgctcttccatccaagcatgtatgcccacccccaatcggaccatcgctggcctcctgcagctaggccgccatcacctccttcaagattcattggctgtcgtctctgccattggcgtgcacatacgtgtacagttgggggtcgagcagccagctgctggacgaggatggatggatcggaggatgcatgcatggatcgagcagcggggtgtccaaatcgcgcgcctgtgagcggctcacaggatacgcatcaccggcggggcgttgtgccatgacaaagctccagggcctaacctcatctctcctgtcgcaggacgaccactccatctgtcgtcctccttcatctgtcctatttgtttctctgtttgaacagctaagttttgtggaccttgctggttctgagagggtgaaaaaatctggttcagcaggaaagcaattgaaagaagcgcaaggaaagcaattgaaagaagcgcaaagtataaataaatctctttctgctttggctgatgttattggttctttatcttctgatggacaacatataccttaccggaaccataagttaacaatgcttatgagtgattatctaatgtggattgtctacaaaaaaaaggaaaactataaagtcttcatttttcactttcttgtcagtatttacgaacaaacaaccattactaacgaatataaaaatgtattgttgtgttctacaaatgcttaccaacagtttgaacaattaaggtcaatgttttttgtatttttcttagaaattgtttctgttattgattagttaatgtctataatactttgatggttatgtcttcatccatattaatttgtttgatattattgaatacgaatgaattagtactatttctaataagactcgattatctaatgcgtgtttattaatacttttaagcttaatagtttaatcccaactgcatgtatggtttttcttttggaaaactaaaaataaaataaaatgattggtagttgtggtagcgaagaggaaatgtataatttaatcccaactgcatgtatactttaacgtgtgtcagtggaagggttctagcagggattctcttcccttccgccgaaaatcaccgaggatctattcagggtggaactaactcacatcgaggtttgctcgagctcgctcagcacatagctgaacaaggtccggacgaccgctgttatctgcgtacactggtccaaattatctgcactgaccagaagaggctcatctacgacacgaggacgatgaaggagtgcaacattcagatatttttagatattttacggccagttcagatcagacaagaaagggtcatctagcaaaggttatcgggatgtcaatctttttgtcaaacaagtagatgggaaaaatgttactgattcagagaaattgagattttgacttggagaaggcccagcttgacctaaggcatggctacaacagggctgagatgaagttcaatgtgaatcgtgttgataacatggaatcagtttttaaagaaaatctttgtattctcattttaattttatatgcagcccctcaaatcaactttggaacccaaatggtcaagcctttggacggagcaaagggttttatcctcctatataagaagttcaaatggataaacaataaaggcaatgtcaaattttcatgggattctttggacatagcttcactgccattaacaacaccatttgtaattgcatattctacaaaaaagtggctgagggacccaggagttgtggggcgtcacagataatcggcatggaatttagtagtttataacagtgcctgaaggagctaggatttatgaatcattctccaccaccttgaggtactcaccggagccagaatttatgaatcgttgtccaccatctcgagacttgggtggctccatcgctagctttgatg

SEQ ID NO: 79839 - DNA, 7177 bp, Zea Mays
cagcggccgccgacgggcgatgacgcgcctccatgaacggccatgagcgctgacgcttctctcgcctcctccaccaacaacggattctccacaaacggccctggatccgttcgtcgctgctctcttatctgctcttccatccaagcatgtatgcccacccccaatcggaccatcgctggcctcctgcagctaggccgccatcacctccttcaagattcattggctgtcgtctctgccattggcgtgcacatacgtgtacagttgggggtcgagcagccagctgctggacgaggatggatggatcggaggatgcatgcatggatcgagcagcggggtgtccaaatcgcgcgcctgtgagcggctcacaggatacgcatcaccggcggggcgttgtgccatgacaaagctccagggcctaacctcatctctcctgtcgcaggacgaccactccatctgtcgtcctccttcatctgtcctatttgtttctctgtttgaacagctaagttttgtggaccttgctggttctgagagggtgaaaaaatctggttcagcaggaaagcaattgaaagaagcgcaaggaaagcaattgaaagaagcgcaaagtataaataaatctctttctgctttggctgatgttattggttctttatcttctgatggacaacatataccttaccggaaccataagttaacaatgcttatgagtgattatctaatgtggattgtctacaaaaaaaaggtactatactttaatcatccgtttgtcttttcattatgattatataatgtggattgcctgcaaaaaaaaggtactatactttaatcagccgtttgtcttttcattattccaatctttattttaataggttgcatttccggtttttattcagtaccaacaaaaccattggagtacctgcgttctattcataacgtgtgaatatggaaattcacaacgattatatggtgaactcatgtttctttttctaatgcaaggaaaactataaagtcttcatttttcactttcttgtcagtatttacgaacaaacaaccattactaacgaatataaaaatgtattgttgtgttctacaaatgcttaccaacagtttgaacaattaaggtcaatgttttttgtatttttcttagaaattgtttctgttattgattagttaatgtctataatactttgatggttatgtcttcatccatattaatttgtttgatattattgaatacgaatgaattagtactatttctaataagactcgattatctaatgcgtgtttattaatacttttaagcttaatagtttaatcccaactgcatgtatggtttttcttttggaaaactaaaaataaaataaaatgattggtagttgtggtagcgaagaggaaatgtataatttaatcccaactgcatgtatactttaacgtgtgtcagtggaagggttctagcagggattctcttcccttccgccgaaaatcaccgaggatctattcagggtggaactaactcacatcgaggtttgctcgagctcgctcagcacatagctgaacaaggtccggacgaccgctgttatctgcgtacactggtccaaattatctgcactgaccagaagaggctcatctacgacacgaggacgatgaaggagtgcaacattcagatatttttagatattttacggccagttcagatcagacaagaaagggtcatctagcaaaggttatcgggatgtcaatctttttgtcaaacaagtagatgggaaaaatgttactgattcagagaaattgagattttgacttggagaaggcccagcttgacctaaggcatggctacaacagggctgagatgaagttcaatgtgaatcgtgttgataacatggtgatctaggcaatctttctattggatatgcttaacaaggacatcaattccttctccatgagagtcagcccctcaaatcaactttggaacccaaatggtcaagcctttggacggagcaaaggtaatcgattaaagcggcttcacaacaggttttatcctcctatataagaagttcaaatggataaacaataaaggcagtgagttcaatcacctttagaagatcaatgtttactttgctggtggctgagggacccaggagttgtggggcgtcacagataatcggcatggaatttagtagtttataacagtgcctgaaggagctaggatttatgaatcattctccaccaccttgaggtactcaccggagccagaatttatgaatcgttgtccaccatctcgagacagagcagttcggaaccttggacatctgatcaggaatgaagaggaaaacaaaaacaaacagtttgttcattactactcaaaagaacttggccattcgtatgccatatgatttcctctcgctggtacctgtcattgaaggagctggaggatcaataactgattggagaggggacaagctctattggcctgttactgcagaatcacaatccacaagttttaacgtggtagcagttggggatgcccgtgtccacaaagaggcccttgatgcgttgcagtggcgctagcgtgctctttagataagcattatactaataaccaactatttagacatttacatgtgatatttgtatgaccaataataagctttacctgtatgcttgttggttggcctcaacctttgcactaataatagacagcttggttgtaaactaccaagcagtggcttgctgtttgcaccaagcagatattatgtcttgggaacgctaaatgtgtgaggtattaccttagtgtgagcttcccttgcacccagcaattcagctccattgtgcagtgcttggggatgcttaatcgagagtttgattgttgttgcttccatggctttctgggtgctgcaccatagctgaattgcgaactatgatttccagccttgaactttggatcgaagtctagggtcagtctgggctttaggcgatgacgttttctggcttcagatgcccaagggtcattgagccatgtctccaatcgtccaatggttataaaaaaagaataggtacacatatatattgtttgttttcatggtattataatgttttcaaattaaattctttttttgcatgcgtggcatttattctgcataatattttttctatggatttaacttgtgagtcattttcataaaccaacaccaaggatgaatccatgtttgttactcggaaaccttgaacaaacaccactaatagaaggcgctcgcaatggcgtcgctcatcgacgacgagaagaagcttggcgactgccagttcgacatctggaagcagttctacgtggctgcatgcgccactatagacgacaagctccggcgccgctgtcgcttggacacagtccaaagcggctgcaccgtgctgtccatcatcaagtagggggacctcatggtcggcgccaacgccgccgactcccgggttgttctggacaccgcatccgacaacggtgccatcacgccgtccaactcatcgtccacctgaagcccaatctgccacgtaagtcgctactgaccggccataaattcttatgcgctaggacgacgtccgttgctgacgttgtgtgagcgttctcgaacatgatgtatgcagaggggtagcgcatccagtggtgcaacgaccaggtgtactacctcgctgatgagtccgggtgcacttcgtctggcagcctagccaagagctgtctgtactcgctatgtcgcgcgcgttcgacgactactatatcaaggactgtggcgtcatctcggcgccggaggtgacgcagatgatgaccgacaacaatgaccagttagtcatccttgtcgtagttggggtagtttttgtgctggtctgcctttaattctcttcataaacacacacatttgtctttttgtttaagcaagcgcgtatgttggtgtgtgcctgatgactgacaatgtacgagggaacttcttctggcaggtgtgggacgtgctctccaacgacgagaccatgcaaatcttgacatatattgaagtctgcatagtactgatgattgcaatgtagtggtgaaataactagattaaaataacaaatttatgtatggctaggatcataaatggattatgaaactttttcttataacattataatacacattttgtatataagttatcgtggtattatatgttcccgttgcaacgcacgggcactcacctagtataaaaactaagcatggatcgttataaagcaaaacttagtgagagatgtgtttgcaaggcgtaaatacatgttgtaccttgtcttctgaaccgcctaaacatagtctcaattattatgccataatcctccttagccaacgtcctgcggagtgcatttttgtttagtaggtcaccccaaactttaatgatatgcaaagaccccctacaacattgattttgttaagaataggttagtaatatttagatttgaatatataaatacaattactgaaatatacctagcatccattataacaatctttctgaaagggccccacattgtgcgatgaattgtatccaagtggactacaatagccataatgtctataaaaataacaatttataaatggattaatactgaattttgtgtaaacgatattttaataatattaagagatcgatatattcttaccgactaaagtcctgtttggcaattcgacaatatcagcaaggttcaagaatatttgttttgggaatggcgccacttgaattggaacaatgtatggctccacgatagtttgttggttgagatacaattccatgggactatttagatgtcgaaaattaaattcacccggatgaagaccaaactttacattatgcatcttgtaaacatgcttttcatggagcaaattgtcgaaatgtttgactgtctgatacaaatatgttatgacctcgatcttggctccctaaatgtatttcagtaggagaagagtcgatggtatgaagatcgtgtaaccttaaaaatgaaacttaaagaattgttggcttacattgatgtcagataaaacgaaatgttgtctgtcacgaaaacgtggttcaatcgggaatttaacttctacccgagcgacaatactgtatttccgcggtagcccataataaaaatcttcatcacggtagtcgtcaaacaacctgaagctatattaaatatacgacttaataacggtcataactttgatagacaaatttgtgtaaatatatttatataataacttacattggcatccgttttaggcggtccgctacggctttttcacggttcaatacgaccggttccatcaaaaccttgtagcctttaacataaatttaaatttaaatttaaatggaacacatgtcttctggtaataaattatttttaataatgatcaaagaatactttggagaaactaataatatatgagtgtttttatatatatatatggatttttttagttctgatttgggattggatttccaaaactttagtttggacacagatactttgagaagcattaaaactcgaaacactattgtcatgatcagttttggttcataagattggaaaaataaagttccctaaaataccatgacataaatgagaatatattgctaatagctacacaccggttcttttttctgtttcacagaagcagccggagatccatcagtagtgctcgctttaaggagtctgtaacttcctaatcaaatataacttgatatgtgcgccatttgttggtgttgaccaccattggtagaatgttgtttttggctgcgcgttcttgttagatgagactgtaacttcctatgcatgggtatttaaatcattcttggagtcaatgggagggcgatcgccaaaatcaatattcactgatcaggatgaagctattatgcaggcagtcaaacaaattttccctaatacgcaacattgtttttcctactggcatattctgaagaatgcacaatctcatttaggctcactaaatacgtctcaagcatttgaaattatgtttaccaagtgtatgcaaggatctgactcggaaacaattagtttgagaattgttaagttaacaaatcagatgtattttagttacgatggtttcttgattttgtctgttgttctttatatattgaagcagcacagaccatggtgtcagcagcacagatcctggaactgtctaaagactacagggcaaaattttaactacagaaacctgacagcacaaggatatctgatgacagtgataagagggctggaaaacatggcttggatcagaacagaagcattttccaccgataagttgaagtgtgactggaggaaggaaccctaccttccaagttaaagatggagaggttggtcagcaagatgcaggtcatcagagtgcaaactttatagacataggaccaggttttcctactattaaagtgggaaaaccaggatacatattatggactcgcactactgataaactgaaaggtgtaacaggtgctgatttttgcccaggatcaagttctagggaggccaaaggggaattgatcactaacaaggtcattgcaggacctacaagccctctgtgtgtttttcctcgaaggcatgtgcaccatagaaaaaaggttggtatgcaatggatgtatttccccctctaacatagccaagacaaatgtaaaagttaatgaaaaacaggaaatgtgctcttaaagtacttcttatggcggtgatgctgcttacactaaacatgaaattgtggatttattactggaatctgttgagctgtcttataggcttgattagtattgatgaactttgccactcatgtgttgggcatcttgtagcagtttcctgtgaagccgaactccttctcatgcaaaaggaatgagacacaacaaaaactgaactacttctgccgagattttatttggagacgagcagcaaaataaggccttcgactctacagagagaatgtctaatgcctccccacgcacaattttatctaaaaattagcatcaaccgatatataccggaagaatgcatatataaactttataccccaataaaaaaccccacaacacacaagctcattgtattacttaacatatgtcatatataaaagttatattaggggaagcattgaaaagaagttagttcattttatgtttgagcgacaaat

SEQ ID NO: 79840 - DNA, 6433 bp, Zea Mays
gtataaataaatctctttctgctttggctgatgttattggtgctttatcttctgatggacaacatataccttaccggaaccataatgcttatgagtgattatctaatgtggattgtctgcaaaaaagctaagttttgtggaccttggtggttctgagaggggtgaaaaaatctggttccgcaggaaagcaattgaaagaagcgcaaagtataaataaatctctttctgctttggctgatgttattggttctttatcttctgatggacaacatataccttaccggaaccataagttaacaatgcttatgagtgattatctaatgtggattgtctacaaaaaaaaggtactatactttaatcatccgtttgtcttttcattatgattatataatgtggattgcctgcaaaaaaaaggtactatactttaatcagccgtttgtcttttcattattccaatctttattttaataggttgcatttccggtttttattcagtaccaacaaaaccattggagtacctgcgttctattcataacgtgtgaatatggaaattcacaacgattatatggtgaactcatgtttctttttctaatgcaaggaaaactataaagtcttcatttttcactttcttgtcagtatttacgaacaaacaaccattactaacgaatataaaaatgtattgttgtgttctacaaatgcttaccaacagtttgaacaattaagtggaagggttctagcagggattctcttcccttccgccgaaaatcaccgaggatctattcagggtggaactaactcacatcgaggtttgctcgagctcgctcagcacatagctgaacaaggtccggacgaccgctgttatctgcgtacactggtccaaattatctgcactgaccagaagaggctcatctacgacacgaggacgatgaaggagtgcaacattcagatatttttagatattttacggccagttcagatcagacaagaaagggtcatctagcaaaggttatcgggatgtcaatctttttgtcaaacaagtagatgggaaaaatgttactgattcagagaaattgagattttgacttggagaaggcccagcttgacctaaggcatggctacaacagggctgagatgaagttcaatgtgaatcgtgttgataacatggtgatctaggcaatctttctattggatatgcttaacaaggacatcaattccttctccatgagagtcagcccctcaaatcaactttggaacccaaatggtcaagcctttggacggagcaaaggtaatcgattaaagcggcttcacaacagtggctgagggacccaggagttgtggggcgtcacagataatcggcatggaatttagtagtttataacagtgcctgaaggagctaggatttatgaatcattctccaccaccttgaggtactcaccggagccagaatttatgaatcgttgtccaccatctcgagagacttgggtggctccatcgctagctttgatggcaatggttatacaagtaataagtttaaagacagagcagttcggaaccttggacatctgatcaggaatgaagaggaaaacaaaaacaaacagtttgttcattactactcaaaagaacttggccattcgtatgccatatgatttcctctcgctggtacctgtcattgaaggagctggaggatcaataactgattggagaggggacaagctctattggcctgttactgcagaatcacaatccacaagttttaacgtggtagcagttggggatgcccgtgtccacaaagaggcccttgatgcgttgcagtggcgctagcgtgctctttagataagcattatactaataaccaactatttagacatttacatgtgatatttgtatgaccaataataagctttacctgtatgcttgttggttggcctcaacctttgcactaataatagacagcttggttgtaaactaccaagcagtggcttgctgtttgcaccaagcagatattatgtcttgggaacgctaaatgtgtgaggtattaccttagtgtgagcttcccttgcacccagcaattcagctccattgtgcagtgcttggggatgcttaatcgagagtttgattgttgttgcttccatggctttctgggtgctgcaccatagctgaattgcgaactatgatttccagccttgaactttggatcgaagtctagggtcagtctgggctttaggcgatgacgttttctggcttcagatgcccaagggtcattgagccatgtctccaatcgtccaatggttataaaaaaagaataggtacacatatatattgtttgttttcatggtattataatgttttcaaattaaattctttttttgcatgcgtggcatttattctgcataatattttttctatggatttaacttgtgagtcattttcataaaccaacaccaaggatgaatccatgtttgttactcggaaaccttgaacaaacaccactaatagaaggcgctcgcaatggcgtcgctcatcgacgacgagaagaagcttggcgactgccagttcgacatctggaagcagttctacgtggctgcatgcgccactatagacgacaagctccggcgccgctgtcgcttggacacagtccaaagcggctgcaccgtgctgtccatcatcaagtagggggacctcatggtcggcgccaacgccgccgactcccgggttgttctggacaccgcatccgacaacggtgccatcacgccgtccaactcatcgtccacctgaagcccaatctgccacgtaagtcgctactgaccggccataaattcttatgcgctaggacgacgtccgttgctgacgttgtgtgagcgttctcgaacatgatgtatgcagaggggtagcgcatccagtggtgcaacgaccaggtgtactacctcgctgatgagtccgggtgcacttcgtctggcagcctagccaagagctgtctgtactcgctatgtcgcgcgcgttcgacgactactatatcaaggactgtggcgtcatctcggcgccggaggtgacgcagatgatgaccgacaacaatgaccagttagtcatccttgtcgtagttggggtagtttttgtgctggtctgcctttaattctcttcataaacacacacatttgtctttttgtttaagcaagcgcgtatgttggtgtgtgcctgatgactgacaatgtacgagggaacttcttctggcaggtgtgggacgtgctctccaacgacgagaccatgcaaatcttgacatatattgaagtctgcatagtactgatgattgcaatgtagtggtgaaataactagattaaaataacaaatttatgtatggctaggatcataaatggattatgaaactttttcttataacattataatacacattttgtatataagttatcgtggtattatatgttcccgttgcaacgcacgggcactcacctagtataaaaactaagcatggatcgttataaagcaaaacttagtgagagatgtgtttgcaaggcgtaaatacatgttgtaccttgtcttctgaaccgcctaaacatagtctcaattattatgccataatcctccttagccaacgtcctgcggagtgcatttttgtttagtaggtcaccccaaactttaatgatatgcaaagaccccctacaacattgattttgttaagaataggttagtaatatttagatttgaatatataaatacaattactgaaatatacctagcatccattataacaatctttctgaaagggccccacattgtgcgatgaattgtatccaagtggactacaatagccataatgtctataaaaataacaatttataaatggattaatactgaattttgtgtaaacgatattttaataatattaagagatcgatatattcttaccgactaaagtcctgtttggcaattcgacaatatcagcaaggttcaagaatatttgttttgggaatggcgccacttgaattggaacaatgtatggctccacgatagtttgttggttgagatacaattccatgggactatttagatgtcgaaaattaaattcacccggatgaagaccaaactttacattatgcatcttgtaaacatgcttttcatggagcaaattgtcgaaatgtttgactgtctgatacaaatatgttatgacctcgatcttggctccctaaatgtatttcagtaggagaagagtcgatggtatgaagatcgtgtaaccttaaaaatgaaacttaaagaattgttggcttacattgatgtcagataaaacgaaatgttgtctgtcacgaaaacgtggttcaatcgggaatttaacttctacccgagcgacaatactgtatttccgcggtagcccataataaaaatcttcatcacggtagtcgtcaaacaacctgaagctatattaaatatacgacttaataacggtcataactttgatagacaaatttgtgtaaatatatttatataataacttacattggcatccgttttaggcggtccgctacggctttttcacggttcaatacgaccggttccatcaaaaccttgtagcctttaacataaatttaaatttaaatttaaatggaacacatgtcttctggtaataaattatttttaataatgatcaaagaatactttggagaaactaataatatatgagtgtttttatatatatatatggatttttttagttctgatttgggattggatttccaaaactttagtttggacacagatactttgagaagcattaaaactcgaaacactattgtcatgatcagttttggttcataagattggaaaaataaagttccctaaaataccatgacataaatgagaatatattgctaatagctacacaccggttcttttttctgtttcacagaagcagccggagatccatcagtagtgctcgctttaaggagtctgtaacttcctaatcaaatataacttgatatgtgcgccatttgttggtgttgaccaccattggtagaatgttgtttttggctgcgcgttcttgttagatgagactgtaacttcctatgcatgggtatttaaatcattcttggagtcaatgggagggcgatcgccaaaatcaatattcactgatcaggatgaagctattatgcaggcagtcaaacaaattttccctaatacgcaacattgtttttcctactggcatattctgaagaatgcacaatctcatttaggctcactaaatacgtctcaagcatttgaaattatgtttaccaagtgtatgcaaggatctgactcggaaacaattagtttgagaattgttaagttaacaaatcagatgtattttagttacgatggtttcttgattttgtctgttgttctttatatattgaagcagcacagaccatggtgtcagcagcacagatcctggaactgtctaaagactacagggcaaaattttaactacagaaacctgacagcacaaggatatctgatgacagtgataagagggctggaaaacatggcttggatcagaacagaagcattttccaccgataagttgaagtgtgactggaggaaggaaccctaccttccaagttaaagatggagaggttggtcagcaagatgcaggtcatcagagtgcaaactttatagacataggaccaggttttcctactattaaagtgggaaaaccaggatacatattatggactcgcactactgataaactgaaaggtgtaacaggtgctgatttttgcccaggatcaagttctagggaggccaaaggggaattgatcactaacaaggtcattgcaggacctacaagccctctgtgtgtttttcctcgaaggcatgtgcaccatagaaaaaaggttggtatgcaatggatgtatttccccctctaacatagccaagacaaatgtaaaagttaatgaaaaacaggaaatgtgctcttaaagtacttcttatggcggtgatgctgcttacactaaacatgaaattgtggatttattactggaatctgttgagctgtcttataggcttgattagtattgatgaactttgccactcatgtgttgggcatcttgtagcagtttcctgtgaagccgaactccttctcatgcaaaaggaatgagacacaacaaaaactgaactacttctgccgagattttatttggagacgagcagcaaaataaggccttcgactctacagagagaatgtctaatgcctccccacgcacaattttatctaaaaattagcatcaaccgatatataccggaagaatgcatatataaactttataccccaataaaaaaccccacaacacacaagctcattgtattacttaacatatgtcatatataaaagttatattaggggaagcattgaaaagaagttagttcattttatgtttgagcgacaaat

SEQ ID NO: 79841 - DNA, 6677 bp, Zea Mays
atctctttctgctttggctgatgttattggtgctttatcttctgatggacaacatataccttaccggaaccataatgcttatgagtgattatctaatgtggattgtctgcaaaaaagctaagttttgtggaccttggtggttctgagaggggtgaaaaaatctggttccgcaggaaagcaattgaaagaagcgcaaagtataaataaatctctttctgctttggctgatgttattggttctttatcttctgatggacaacatataccttaccggaaccataagttaacaatgcttatgagtgattatctaatgtggattgtctacaaaaaaaaggtactatactttaatcatccgtttgtcttttcattatgattatataatgtggattgcctgcaaaaaaaaggtactatactttaatcagccgtttgtcttttcattattccaatctttattttaataggttgcatttccggtttttattcagtaccaacaaaaccattggagtacctgcgttctattcataacgtgtgaatatggaaattcacaacgattatatggtgaactcatgtttctttttctaatgcaaggaaaactataaagtcttcatttttcactttcttgtcagtatttacgaacaaacaaccattactaacgaatataaaaatgtattgttgtgttctacaaatgcttaccaacagtttgaacaattaaggtcaatgttttttgtatttttcttagaaattgtttctgttattgattagttaatgtctataatactttgatggttatgtcttcatccatattaatttgtttgatattattgaatacgaatgaattagtactatttctaataagactcgattatctaatgcgtgtttattaatacttttaagcttaatagtttaatcccaactgcatgtatggtttttcttttggaaaactaaaaataaaataaaatgattggtagttgtggtagcgaagaggaaatgtataatttaatcccaactgcatgtatactttaacgtgtgtcagtggaagggttctagcagggattctcttcccttccgccgaaaatcaccgaggatctattcagggtggaactaactcacatcgaggtttgctcgagctcgctcagcacatagctgaacaaggtccggacgaccgctgttatctgcgtacactggtccaaattatctgcactgaccagaagaggctcatctacgacacgaggacgatgaaggagtgcaacattcagatatttttagatattttacggccagttcagatcagacaagaaagggtcatctagcaaaggttatcgggatgtcaatctttttgtcaaacaagtagatgggaaaaatgttactgattcagagaaattgagattttgacttggagaaggcccagcttgacctaaggcatggctacaacagggctgagatgaagttcaatgtgaatcgtgttgataacatggtgatctaggcaatctttctattggatatgcttaacaaggacatcaattccttctccatgagagtcagcccctcaaatcaactttggaacccaaatggtcaagcctttggacggagcaaaggtaatcgattaaagcggcttcacaacagtggctgagggacccaggagttgtggggcgtcacagataatcggcatggaatttagtagtttataacagtgcctgaaggagctaggatttatgaatcattctccaccaccttgaggtactcaccggagccagaatttatgaatcgttgtccaccatctcgagagcagttcggaaccttggacatctgatcaggaatgaagaggaaaacaaaaacaaacagtttgttcattactactcaaaagaacttggccattcgtatgccatatgatttcctctcgctggtacctgtcattgaaggagctggaggatcaataactgattggagaggggacaagctctattggcctgttactgcagaatcacaatccacaagttttaacgtggtagcagttggggatgcccgtgtccacaaagaggcccttgatgcgttgcagtggcgctagcgtgctctttagataagcattatactaataaccaactatttagacatttacatgtgatatttgtatgaccaataataagctttacctgtatgcttgttggttggcctcaacctttgcactaataatagacagcttggttgtaaactaccaagcagtggcttgctgtttgcaccaagcagatattatgtcttgggaacgctaaatgtgtgaggtattaccttagtgtgagcttcccttgcacccagcaattcagctccattgtgcagtgcttggggatgcttaatcgagagtttgattgttgttgcttccatggctttctgggtgctgcaccatagctgaattgcgaactatgatttccagccttgaactttggatcgaagtctagggtcagtctgggctttaggcgatgacgttttctggcttcagatgcccaagggtcattgagccatgtctccaatcgtccaatggttataaaaaaagaataggtacacatatatattgtttgttttcatggtattataatgttttcaaattaaattctttttttgcatgcgtggcatttattctgcataatattttttctatggatttaacttgtgagtcattttcataaaccaacaccaaggatgaatccatgtttgttactcggaaaccttgaacaaacaccactaatagaaggcgctcgcaatggcgtcgctcatcgacgacgagaagaagcttggcgactgccagttcgacatctggaagcagttctacgtggctgcatgcgccactatagacgacaagctccggcgccgctgtcgcttggacacagtccaaagcggctgcaccgtgctgtccatcatcaagtagggggacctcatggtcggcgccaacgccgccgactcccgggttgttctggacaccgcatccgacaacggtgccatcacgccgtccaactcatcgtccacctgaagcccaatctgccacgtaagtcgctactgaccggccataaattcttatgcgctaggacgacgtccgttgctgacgttgtgtgagcgttctcgaacatgatgtatgcagaggggtagcgcatccagtggtgcaacgaccaggtgtactacctcgctgatgagtccgggtgcacttcgtctggcagcctagccaagagctgtctgtactcgctatgtcgcgcgcgttcgacgactactatatcaaggactgtggcgtcatctcggcgccggaggtgacgcagatgatgaccgacaacaatgaccagttagtcatccttgtcgtagttggggtagtttttgtgctggtctgcctttaattctcttcataaacacacacatttgtctttttgtttaagcaagcgcgtatgttggtgtgtgcctgatgactgacaatgtacgagggaacttcttctggcaggtgtgggacgtgctctccaacgacgagaccatgcaaatcttgacatatattgaagtctgcatagtactgatgattgcaatgtagtggtgaaataactagattaaaataacaaatttatgtatggctaggatcataaatggattatgaaactttttcttataacattataatacacattttgtatataagttatcgtggtattatatgttcccgttgcaacgcacgggcactcacctagtataaaaactaagcatggatcgttataaagcaaaacttagtgagagatgtgtttgcaaggcgtaaatacatgttgtaccttgtcttctgaaccgcctaaacatagtctcaattattatgccataatcctccttagccaacgtcctgcggagtgcatttttgtttagtaggtcaccccaaactttaatgatatgcaaagaccccctacaacattgattttgttaagaataggttagtaatatttagatttgaatatataaatacaattactgaaatatacctagcatccattataacaatctttctgaaagggccccacattgtgcgatgaattgtatccaagtggactacaatagccataatgtctataaaaataacaatttataaatggattaatactgaattttgtgtaaacgatattttaataatattaagagatcgatatattcttaccgactaaagtcctgtttggcaattcgacaatatcagcaaggttcaagaatatttgttttgggaatggcgccacttgaattggaacaatgtatggctccacgatagtttgttggttgagatacaattccatgggactatttagatgtcgaaaattaaattcacccggatgaagaccaaactttacattatgcatcttgtaaacatgcttttcatggagcaaattgtcgaaatgtttgactgtctgatacaaatatgttatgacctcgatcttggctccctaaatgtatttcagtaggagaagagtcgatggtatgaagatcgtgtaaccttaaaaatgaaacttaaagaattgttggcttacattgatgtcagataaaacgaaatgttgtctgtcacgaaaacgtggttcaatcgggaatttaacttctacccgagcgacaatactgtatttccgcggtagcccataataaaaatcttcatcacggtagtcgtcaaacaacctgaagctatattaaatatacgacttaataacggtcataactttgatagacaaatttgtgtaaatatatttatataataacttacattggcatccgttttaggcggtccgctacggctttttcacggttcaatacgaccggttccatcaaaaccttgtagcctttaacataaatttaaatttaaatttaaatggaacacatgtcttctggtaataaattatttttaataatgatcaaagaatactttggagaaactaataatatatgagtgtttttatatatatatatggatttttttagttctgatttgggattggatttccaaaactttagtttggacacagatactttgagaagcattaaaactcgaaacactattgtcatgatcagttttggttcataagattggaaaaataaagttccctaaaataccatgacataaatgagaatatattgctaatagctacacaccggttcttttttctgtttcacagaagcagccggagatccatcagtagtgctcgctttaaggagtctgtaacttcctaatcaaatataacttgatatgtgcgccatttgttggtgttgaccaccattggtagaatgttgtttttggctgcgcgttcttgttagatgagactgtaacttcctatgcatgggtatttaaatcattcttggagtcaatgggagggcgatcgccaaaatcaatattcactgatcaggatgaagctattatgcaggcagtcaaacaaattttccctaatacgcaacattgtttttcctactggcatattctgaagaatgcacaatctcatttaggctcactaaatacgtctcaagcatttgaaattatgtttaccaagtgtatgcaaggatctgactcggaaacaattagtttgagaattgttaagttaacaaatcagatgtattttagttacgatggtttcttgattttgtctgttgttctttatatattgaagcagcacagaccatggtgtcagcagcacagatcctggaactgtctaaagactacagggcaaaattttaactacagaaacctgacagcacaaggatatctgatgacagtgataagagggctggaaaacatggcttggatcagaacagaagcattttccaccgataagttgaagtgtgactggaggaaggaaccctaccttccaagttaaagatggagaggttggtcagcaagatgcaggtcatcagagtgcaaactttatagacataggaccaggttttcctactattaaagtgggaaaaccaggatacatattatggactcgcactactgataaactgaaaggtgtaacaggtgctgatttttgcccaggatcaagttctagggaggccaaaggggaattgatcactaacaaggtcattgcaggacctacaagccctctgtgtgtttttcctcgaaggcatgtgcaccatagaaaaaaggttggtatgcaatggatgtatttccccctctaacatagccaagacaaatgtaaaagttaatgaaaaacaggaaatgtgctcttaaagtacttcttatggcggtgatgctgcttacactaaacatgaaattgtggatttattactggaatctgttgagctgtcttataggcttgattagtattgatgaactttgccactcatgtgttgggcatcttgtagcagtttcctgtgaagccgaactccttctcatgcaaaaggaatgagacacaacaaaaactgaactacttctgccgagattttatttggagacgagcagcaaaataaggccttcgactctacagagagaatgtctaatgcctccccacgcacaattttatctaaaaattagcatcaaccgatatataccggaagaatgcatatataaactttataccccaataaaaaaccccacaacacacaagctcattgtattacttaacatatgtcatatataaaagttatattaggggaagcattgaaaagaagttagttcattttatgtttgagcgacaaat

SEQ ID NO: 79842 - DNA, 6273 bp, Zea Mays
tctctttctgctttggctgatgttattggtgctttatcttctgatggacaacatataccttaccggaaccataatgcttatgagtgattatctaatgtggattgtctgcaaaaaagctaagttttgtggaccttggtggttctgagaggggtgaaaaaatctggttccgcaggaaagcaattgaaagaagcgcaaagtataaataaatctctttctgctttggctgatgttattggttctttatcttctgatggacaacatataccttaccggaaccataagttaacaatgcttatgagtgattatctaatgtggattgtctacaaaaaaaaggtactatactttaatcatccgtttgtcttttcattatgattatataatgtggattgcctgcaaaaaaaaggtactatactttaatcagccgtttgtcttttcattattccaatctttattttaataggttgcatttccggtttttattcagtaccaacaaaaccattggagtacctgcgttctattcataacgtgtgaatatggaaattcacaacgattatatggtgaactcatgtttctttttctaatgcaaggaaaactataaagtcttcatttttcactttcttgtcagtatttacgaacaaacaaccattactaacgaatataaaaatgtattgttgtgttctacaaatgcttaccaacagtttgaacaattaagtggaagggttctagcagggattctcttcccttccgccgaaaatcaccgaggatctattcagggtggaactaactcacatcgaggtttgctcgagctcgctcagcacatagctgaacaaggtccggacgaccgctgttatctgcgtacactggtccaaattatctgcactgaccagaagaggctcatctacgacacgaggacgatgaaggagtgcaacattcaggattttgacttggagaaggcccagcttgacctaaggcatggctacaacagggctgagatgaagttcaatgtgaatcgtgttgataacatggaatcagtttttaaagaaaatctttgtattctcattttaattttatatgcagcccctcaaatcaactttggaacccaaatggtcaagcctttggacggagcaaagggttttatcctcctatataagaagttcaaatggataaacaataaaggcaatgtcaaattttcatgggattctttggacatagcttcactgccattaacaacaccatttgtaattgcatattctacaaaaaagtggctgagggacccaggagttgtggggcgtcacagataatcggcatggaatttagtagtttataacagtgcctgaaggagctaggatttatgaatcattctccaccaccttgagacagagcagttcggaaccttggacatctgatcaggaatgaagaggaaaacaaaaacaaacagtttgttcattactactcaaaagaacttggccattcgtatgccatatgatttcctctcgctggtacctgtcattgaaggagctggaggatcaataactgattggagaggggacaagctctattggcctgttactgcagaatcacaatccacaagttttaacgtggtagcagttggggatgcccgtgtccacaaagaggcccttgatgcgttgcagtggcgctagcgtgctctttagataagcattatactaataaccaactatttagacatttacatgtgatatttgtatgaccaataataagctttacctgtatgcttgttggttggcctcaacctttgcactaataatagacagcttggttgtaaactaccaagcagtggcttgctgtttgcaccaagcagatattatgtcttgggaacgctaaatgtgtgaggtattaccttagtgtgagcttcccttgcacccagcaattcagctccattgtgcagtgcttggggatgcttaatcgagagtttgattgttgttgcttccatggctttctgggtgctgcaccatagctgaattgcgaactatgatttccagccttgaactttggatcgaagtctagggtcagtctgggctttaggcgatgacgttttctggcttcagatgcccaagggtcattgagccatgtctccaatcgtccaatggttataaaaaaagaataggtacacatatatattgtttgttttcatggtattataatgttttcaaattaaattctttttttgcatgcgtggcatttattctgcataatattttttctatggatttaacttgtgagtcattttcataaaccaacaccaaggatgaatccatgtttgttactcggaaaccttgaacaaacaccactaatagaaggcgctcgcaatggcgtcgctcatcgacgacgagaagaagcttggcgactgccagttcgacatctggaagcagttctacgtggctgcatgcgccactatagacgacaagctccggcgccgctgtcgcttggacacagtccaaagcggctgcaccgtgctgtccatcatcaagtagggggacctcatggtcggcgccaacgccgccgactcccgggttgttctggacaccgcatccgacaacggtgccatcacgccgtccaactcatcgtccacctgaagcccaatctgccacgtaagtcgctactgaccggccataaattcttatgcgctaggacgacgtccgttgctgacgttgtgtgagcgttctcgaacatgatgtatgcagaggggtagcgcatccagtggtgcaacgaccaggtgtactacctcgctgatgagtccgggtgcacttcgtctggcagcctagccaagagctgtctgtactcgctatgtcgcgcgcgttcgacgactactatatcaaggactgtggcgtcatctcggcgccggaggtgacgcagatgatgaccgacaacaatgaccagttagtcatccttgtcgtagttggggtagtttttgtgctggtctgcctttaattctcttcataaacacacacatttgtctttttgtttaagcaagcgcgtatgttggtgtgtgcctgatgactgacaatgtacgagggaacttcttctggcaggtgtgggacgtgctctccaacgacgagaccatgcaaatcttgacatatattgaagtctgcatagtactgatgattgcaatgtagtggtgaaataactagattaaaataacaaatttatgtatggctaggatcataaatggattatgaaactttttcttataacattataatacacattttgtatataagttatcgtggtattatatgttcccgttgcaacgcacgggcactcacctagtataaaaactaagcatggatcgttataaagcaaaacttagtgagagatgtgtttgcaaggcgtaaatacatgttgtaccttgtcttctgaaccgcctaaacatagtctcaattattatgccataatcctccttagccaacgtcctgcggagtgcatttttgtttagtaggtcaccccaaactttaatgatatgcaaagaccccctacaacattgattttgttaagaataggttagtaatatttagatttgaatatataaatacaattactgaaatatacctagcatccattataacaatctttctgaaagggccccacattgtgcgatgaattgtatccaagtggactacaatagccataatgtctataaaaataacaatttataaatggattaatactgaattttgtgtaaacgatattttaataatattaagagatcgatatattcttaccgactaaagtcctgtttggcaattcgacaatatcagcaaggttcaagaatatttgttttgggaatggcgccacttgaattggaacaatgtatggctccacgatagtttgttggttgagatacaattccatgggactatttagatgtcgaaaattaaattcacccggatgaagaccaaactttacattatgcatcttgtaaacatgcttttcatggagcaaattgtcgaaatgtttgactgtctgatacaaatatgttatgacctcgatcttggctccctaaatgtatttcagtaggagaagagtcgatggtatgaagatcgtgtaaccttaaaaatgaaacttaaagaattgttggcttacattgatgtcagataaaacgaaatgttgtctgtcacgaaaacgtggttcaatcgggaatttaacttctacccgagcgacaatactgtatttccgcggtagcccataataaaaatcttcatcacggtagtcgtcaaacaacctgaagctatattaaatatacgacttaataacggtcataactttgatagacaaatttgtgtaaatatatttatataataacttacattggcatccgttttaggcggtccgctacggctttttcacggttcaatacgaccggttccatcaaaaccttgtagcctttaacataaatttaaatttaaatttaaatggaacacatgtcttctggtaataaattatttttaataatgatcaaagaatactttggagaaactaataatatatgagtgtttttatatatatatatggatttttttagttctgatttgggattggatttccaaaactttagtttggacacagatactttgagaagcattaaaactcgaaacactattgtcatgatcagttttggttcataagattggaaaaataaagttccctaaaataccatgacataaatgagaatatattgctaatagctacacaccggttcttttttctgtttcacagaagcagccggagatccatcagtagtgctcgctttaaggagtctgtaacttcctaatcaaatataacttgatatgtgcgccatttgttggtgttgaccaccattggtagaatgttgtttttggctgcgcgttcttgttagatgagactgtaacttcctatgcatgggtatttaaatcattcttggagtcaatgggagggcgatcgccaaaatcaatattcactgatcaggatgaagctattatgcaggcagtcaaacaaattttccctaatacgcaacattgtttttcctactggcatattctgaagaatgcacaatctcatttaggctcactaaatacgtctcaagcatttgaaattatgtttaccaagtgtatgcaaggatctgactcggaaacaattagtttgagaattgttaagttaacaaatcagatgtattttagttacgatggtttcttgattttgtctgttgttctttatatattgaagcagcacagaccatggtgtcagcagcacagatcctggaactgtctaaagactacagggcaaaattttaactacagaaacctgacagcacaaggatatctgatgacagtgataagagggctggaaaacatggcttggatcagaacagaagcattttccaccgataagttgaagtgtgactggaggaaggaaccctaccttccaagttaaagatggagaggttggtcagcaagatgcaggtcatcagagtgcaaactttatagacataggaccaggttttcctactattaaagtgggaaaaccaggatacatattatggactcgcactactgataaactgaaaggtgtaacaggtgctgatttttgcccaggatcaagttctagggaggccaaaggggaattgatcactaacaaggtcattgcaggacctacaagccctctgtgtgtttttcctcgaaggcatgtgcaccatagaaaaaaggttggtatgcaatggatgtatttccccctctaacatagccaagacaaatgtaaaagttaatgaaaaacaggaaatgtgctcttaaagtacttcttatggcggtgatgctgcttacactaaacatgaaattgtggatttattactggaatctgttgagctgtcttataggcttgattagtattgatgaactttgccactcatgtgttgggcatcttgtagcagtttcctgtgaagccgaactccttctcatgcaaaaggaatgagacacaacaaaaactgaactacttctgccgagattttatttggagacgagcagcaaaataaggccttcgactctacagagagaatgtctaatgcctccccacgcacaattttatctaaaaattagcatcaaccgatatataccggaagaatgcatatataaactttataccccaataaaaaaccccacaacacacaagctcattgtattacttaacatatgtcatatataaaagttatattaggggaagcattgaaaagaagttagttcattttatgtttgagcgacaaat

SEQ ID NO: 79843 - DNA, 6784 bp, Zea Mays
tctctttctgctttggctgatgttattggtgctttatcttctgatggacaacatataccttaccggaaccataatgcttatgagtgattatctaatgtggattgtctgcaaaaaagctaagttttgtggaccttggtggttctgagaggggtgaaaaaatctggttccgcaggaaagcaattgaaagaagcgcaaagtataaataaatctctttctgctttggctgatgttattggttctttatcttctgatggacaacatataccttaccggaaccataagttaacaatgcttatgagtgattatctaatgtggattgtctacaaaaaaaaggtactatactttaatcatccgtttgtcttttcattatgattatataatgtggattgcctgcaaaaaaaaggtactatactttaatcagccgtttgtcttttcattattccaatctttattttaataggttgcatttccggtttttattcagtaccaacaaaaccattggagtacctgcgttctattcataacgtgtgaatatggaaattcacaacgattatatggtgaactcatgtttctttttctaatgcaaggaaaactataaagtcttcatttttcactttcttgtcagtatttacgaacaaacaaccattactaacgaatataaaaatgtattgttgtgttctacaaatgcttaccaacagtttgaacaattaaggtcaatgttttttgtatttttcttagaaattgtttctgttattgattagttaatgtctataatactttgatggttatgtcttcatccatattaatttgtttgatattattgaatacgaatgaattagtactatttctaataagactcgattatctaatgcgtgtttattaatacttttaagcttaatagtttaatcccaactgcatgtatggtttttcttttggaaaactaaaaataaaataaaatgattggtagttgtggtagcgaagaggaaatgtataatttaatcccaactgcatgtatactttaacgtgtgtcagtggaagggttctagcagggattctcttcccttccgccgaaaatcaccgaggatctattcagggtggaactaactcacatcgaggtttgctcgagctcgctcagcacatagctgaacaaggtccggacgaccgctgttatctgcgtacactggtccaaattatctgcactgaccagaagaggctcatctacgacacgaggacgatgaaggagtgcaacattcagatatttttagatattttacggccagttcagatcagacaagaaagggtcatctagcaaaggttatcgggatgtcaatctttttgtcaaacaagtagatgggaaaaatgttactgattcagagaaattgagattttgacttggagaaggcccagcttgacctaaggcatggctacaacagggctgagatgaagttcaatgtgaatcgtgttgataacatggtgatctaggcaatctttctattggatatgcttaacaaggacatcaattccttctccatgagagtcagcccctcaaatcaactttggaacccaaatggtcaagcctttggacggagcaaagggttttatcctcctatataagaagttcaaatggataaacaataaaggcaatgtcaaattttcatgggattctttggacatagcttcactgccattaacaacaccatttgtaattgcatattctacaaaaaagtggctgagggacccaggagttgtggggcgtcacagataatcggcatggaatttagtagtttataacagtgcctgaaggagctaggatttatgaatcattctccaccaccttgaggtactcaccggagccagaatttatgaatcgttgtccaccatctcgagacagagcagttcggaaccttggacatctgatcaggaatgaagaggaaaacaaaaacaaacagtttgttcattactactcaaaagaacttggccattcgtatgccatatgatttcctctcgctggtacctgtcattgaaggagctggaggatcaataactgattggagaggggacaagctctattggcctgttactgcagaatcacaatccacaagttttaacgtggtagcagttggggatgcccgtgtccacaaagaggcccttgatgcgttgcagtggcgctagcgtgctctttagataagcattatactaataaccaactatttagacatttacatgtgatatttgtatgaccaataataagctttacctgtatgcttgttggttggcctcaacctttgcactaataatagacagcttggttgtaaactaccaagcagtggcttgctgtttgcaccaagcagatattatgtcttgggaacgctaaatgtgtgaggtattaccttagtgtgagcttcccttgcacccagcaattcagctccattgtgcagtgcttggggatgcttaatcgagagtttgattgttgttgcttccatggctttctgggtgctgcaccatagctgaattgcgaactatgatttccagccttgaactttggatcgaagtctagggtcagtctgggctttaggcgatgacgttttctggcttcagatgcccaagggtcattgagccatgtctccaatcgtccaatggttataaaaaaagaataggtacacatatatattgtttgttttcatggtattataatgttttcaaattaaattctttttttgcatgcgtggcatttattctgcataatattttttctatggatttaacttgtgagtcattttcataaaccaacaccaaggatgaatccatgtttgttactcggaaaccttgaacaaacaccactaatagaaggcgctcgcaatggcgtcgctcatcgacgacgagaagaagcttggcgactgccagttcgacatctggaagcagttctacgtggctgcatgcgccactatagacgacaagctccggcgccgctgtcgcttggacacagtccaaagcggctgcaccgtgctgtccatcatcaagtagggggacctcatggtcggcgccaacgccgccgactcccgggttgttctggacaccgcatccgacaacggtgccatcacgccgtccaactcatcgtccacctgaagcccaatctgccacgtaagtcgctactgaccggccataaattcttatgcgctaggacgacgtccgttgctgacgttgtgtgagcgttctcgaacatgatgtatgcagaggggtagcgcatccagtggtgcaacgaccaggtgtactacctcgctgatgagtccgggtgcacttcgtctggcagcctagccaagagctgtctgtactcgctatgtcgcgcgcgttcgacgactactatatcaaggactgtggcgtcatctcggcgccggaggtgacgcagatgatgaccgacaacaatgaccagttagtcatccttgtcgtagttggggtagtttttgtgctggtctgcctttaattctcttcataaacacacacatttgtctttttgtttaagcaagcgcgtatgttggtgtgtgcctgatgactgacaatgtacgagggaacttcttctggcaggtgtgggacgtgctctccaacgacgagaccatgcaaatcttgacatatattgaagtctgcatagtactgatgattgcaatgtagtggtgaaataactagattaaaataacaaatttatgtatggctaggatcataaatggattatgaaactttttcttataacattataatacacattttgtatataagttatcgtggtattatatgttcccgttgcaacgcacgggcactcacctagtataaaaactaagcatggatcgttataaagcaaaacttagtgagagatgtgtttgcaaggcgtaaatacatgttgtaccttgtcttctgaaccgcctaaacatagtctcaattattatgccataatcctccttagccaacgtcctgcggagtgcatttttgtttagtaggtcaccccaaactttaatgatatgcaaagaccccctacaacattgattttgttaagaataggttagtaatatttagatttgaatatataaatacaattactgaaatatacctagcatccattataacaatctttctgaaagggccccacattgtgcgatgaattgtatccaagtggactacaatagccataatgtctataaaaataacaatttataaatggattaatactgaattttgtgtaaacgatattttaataatattaagagatcgatatattcttaccgactaaagtcctgtttggcaattcgacaatatcagcaaggttcaagaatatttgttttgggaatggcgccacttgaattggaacaatgtatggctccacgatagtttgttggttgagatacaattccatgggactatttagatgtcgaaaattaaattcacccggatgaagaccaaactttacattatgcatcttgtaaacatgcttttcatggagcaaattgtcgaaatgtttgactgtctgatacaaatatgttatgacctcgatcttggctccctaaatgtatttcagtaggagaagagtcgatggtatgaagatcgtgtaaccttaaaaatgaaacttaaagaattgttggcttacattgatgtcagataaaacgaaatgttgtctgtcacgaaaacgtggttcaatcgggaatttaacttctacccgagcgacaatactgtatttccgcggtagcccataataaaaatcttcatcacggtagtcgtcaaacaacctgaagctatattaaatatacgacttaataacggtcataactttgatagacaaatttgtgtaaatatatttatataataacttacattggcatccgttttaggcggtccgctacggctttttcacggttcaatacgaccggttccatcaaaaccttgtagcctttaacataaatttaaatttaaatttaaatggaacacatgtcttctggtaataaattatttttaataatgatcaaagaatactttggagaaactaataatatatgagtgtttttatatatatatatggatttttttagttctgatttgggattggatttccaaaactttagtttggacacagatactttgagaagcattaaaactcgaaacactattgtcatgatcagttttggttcataagattggaaaaataaagttccctaaaataccatgacataaatgagaatatattgctaatagctacacaccggttcttttttctgtttcacagaagcagccggagatccatcagtagtgctcgctttaaggagtctgtaacttcctaatcaaatataacttgatatgtgcgccatttgttggtgttgaccaccattggtagaatgttgtttttggctgcgcgttcttgttagatgagactgtaacttcctatgcatgggtatttaaatcattcttggagtcaatgggagggcgatcgccaaaatcaatattcactgatcaggatgaagctattatgcaggcagtcaaacaaattttccctaatacgcaacattgtttttcctactggcatattctgaagaatgcacaatctcatttaggctcactaaatacgtctcaagcatttgaaattatgtttaccaagtgtatgcaaggatctgactcggaaacaattagtttgagaattgttaagttaacaaatcagatgtattttagttacgatggtttcttgattttgtctgttgttctttatatattgaagcagcacagaccatggtgtcagcagcacagatcctggaactgtctaaagactacagggcaaaattttaactacagaaacctgacagcacaaggatatctgatgacagtgataagagggctggaaaacatggcttggatcagaacagaagcattttccaccgataagttgaagtgtgactggaggaaggaaccctaccttccaagttaaagatggagaggttggtcagcaagatgcaggtcatcagagtgcaaactttatagacataggaccaggttttcctactattaaagtgggaaaaccaggatacatattatggactcgcactactgataaactgaaaggtgtaacaggtgctgatttttgcccaggatcaagttctagggaggccaaaggggaattgatcactaacaaggtcattgcaggacctacaagccctctgtgtgtttttcctcgaaggcatgtgcaccatagaaaaaaggttggtatgcaatggatgtatttccccctctaacatagccaagacaaatgtaaaagttaatgaaaaacaggaaatgtgctcttaaagtacttcttatggcggtgatgctgcttacactaaacatgaaattgtggatttattactggaatctgttgagctgtcttataggcttgattagtattgatgaactttgccactcatgtgttgggcatcttgtagcagtttcctgtgaagccgaactccttctcatgcaaaaggaatgagacacaacaaaaactgaactacttctgccgagattttatttggagacgagcagcaaaataaggccttcgactctacagagagaatgtctaatgcctccccacgcacaattttatctaaaaattagcatcaaccgatatataccggaagaatgcatatataaactttataccccaataaaaaaccccacaacacacaagctcattgtattacttaacatatgtcatatataaaagttatattaggggaagcattgaaaagaagttagttcattttatgtttgagcgacaaat

SEQ ID NO: 79844 - DNA, 1344 bp, Zea Mays
caatcagtggcctagcacttctgccgaaagccagcatctctatttgttccggcaagcctcctctccaagcttcgaatcgtagagaaaagcaagcccgcggggccgacccggtcggcatccgaacccaacgcctctgagagccttaaaccccgacccgagcctgtcagactgacatcgctcgaccattttcccatttccattcccatcccaattcccagcggtttcatttccacctcctccttttccaatttcgactcgattcgaaacaggataccaaatgcatgatcgatcccacaagccgcagccggcggaggccggcaacggcgggccggctggcgagggcggcggcgggaacgtggatcgggtgctcttcaagaacctcgtcgagatggtgccgctcgtcgagtcgctcatggaccggagggtcaacccggcatactcgcgtcgcgcttcgctggtctacacgccggcgccgcccaagaaggcaagcgatttgaaaagtgtcaaattgccacagagcgtatcagccaaaaagcggagagaccctggtgatatagccaagaagagcaccccagattctaacggcgacaacggttcagttgtgccattatctctgtcaggtgctgaaaatatgcccaaggatgaggttgctgtgctaagcgagcagatcaatgacctacaaaagaagctgcttgagaaggaggaggcactgaggtctgcggagagctctgtgactgagatgaatgcagcatatgcaactatcgatgaactcagacgcctggtggctgacaaagaagctttgatcagatctaccaattctcagttgcatgatgcaaagattatgcttgcagacaagcaagcgtctttagagaaacttgaatgggaggtgaagatgtcaaataaaaagagaatgtttcaggtgactcttatgatgatataataccatcatcatatgaattagagacacttcaatcaatgagtgaaattgacaagattgaggtcgacaagctagacaaggaaagggttacatatgctgaagctctggcggcagcgagagagaaccctgacgaggagcacttgaatatagctgcggaggcgaggtcaaggctgcaggtccttgtactttagtgtccccttctgattatagcgtttgtatgataatgttgaactgctgatgtaattgtatgtgttggcttgagttgaggtgctcgtggaatccttccggtgattgattcagcactgtaaactgacagctgtttcatgttgtaaccatatttaaggcatgtttgatttctttagtcaccctcctaaattttaggaactaaatttagtccctaaaatttc

SEQ ID NO: 79845 - DNA, 279 bp, Zea Mays
caaaattaaggcctgcaatcgtcggtatggtgcagggaggagccgaagcaccagaaggcaaagaactgcccaaacaaccatccggcgaagggaaggagaccatcgaaaggtacaaattctcttctagatatgggagaatagaaaaaaaaagagtaaaaatatatttttattcaattttaaatagtacgagattttaaccccagctcccaatcccaaacaagtggttttgcaactctttctactttgctttctatgctatgttgggcttgtgggcttcct

SEQ ID NO: 79846 - DNA, 1531 bp, Zea Mays
gatttccatacgtctttacttaccgtttcctcccaagcttttctttccgccttcgtagttcccaccgcgccgcacccgcaagccagcatggccccatctacacgcgccactctttcccttcccgccgcaccgccaatggcttcgcgcctccgcctcgtcgacccgaccccaagcacagacgcggattccgctcagaacccaggcatctccggcaaggcagcgggtgaaggggagcgagtgggagaggcgaagacgccgcagccgcggcagccggatgtgacggaccttggcggcggcagcgaggtggtctacatccctcggttcgtggctcgggagaaggcgtgggagtggttcgactacctcgacaacgccatcccctggacacgccccgaaatccgcgtctttggccgctctgccatccagcctagagatgtgtgctatgttgcagatgaagggttgacagatttgagatatagtggccatcagcctcttgcacattcttgggatgaattccccgtgctcaaggacgtcttgaaagtggtccatgaagcccttcccgggagctatttcaacagcttgctcctgaacagatacaagacaggttcagactacgtttcatggcatgcagacgatgagcccctctacgggccgactccagagatagcatctgttacctttgggtgtgaacgtgacttcttacttcggaagaagcctaccaaatcgcaagccacttctggatctggagaagctggtcgaaagcggctcaaggtcgatgcacctcaaaagccacatcattttcttctgaagcatggctcgctgcttgtgatgagaggctacacccagcgggactggcagcactcggttccgaagcgagccaaagtgagctcaccaaggatcaatctgactttcaggcatgtactgcggtgacacactctctttagcatgccattgaaatcacaatgaagctgtcactgaattcgaatctaagcccaacaattttgagtggattgacaagcaaaaaaatagaatgttacgtgtgtgaagcctatccataaggagtagccagataaaaactctcaacttattgcagcacttggatttccatatccaaacaaagtgatctagtggttgcatgtttctgtatggaagacgataaattttctttgagctaaaattgtgtgccccccaccccccaaaatatgtaaatacattgatctcttgaattgttgaggatctgttcagttgcaagcattgcgttgagatcttggaattcctgatacgcttgtgaagacaggggtaaatagaagtgctactccaaagactgatgagatgaacttggagacagatgtttttgttcttggcataagagaagaatatgggataggtttgctgtagcaacttatcattctgcaacaatacattttgcaactcctctgtaaagatcttttagccaaaatgatgtccttccactagaaaggttctctttcattttttgcatgcggcactttgccattagtgtagtgagtgttcc

SEQ ID NO: 79847 - DNA, 1533 bp, Zea Mays
accgtttcctcccaagcttttctttccgccttcgtagttcccaccgcgccgcacccgcaagccagcatggccccatctacacgcgccactctttcccttcccgccgcaccgccaatggcttcgcgcctccgcctcgtcgacccgaccccaagcacagacgcggattccgctcagaacccaggcatctccggcaaggcagcgggtgaaggggagcgagtgggagaggcgaagacgccgcagccgcggcagccggatgtgacggaccttggcggcggcagcgaggtggtctacatccctcggttcgtggctcgggagaaggcgtgggagtggttcgactacctcgacaacgccatcccctggacacgccccgaaatccgcgtctttggccgctctgccatccagttcgggtacccgttttcatccctacaccaacaaggtggacaagaaggcgacttcaccgtacttgatcaagaagaaaaatgtaaaggtgatagccatcaaggccaacaagcaagccaacaacaaaggaaaaggggccaaacggatttgggtgcctaaggatatcatctctaacatgaagagcaccaaaaaggtttgggttccaagagggaagtgagaagtccgaaggactttgtgaaatttggagacttagcaaaaatgggatgcatatcatgagatacatcatatcgaatcaagtttattaccaagtgtgttagtgaacactatgaaaccaagttctccacccatgactaagaatgtcagcagccacgacgcggccaggctaacatcgcacaggcggaggcaaaggaggaaactttgcttctagcacactcaatctccagcggcaccggccgcagtggcactccaccttgatgagtcgaaggcacgcgctttcctcggcgatggctccagcaacgacatgatcgaaggatggtgcctcgacaccggcgccactcatcacatgaccggccgacgagagttcttcatcgagctcgactctagcgtccgaggctccgtcaagtttggggatgcctccggcgtagagatcaagggcgccggctcagtcgtattcaccgtcgcgtctggtgagcacaggctgctcaccggagtctactacatccctgcgttgaggaactctatcatcagcttgagacagctggatgagaacggttcgcgcgtggaggtcgagcacggagtcatgaggatctgggacccctctcgtcgccttcttgccaaggtacacaggagtttaaatcggctttacatccttaacgtgaaggtggcacaaccttgctgccttgctgctcgtcaggacgacggggcatggcagtggcacgagcgcttcaggcatcttaacttcaaggccctgaagcggctcagtgccaaggagatggtacgaggcttgccgtgccttgaccatgtggagcaattctgcgatgtctgcgtgttgacaaagcagagacggctcccctttccctagcagtcgagcttccgagccaaggagaggctcgagctcgtgcatggggacttgtg

SEQ ID NO: 79848 - DNA, 1856 bp, Zea Mays
tcctcccaagcttttctttccgccttcgtagttcccaccgcgccgcacccgcaagccagcatggccccatctacacgcgccactctttcccttcccgccgcaccgccaatggcttcgcgcctccgcctcgtcgacccgaccccaagcacagacgcggattccgctcagaacccaggcatctccggcaaggcagcgggtgaaggggagcgagtgggagaggcgaagacgccgcagccgcggcagccggatgtgacggaccttggcggcggcagcgaggtggtctacatccctcggttcgtggctcgggagaaggcgtgggagtggttcgactacctcgacaacgccatcccctggacacgccccgaaatccgcgtctttggccgctctgccatccagttcgggtacccgttttcatccctacaccaacaaggtggacaagaaggcgacttcaccgtacttgatcaagaagaaaaatgtaaaggtgatagccatcaaggccaacaagcaagccaacaacaaaggaaaaggggccaaacggatttgggtgcctaaggatatcatctctaacatgaagagcaccaaaaaggtttgggttccaagagggaagtgagaagtccgaaggactttgtgaaatttggagacttagcaaaaatgggatgcatatcatgagatacatcatatcgaatcaagtttattaccaagtgtgttagtgaacactatgaaaccaagttctccacccatgactaagcctagagatgtgtgctatgttgcagatgaagggttgacagatttgagatatagtggccatcagcctcttgcacattcttgggatgaattccccgtgctcaaggacgtcttgaaagtggtccatgaagcccttcccgggagctatttcaacagcttgctcctgaacagatacaagacaggttcagactacgtttcatggcatgcagacgatgagcccctctacgggccgactccagagatagcatctgttacctttgggtgtgaacgtgacttcttacttcggaagaagcctaccaaatcgcaagccacttctggatctggagaagctggtcgaaagcggctcaaggtcgatgcacctcaaaagccacatcattttcttctgaagcatggctcgctgcttgtgatgagaggctacacccagcgggactggcagcactcggttccgaagcgagccaaagtgagctcaccaaggatcaatctgactttcaggcatgtactgcggtgacacactctctttagcatgccattgaaatcacaatgaagctgtcactgaattcgaatctaagcccaacaattttgagtggattgacaagcaaaaaaatagaatgttacgtgtgtgaagcctatccataaggagtagccagataaaaactctcaacttattgcagcacttggatttccatatccaaacaaagtgatctagtggttgcatgtttctgtatggaagacgataaattttctttgagctaaaattgtgtgccccccaccccccaaaatatgtaaatacattgatctcttgaattgttgaggatctgttcagttgcaagcattgcgttgagatcttggaattcctgatacgcttgtgaagacaggggtaaatagaagtgctactccaaagactgatgagatgaacttggagacagatgtttttgttcttggcataagagaagaatatgggataggtttgctgtagcaacttatcattctgcaacaatacattttgcaactcctctgtaaagatcttttagccaaaatgatgtccttccactagaaaggttctctttcattttttgcatgcggcactttgccattagtgtagtgagtgttcc

SEQ ID NO: 79849 - DNA, 3334 bp, Zea Mays
gtcaagcagcaggtggtggccatgtccagctgcgaggccgagtacatagcggtctccaccgcttcaactcaggcgctctggcttgctcgcctgctcggtgatcttctcgggagagacgttggagcagtggaactctgggtggacagccagtctgccctggcgttggccaagaaccccgtgtttcatgaacggagcaagcacatccgggtgaggtaccacttcatctgtgactgtttggcagaagagagcatcaaggcgcgctacatcaacaccaagaatcaacttgtggacctgctcaccaaaccccttgggaggatcaagttccttgagctttgttccaggtccgggatggctaaacttttccacaagacgacacacaaaaattagggggagaatgatagaataagtcatgtggttttcgtgtggaggacaacatctctgctacaacatgtggagggcaacatttctgctataggcaggcagcacagcagcagcagtcttttgactgttgtagtgtggcagcagcaggcagtacagcagcagcggcagctgcagtgcagtcaaaatgcagtcttttgactgcactttagcatctagaggatagcacctatgtgctgtagtgtgtagtgtagtatgtagtgtattctagtgcagcctatagggctataaatatgtgtccccgacccttctaaggttatgtcattgtgtagtgtttgagaaaataaacagaaaatcgccccaactcatagtgtcatccttgatgagagtaagagttccgttgcttacacttacaaccgtacacagtttgatggagtttacaactcacaagcacaacaagagaggggagagtacacacacaagagcaagcgcaacaacacaacgcaagagagaagatcacaagagcgcaatcacacgaaatcacaagaacaacctagaacggcgctcggatcttactagaatcactagaatgcgttgtggcagagtaccggagtgaagtattgctcttggcagtgcttggggtgctaaaggagtgcgccatggggccctttttatagccaaaggcaaccccatagttgttgctccttccatctaaaagatgccaaaaatctgctgtctgcgggggcacctgatcgatccgggtccatgtgcaccatctccgagatctgacagcctccttccttctggggagcgcgccggaccgggtccatgcaccaccagaccgccacgtgtcgccttcccgtgaagtagtcgttggcgcccggagctagccgttattggacggtccggtgcgccaccagaccgtgcagagtatcagtccaatgattttataaaataacatttcgagacctcgaagttcaaccgtacaagtggtctggtgcactaggccgccaaagcgcccgagtctggactctggcaaatcggtccggtgagtcccagacggtgaccgacaacaatgaagttccgccaacccacaacggccacggcagtaccagcagaggtggtgaacctgattattgtcttgtacctacgttgtttggcgggtgatcgacccaagacttggttatagtggcttcctttggctgaattttttttataatacctcataccaaactgttgtcaaatgtactccattcagaattgtgtatggtcgtgatcctccaaccatgttatcctataagccagggatggccaatgtggctgcagtagaccagcaactccaggatcggtacgttttcttggaagacatcaaacaaaggttactccaagctcaggtaacaatgaagagtactcaaggtaaaagtcgccgagaggtgcaatacaatgttgaggattgggtttggctacgtttgcaacaacagtcagcagttggtgtcacaacagcagcatcctgcaaactaggacctaagttttatggtccttatcaaattctgcagcatatcggggatgtcttgtacaagctccagttgccggcaaatgctaggatccatgaagtgtttcatgtagcacttctcaagaagtttcaaggggatcctccggcagcaccagtgcccttaccggcggtcctccgtggcaagatgctccctgttctatcaaaagtggtgaaggctcgcttgaacagaggtgtctgggagcttctggtacagtggatggggcgcgcgccatctgatgctacctgggaacaatgtacttaattgaagaggcgttatccagaagtccaactcgaggcctagagatgtgtgctatgttgcagatgaagggttgacagatttgagatatagtggccatcagcctcttgcacattcttgggatgaattccccgtgctcaaggacgtcttgaaagtggtccatgaagcccttcccgggagctatttcaacagcttgctcctgaacagatacaagacaggttcagactacgtttcatggcatgcagacgatgagcccctctacgggccgactccagagatagcatctgttacctttgggtgtgaacgtgacttcttacttcggaagaagcctaccaaatcgcaagccacttctggatctggagaagctggtcgaaagcggctcaaggtcgatgcacctcaaaagccacatcattttcttctgaagcatggctcgctgcttgtgatgagaggctacacccagcgggactggcagcactcggttccgaagcgagccaaagtgagctcaccaaggatcaatctgactttcaggcatgtactgcggtgacacactctctttagcatgccattgaaatcacaatgaagctgtcactgaattcgaatctaagcccaacaattttgagtggattgacaagcaaaaaaatagaatgttacgtgtgtgaagcctatccataaggagtagccagataaaaactctcaacttattgcagcacttggatttccatatccaaacaaagtgatctagtggttgcatgtttctgtatggaagacgataaattttctttgagctaaaattgtgtgccccccaccccccaaaatatgtaaatacattgatctcttgaattgttgaggatctgttcagttgcaagcattgcgttgagatcttggaattcctgatacgcttgtgaagacaggggtaaatagaagtgctactccaaagactgatgagatgaacttggagacagatgtttttgttcttggcataagagaagaatatgggataggtttgctgtagcaacttatcattctgcaacaatacattttgcaactcctctgtaaagatcttttagccaaaatgatgtccttccactagaaaggttctctttcattttttgcatgcggcactttgccattagtgtagtgagtgttcc

SEQ ID NO: 79850 - DNA, 1753 bp, Zea Mays
ctcaatggcacttttcaaaaaatagctagctataataatgttggtacatgcgccttgctatgttggggtttcttgagtttctcaacggcacacctcaaaaaatagctagctataataatgttggtacatgcgccttgctatgttggggttttggaatttttgctcctaatgaagtctaagttatgtgaaacagttgcagatcatgtaaactgattgatcgtcataccatagttcatcaaactaaacgctagtgttgagcagtagtacaaattctgtggctgaaagaggctgagggtggaactcatatgtagggtcattgagacaaaaatctccattaatacagcttactggtaagacccttgccaatcatactaagggcagtcccaatgcatggtttctacaggtattttctagacaaagtataatttagacccgatgctcccaatgcatgatttcttgtagtaatttctatgaagccaaaaatttattgagtacttgtatgctccgcaaacagagaaaaatcaggtgtggcaaagaaacatgtaggagaccatgtcgccacatctcactgtctcttctgtctccaattacgttaataaacaaagcaaaaacgtcaagttttgccagatggacattggtagagtgcctagagatgtgtgctatgttgcagatgaagggttgacagatttgagatatagtggccatcagcctcttgcacattcttgggatgaattccccgtgctcaaggacgtcttgaaagtggtccatgaagcccttcccgggagctatttcaacagcttgctcctgaacagatacaagacaggttcagactacgtttcatggcatgcagacgatgagcccctctacgggccgactccagagatagcatctgttacctttgggtgtgaacgtgacttcttacttcggaagaagcctaccaaatcgcaagccacttctggatctggagaagctggtcgaaagcggctcaaggtcgatgcacctcaaaagccacatcattttcttctgaagcatggctcgctgcttgtgatgagaggctacacccagcgggactggcagcactcggttccgaagcgagccaaagtgagctcaccaaggatcaatctgactttcaggcatgtactgcggtgacacactctctttagcatgccattgaaatcacaatgaagctgtcactgaattcgaatctaagcccaacaattttgagtggattgacaagcaaaaaaatagaatgttacgtgtgtgaagcctatccataaggagtagccagataaaaactctcaacttattgcagcacttggatttccatatccaaacaaagtgatctagtggttgcatgtttctgtatggaagacgataaattttctttgagctaaaattgtgtgccccccaccccccaaaatatgtaaatacattgatctcttgaattgttgaggatctgttcagttgcaagcattgcgttgagatcttggaattcctgatacgcttgtgaagacaggggtaaatagaagtgctactccaaagactgatgagatgaacttggagacagatgtttttgttcttggcataagagaagaatatgggataggtttgctgtagcaacttatcattctgcaacaatacattttgcaactcctctgtaaagatcttttagccaaaatgatgtccttccactagaaaggttctctttcattttttgcatgcggcactttgccattagtgtagtgagtgttcc

SEQ ID NO: 79851 - DNA, 2465 bp, Zea Mays
catggctgtgccacccacactaatcacccccccaaatcgaccacccctccctctccctctcttaagatcgccggcgaggggagagccgagaggcgcagggcagcccccgccgacgcttccgctcccgctcccgccgctgccgcagccgcagccgcagccgcagccgtagcggcattttgtcgagcatatggcgctcgtgcccagcggcggcgcgggcgcttgcaaggacgaggccgcccttgggctcccgtggtccgaaatgttccgctccgcctcgcgccgccggcccaagcaggagtccgacgatgcgccgcccaagaagcccgcgctgaagacggcgggtgccaaggagatgaaggccaagccgtcgtcggtagggactggagctggggcaggagccgacatcgcagggctgtcgctggagcccgacgcgcgcctggcgctctacatcgccatggcgcacgcgggcctcgccaccgcgctgctcgtgctctacggcctttacctgctgctcgccgacttcctccgcccgctgcagtgggcgttgctctgctccgtcccgctccgcgagacgcagcgcgcgctcgtcgccttctgggagcccccgctccgtggcggactcagcgccgcactgctcgcgctgccactcgctgtgctccggtcctcgaccgcaacgctcgccgacgcgcgcgccgcgctcctgcgccgcccgctcccgtcatcgccggcgttcccgcgcctcctccgctggctcgtctccttctttttcttcctcatcctcttcgagcgcctcggcgccgccaccgcgctgctgctcctcgttttcgcgctcgcattcttcgccgcgtcccccaagctcaaacgcgctgcctcctcacgcatctccgcatcttcttctcctacaagattgggctagagggcaaggacgccgtcatgtccctcaagtcccatgtcgagaagagcaactactcagagaagattggcttgaagaagtggatggacgacaatgacattcctggcttggtcgatcagtattctgccaagatctatgacaccttgtgggagcaggtcgaccaattggctgtgcagtacaaccttacagatttcactagtggcttccggcatttcttgatcagccaatcagttgaccccaaaagcaaggcgctcatcagttccagaccgcacccatactcaatgaagttgcaatcaattgcgacacgtgtgagaaacagagaatgggtggagatttactgggagcttgactcattctttagggagctgttaatcacaagagaggatttggtcatcaaggccaaagagcttgctttgcagggaacagaaatcgcaaagaggcttctgtccagcagcacatcggtgctgggcggtagtgccaatttgatgttgtcaatcaccctccgcattgtctcaggtgcggctgaggttgttaatttcctgtcacaactgatggtgttcttgtgggtgctgtattaccttattactgtggagggaggtggagctacagagcaaatcattgatcttttgccagtgtcaaaacaagtaaaggaccgctgtgttgaggtcatggatcatgccatcagtagtgtattgttggccactgccaagattgccatattccagggggggctgacatggctattgttcaagttcttcaaagtgcattttgtgtacacatcaactgtgcttggattcataagtgcacttgtgccaatacttccattttggctgtcctcgatatttgccacagggcagcttctcatggaagggagatatgttcttgcactggtggtaactgtgatacacctcatgctcatggattatggcacaactaccattctggaggatatacctgggtacaatgggtatctcaccggcctcagcataattggtggcatgacactgtttcccaatgcactggagggtgcaatattaggtccccttataatgacggttgttatagcgttgaagaacttgtacacagagtttgtacttgctgatggagaggagacgagcagctagcatcagatgcaaggctaaaatgcttgtgttgccaaagaaatacttgtgtagggcttctacatgcaatgttgcatgatggttttgctcttgtaccatgccttatatgcacagctattgcagcagttgtgagctttccttgttaatatctattggatcgttccatagacttggttttgatatctgccgatgctgaatgacctctctgtccaattgaaccggaagttgtgcagtattttttcttttcttttcttttctcggtttctctctttctcagaccccactcatgtggatgtgggagcctccagcactcgatctacccatcttttgcctatagtggtgatgtagactaaattgcattactaaatcttttttggtgtaatatttttcttgttagtatatatatagcctacatgcatccagctctaata

SEQ ID NO: 79852 - DNA, 561 bp, Zea Mays
agaatctatctccatcttaaaaaaaacttggcagggtgcaatattaggtccccttataatgacggttgttatagcgttgaagaacttgtacacagagtttgtacttgctgatggagaggagacgagcagctagcatcagatgcaaggctaaaatgcttgtgttgccaaagaaatacttgtgtagggcttctacatgcaatgttgcatgatggttttgctcttgtaccatgccttatatgcacagctattgcagcagttgtgagctttccttgttaatatctattggatcgttccatagacttggttttgatatctgccgatgctgaatgacctctctgtccaattgaaccggaagttgtgcagtattttttcttttcttttcttttctcggtttctctctttctcagaccccactcatgtggatgtgggagcctccagcactcgatctacccatcttttgcctatagtggtgatgtagactaaattgcattactaaatcttttttggtgtaatatttttcttgttagtatatatatagcctacatgcatccagctctaata

SEQ ID NO: 79853 - DNA, 3574 bp, Zea Mays
ttggacgccattctcttctctccggctctcccggattccttctccctcatgcatttcttggccccggccagcgggcagtgatatcgctccctcgtccgtctgatactttgtcgtccattgtttttttttcaatcccaagtgttcatcagctccagttcccaacctgagcagcagcaatcagaagagaaggcgagaaaggaaaccgggttgtttcggttccattttgattcgactggaggagatatacgcacacccaaatcgaatacatagtaggggggatgaggctggtggtgcgcgtcatcgaggcgcggggcctcccgcccacggacgccgacgggacacgggagccctacgccaaggcgcagctcgggaagcagcgggccaagaccaaggtgatgcgcaagacgctctgccccgtctgggacgaggagttcaccttccgggtaggggacctcagtgacaacctcctcgtctccgtgctcgacgaggaccgctatttcgccgacgacgtcctcggccaggtcaaggtgcccctcaccgccgtgctcgacgccgacaaccgcacgctcgggatgcagtggtaccagctgcagcccaagagcaagaagtccaagctcaaggattgcggagagattcatctcagcgtttctctggctcaaaactactccgacgagacaacggcacattgggcctcagatgaccatgaccttgcatcgaattcagacaaatcaactgaactggtgaaaggatcttctttctcaaatattcctatagaggtacgcacacaagtatcagaggtcgatgagacagaagttgccaaggaggataaatcaaacgctgccccatcatttgtcaacaagctatatcaaatgtttaatagtaaaccaaaagatgcagaagcttctgctccatcttcctccaagttgaacgacgcttcagatattaccgaagaaatgctgtcaaccaactctgaagctcctgataagcaggatcttgatgccagtgcatctatgtccttcgatgagctactgaaggcctttggttctcgaggtgaagggaaagaaatgcctgaaaatttgtcaggtggagttgttcttgatcaagtttatgctgttgcaccgagtgatttgaacacacttcttttctctccaagttcagactttctgcaatcacttgcagagattcaaggaactacaggtcttgaaattcaacagtggcgacttgaaaatgacggtgaaatcctgaggagggtggtaagctacacaaaagctcctaccaaactagttaaggctgtgaaagcaacagaagacatgacatatttgaaggcagacagagagatgtttgcagttttagcagatgttagtactcctgacgttccttttggcaatactttcagagttgaggttttgacctgtataataccaggacctgaactaccagatgacgaaaaatcttcacgacttatggtctcttggcgcataaattttgtccaaagcaccatgatgaagagcatggttgaaaatggagcaaaacaaggcttaaaggataactatgttcaattctctgagctgctggctaaaaattttaggccagttgatgcaaaagatacaacatacagtaatgaagtcctttcttctgtgcaaccagagcaagaatctgactggaagctagcgtttcgagtatttggaaatttcacacttttttcctcagtttttgcatttgtttatgtttctgcacacatcttccttacaagccctagtataattcaaggtcttgagttcccgggcctggacttgccggattctgttggtgaagttgtagtttgtggagttcttattctacaaggacagcgtgtgctaaatatggttgcacgattcatccaggcgaagaggcagagaggtgatcatggagttaaagcacaaggggatggctggttattgactgttgctctcatggagggaactaacatggcagcaaccaaatcatctgattactctgatccatatgttgtatttacatgcaatgggaagacaaagacaagttcgattaagtttcacaccctcgagcctcagtggaatgaaatttttgagtttgacgccatggaagatcctccatcagtgatggaaatacatgtgtatgatttcgatggaccgttcgacaaagttgcctcccttggtcatactgaagtgaatttcttgaaatataataatatatccaagcttgctgacatttggattcctctgaaaggaaagcttgctcaagcatgtcagtcaaaattgcatctaagaattttcttaaacaatacaaggggtactgaagtagtgaaggattacctggacaaaatggagaaagaagttggcaaaaagattgctatgaggtccccacacacaaacttagcattccagaaaatattttctttgccaccagaagaatttcttatcaattattttacttgtcacttaaagaggaaaatgctaacacagggtcgtctttttctatctccaagaatatttgggttttacacaaatatttttggccacaaaacaaaattcttcttactttgggaagatattgaagacattttactggtccctgcaaccctatccttaatgggaagtccatctctggtgattattcttcgaaagggcagaggaatggatgcaaagcatggcgcaaagcaactggacagtcaagggagactaaacttccatttccaatcttttgtctcattcaatgtggcacataaaacaataacggcactgtggaaggcaaggtccttgacccctgaacaaaaggtagagcttgtagaagaggaatcagaaacagaagagttccaaaacgtggaaggagaatctttcttagggatagaggatgcccaaatgtcaggagtgttctcatccacaaaaccttttgatgtaacaacactcatgggcatatttgagggtggtcctttggagtgccgggtgatggagaaagttggctgtatggactactctgttacagcatgggaacctgtcagagctgatatttaccagaggcaagttcattataaatttgacaagaaatcagtacggcatggaggagaagcgatgagcactcagcagaagtcccctttgcctaataagaatggctggcttgttgaagaagtgatgacgcttgaaggtatccctgttggtgaatgtttcaatgaatgatatatgtgttctctgtccactgatgcggctggagcgtcatgtcaacggctcaccctccccctaacaaattaaactagactgatgagtggagcttcatgttgggatgatccatgcaccttttaagttttggaacgtcgtactcaaatgtagcttgtgttagttgaacctatcgtactttcttttggaattaaattatatgatatttaaacatgtttgatgtttaatacttgtgttggatgctttatgcttcaaatatatatgcattatacaaaaagttgtgtacacttatgttgtttgatgaaattgtatgcacgatttggattgaattcaattgaatgctgattttcattaattgatgatgaattaaacgtcataaatag

SEQ ID NO: 79854 - DNA, 3106 bp, Zea Mays
ctttgtcgtccattgtttttttttcaatcccaagtgttcatcagctccagttcccaacctgagcagcagcaatcagaagagaaggcgagaaaggaaaccgggttgtttcggttccattttgattcgactggaggagatatacgcacacccaaatcgaatacatagtaggggggatgaggctggtggtgcgcgtcatcgaggcgcggggcctcccgcccacggacgccgacgggacacgggagccctacgccaaggcgcagctcgggaagcagcgggccaagaccaaggtgatgcgcaagacgctctgccccgtctgggacgaggagttcaccttccgggtaggggacctcagtgacaacctcctcgtctccgtgctcgacgaggaccgctatttcgccgacgacgtcctcggccaggtcaaggtgcccctcaccgccgtgctcgacgccgacaaccgcacgctcgggatgcagtggtaccagctgcagcccaagagcaagaagtccaagctcaaggattgcggagagattcatctcagcgtttctctggctcaaaactactccgacgagacaacggcacattgggcctcagatgaccatgaccttgcatcgaattcagacaaatcaactgaactggtgaaaggatcttctttctcaaatattcctatagaggtacgcacacaagtatcagaggtcgatgagacagaagttgccaaggaggataaatcaaacgctgccccatcatttgtcaacaagctatatcaaatgtttaatagtaaaccaaaagatgcagaagcttctgctccatcttcctccaagttgaacgacgcttcagatattaccgaagaaatgctgtcaaccaactctgaagctcctgataagcaggatcttgatgccagtgcatctatgtccttcgatgagctactgaaggcctttggttctcgaggtgaagggaaagaaatgcctgaaaatttgtcaggtggagttgttcttgatcaagtttatgctgttgcaccgagtgatttgaacacacttcttttctctccaagttcagactttctgcaatcacttgcagagattcaaggaactacaggtcttgaaattcaacagtggcgacttgaaaatgacggtgaaatcctgaggagggtggtaagctacacaaaagctcctaccaaactagttaaggctgtgaaagcaacagaagacatgacatatttgaaggcagacagagagatgtttgcagttttagcagatgttagtactcctgacgttccttttggcaatactttcagagttgaggttttgacctgtataataccaggacctgaactaccagatgacgaaaaatcttcacgacttatggtctcttggcgcataaattttgtccaaagcaccatgatgaagagcatggttgaaaatggagcaaaacaaggcttaaaggataactatgttcaattctctgagctgctggctaaaaattttaggccagttgatgcaaaagatacaacatacagtaatgaagtcctttcttctgtgcaaccagagcaagaatctgactggaagctagcgtttcgagtatttggaaatttcacacttttttcctcagtttttgcatttgtttatgtttctgcacacatcttccttacaagccctagtataattcaaggtcttgagttcccgggcctggacttgccggattctgttggtgaagttgtagtttgtggagttcttattctacaaggacagcgtgtgctaaatatggttgcacgattcatccaggcgaagaggcagagaggtgatcatggagttaaagcacaaggggatggctggttattgactgttgctctcatggagggaactaacatggcagcaaccaaatcatctgattactctgatccatatgttgtatttacatgcaatgggaagacaaagacaagttcgattaagtttcacaccctcgagcctcagtggaatgaaatttttgagtttgacgccatggaagatcctccatcagtgatggaaatacatgtgtatgatttcgatggaccgttcgacaaagttgcctcccttggtcatactgaagtgaatttcttgaaatataataatatatccaagcttgctgacatttggattcctctgaaaggaaagcttgctcaagcatgtcagtcaaaattgcatctaagaattttcttaaacaatacaaggggtactgaagtagtgaaggattacctggacaaaatggagaaagaagttggcaaaaagattgctatgaggtccccacacacaaacttagcattccagaaaatattttctttgccaccagaagaatttcttatcaattattttacttgtcacttaaagaggaaaatgctaacacagggtcgtctttttctatctccaagaatatttgggttttacacaaatatttttggccacaaaacaaaattcttcttactttgggaagatattgaagacattttactggtccctgcaaccctatccttaatgggaagtccatctctggtgattattcttcgaaagggcagaggaatggatgcaaagcatggcgcaaagcaactggacagtcaagggagactaaacttccatttccaatcttttgtctcattcaatgtggcacataaaacaataacggcactgtggaaggcaaggtccttgacccctgaacaaaaggtagagcttgtagaagaggaatcagaaacagaagagttccaaaacgtggaaggagaatctttcttagggatagaggatgcccaaatgtcaggagtgttctcatccacaaaaccttttgatgtaacaacactcatgggcatatttgagggtggtcctttggagtgccgggtgatggagaaagttggctgtatggactactctgttacagcatgggaacctgtcagagctgatatttaccagaggcaagttcattataaatttgacaagaaatcagtacggcatggaggagaagcgatgagcactcagcagaagtcccctttgcctaataagaatggctggcttgttgaagaagtgatgacgcttgaaggtatccctgttggtgaatgtttcaatgtatcttcagaatcaggaattag

SEQ ID NO: 79855 - DNA, 516 bp, Zea Mays
tcataaacccccctccttcatcaccttgcctacccgctaaacctattcgacccatcaacgaacagatccaccctcaccagccgcctgacgttcgagccgcaccagccctaaacccttccacctccagccgccataactgtaatcccttccaccatcagctgcccctccgttcgagccgtcgacgccctaatcctatcaccttctggccgcccaaatccctttcggctcctgccgccctctgtttgaggcgcaggccatggagtcgtcggtcttcgagtgccaggccatggagttgtcgatcttcgagtgccaggccatggcggcacagaccatggagtcacaggctatgatggcgcaggtcttagtctttaggccatggagtcgcaatcaggcgttcaagatgctctgagacttgagtcagctgtccatctgtgtacttgattgtgatgataaattgaagccagtaattagatagtcatttggttctctagaggaagtggaagaattgtacaagat

SEQ ID NO: 79856 - DNA, 807 bp, Zea Mays
tcataaacccccctccttcatcaccttgcctacccgctaaacctattcgacccatcaacgaacagatccaccctcaccagccgcctgacgttcgagccgcaccagccctaaacccttccacctccagccgccataactgtaatcccttccaccatcagctgcccctccgttcgagccgtcgacgccctaatcctatcaccttctggccgcccaaatccctttcggctcctgccgccctctgtttgaggcgcaggccatggagtcgtcggtcttcgagtgccaggccatggagttgtcgatcttcgagtgccaggccatggcggcacagaccatggagtcacaggctatgatggcgcaggtcttagtctttaggccatggagtcgcaatcaggcgttcaagatgctctgagacttgagtcaggaatgatatatgtgttctctgtccactgatgcggctggagcgtcatgtcaacggctcaccctccccctaacaaattaaactagactgatgagtggagcttcatgttgggatgatccatgcaccttttaagttttggaacgtcgtactcaaatgtagcttgtgttagttgaacctatcgtactttcttttggaattaaattatatgatatttaaacatgtttgatgtttaatacttgtgttggatgctttatgcttcaaatatatatgcattatacaaaaagttgtgtacacttatgttgtttgatgaaattgtatgcacgatttggattgaattcaattgaatgctgattttcattaattgatgatgaattaaacgtcataaatag

SEQ ID NO: 79857 - DNA, 3184 bp, Zea Mays
cttttatttgccatgtcagtttgagtacaaattttcaaattattgaccaaatccaaatgatcatgcaatgcaccaaacttttctaaatggctccgatgcatccgttttagttcctatcggacaagccctcaacggaccagccaaaaacaatctcgtatcttaagaccggcctgattttatggcgctggaccaactaaatgggctttagatgctgtttagatctgataggtcgtggcggagacgaagaagagaaccgaagaaggttccctcacttcccttgcctcgacgcgcccaaccacgccacgaagccacgcgcccgccggcggctcacctttcccgtcccttcaccttccccttccccttctccgttcggtgaaactgcgggagaccctcgcggcttccccacctcgacctccaaactctaaccacagacgcatcgaaaaccctcggtgcccggccgatggggaggaggaaggagcgccgcctggctgccatggccgcggcgggccgcagggtcaagctggacctcttcctcgatctcccccccggggaggcatcacataatgatggaataggaggtgaaaaccgtgaccaacagactgtggttcccacttcatcttcaggtgggtttcatcaatttccttccaagggatatgtaaagaagacatacctatggattattgaacataaatatggtggaaatttggatttgtgtacaagcttgtattcctccgcaaatctggttctgagatacatgtagggttgctggcctgcaaggaacattgagtaaattctactgagctgccactgtcaaaactgagtgaatgcctatgggcaatttctcatttggcagcatctaagcatggggatttctggatgtgattgttccctcctcggttcgtatgtctctttctttgtatgtagcttctaacctggtcttatttatggccagttttctgttaactttacgttaataattttaacaatacagtattctatttagtttttacaacaccattgatttcattatgtatgcttgagaaaagagcttcactgtattttgccacaccacaaaaccctttttatttctgaagatttcatgtaattttaatttcagataaaaaggagaatcctctagcattgcttgggcaatatagtgatgatgaagaggaaaatgaggaaacaacagatcaacccactgatgaagctaagaggagtcctggagatgctagtgctaagttatctagtccgtgtgtggatacagctggtaataatggcgtggcaagaactgaaccatcggtttctgtcggtgatcaacaagaagcacctcaagctggtgatattaagaactatacccaaagtgttacagaaaacactattgctcccgagccaattctacaagacgagaatgtgaaatcaactgaatctgttcctgattcatctggcatgcaaattgttggtgaagtcggtggaaattggagagcaataatgcatgaacagagtaatcaatgttattactggaacactgttactggagaaacgtcttgggacataccaaatggattagcttcaggagctgcgactgcatctgttccttctgatgtgggctattcaatagaagctcaagcccatgttcttcctcacagcacacttgaagcgtacccaagtgacatgtctgtcgggaatggcacatcaacttttgctaattttggaatggcatgtggaagtgcacaggttactcaagatgcttacgcttatgctgctcctatcgccagtcatgagcctatggacattgatcccttgtatcttgcaaaatatggtgatgatttgctgcaaagattgaacctgttggaaaggctctgtggcttgaatgaaggtcttgaattgataaggagagaaatcgggatacggatatcagactgcaatgcactttcatcgtatgggtcttctttgctcccgttgtggatgcatgctgaggtgcaccttaagcaactagactcttccatttctaggatggaaatgagctaccatgcagatacagaacataggaattctaagacagaggttgttgaacacaatgcacctgatggagctgacctgacaacaccctccaatggtgaggctttgaaatctgaggttagtcctgggattactatcgatgaaaatgtggagattgataagccaacttcgatattatctgctcaggattcacaaggtagggatattgcagcagttcctccaaaagttgaatctgacaatgaccaagatatggatgtggaaatggaagttgatgaagataacgtcgaagagcaggcacattgcagttctgtacctaaaaaggagcatcctccatcagaacagttgagttcaactaatttgccatcatttgaagatcctacacctgaggataattctgtccctccgcctccaccagaagaggaatggattccacctccaccacctgaaaatgaaccagctcctccagaccctccaaaagagccagctgcatcatatgttcaggtggatgccattcctcagccatatatcgctcaagaaaatgttgggtatacaatttcaggaatggagtactatggtattgtaggtacagaaggtacaaatgccaattactatatgcaagtgagtgagcctcatgtccttcaagcacaacagcattcttattatgcaccagtatctgggagtggcgtatctgtttctgttgatggcacatctattgccccagaatcttattatacccatccttcagtcactatggctgccagcgcagtagcagctgaacattctgtatactatgcttcatcaatctctgccatttctagcagcgcagcagatatcaaaacaagctcagcttctcttgtttctgcaaatagcaattcagatctcaaaggtcctgataaacttatatccaatgatgcgagtattgtacctttgacccaagctgtagtagcaacatcaggcgcaggaacgccatctgtcctgggaagttctacacagccttctagcagtactaaaaatctgaccaaagttactcgtaacaagaagcgggctgttggtattacctcgtctctgaggtctaataagaaagtttcaagtttggtggataagattccctatgtatcatgtcaagaagaaatagtggactctgcgtcttaaccgtctgtttcct

SEQ ID NO: 79858 - DNA, 3518 bp, Zea Mays
aaacaatctcgtatcttaagaccggcctgattttatggcgctggaccaactaaatgggctttagatgctgtttagatctgataggtcgtggcggagacgaagaagagaaccgaagaaggttccctcacttcccttgcctcgacgcgcccaaccacgccacgaagccacgcgcccgccggcggctcacctttcccgtcccttcaccttccccttccccttctccgttcggtgaaactgcgggagaccctcgcggcttccccacctcgacctccaaactctaaccacagacgcatcgaaaaccctcggtgcccggccgatggggaggaggaaggagcgccgcctggctgccatggccgcggcgggccgcagggtcaagctggacctcttcctcgatctcccccccggggaggcatcacataatgatggaataggaggtgaaaaccgtgaccaacagactgtggttcccacttcatcttcagataaaaaggagaatcctctagcattgcttgggcaatatagtgatgatgaagaggaaaatgaggaaacaacagatcaacccactgatgaagctaagaggagtcctggagatgctagtgctaagttatctagtccgtgtgtggatacagctggtaataatggcgtggcaagaactgaaccatcggtttctgtcggtgatcaacaagaagcacctcaagctggtgatattaagaactatacccaaagtgttacagaaaacactattgctcccgagccaattctacaagacgagaatgtgaaatcaactgaatctgttcctgattcatctggcatgcaaattgttggtgaagtcggtggaaattggagagcaataatgcatgaacagagtaatcaatgttattactggaacactgttactggagaaacgtcttgggacataccaaatggattagcttcaggagctgcgactgcatctgttccttctgatgtgggctattcaatagaagctcaagcccatgttcttcctcacagcacacttgaagcgtacccaagtgacatgtctgtcgggaatggcacatcaacttttgctaattttggaatggcatgtggaagtgcacaggttactcaagatgcttacgcttatgctgctcctatcgccagtcatgagcctatggacattgatcccttgtatcttgcaaaatatggtgatgatttgctgcaaagattgaacctgttggaaaggctctgtggcttgaatgaaggtcttgaattgataaggagagaaatcgggatacggatatcagactgcaatgcactttcatcgtatgggtcttctttgctcccgttgtggatgcatgctgaggtgcaccttaagcaactagactcttccatttctaggatggaaatgagctaccatgcagatacagaacataggaattctaagacagaggttgttgaacacaatgcacctgatggagctgacctgacaacaccctccaatggattcacaaggtagggatattgcagcagttcctccaaaagttgaatctgacaatgaccaagatatggatgtggaaatggaagttgatgaagataacgtcgaagagcaggcacattgcagttctgtacctaaaaaggagcatcctccatcagaacagttgagttcaactaatttgccatcatttgaagatcctacacctgaggataattctgtccctccgcctccaccagaagaggaatggattccacctccaccacctgaaaatgaaccagctcctccagaccctccaaaagagccagctgcatcatatgttcaggtacagaaggtacaaatgccaattactatatgcaagtgagtgagcctcatgtccttcaagcacaacagcattcttattatgcaccagtatctgggagtggcgtatctgtttctgttgatggcacatctattgccccagaatcttattatacccatccttcagtcactatggctgccagcgcagtagcagctgaacattctgtatactatgcttcatcaatctctgccatttctagcagcgcagcagatatcaaaacaagctcagcttctcttgtttctgcaaatagcaattcagatctcaaaggtcctgataaacttatatccaatgatgcgagtattgtacctttgacccaagctgtagtagcaacatcaggcgcaggaacgccatctgtcctgggaagttctacacagccttctagcagtactaaaaatctgaccaaagttactcgtaacaagaagcgggctgttggtattacctcgtctctgaggtctaataagaaagtttcaagtttggtggataagtggaaagctgcaaaagaggaacttcgcaacgaagaggaagaggagcctgaaagtgctctggaggcattagaaaggaagcggcaaaaggaaatagaggaatggcggaaacaacagatagctagtggagaagctcaggaaaatgccaattttattcctgttcgtggtgattggcgtgaccgtgtcaaacgcaaaagggctcaagcaaaaaatgagtcaaaagatgacattgttgctgcatctttaggtagttccgaacagcataaaggacctcctgatctagcagagctctccaaggatcttcctactggttggcaggtaagtattctagattgtagcatatcggatgctaacatactgagctgtgcttaaagttacatacatagaatcagaggtagcttcctcttcagcatccaagaattcgatatctattgcaactgatacaaagaagtgaaccacgaaacattggtcattagtgtatcctctattcctgtagagtgtactgtaaaaaccttgtttatctgccatgccattgttacaaagtccttagcactgcgtacttgcattattctatttgtgcaggcatacttggatgagtatactaagcaagtctattatgggaacaacctcacgtcagagacgtcctgggagcggccaacaaaatgaaaatctacagccttgtgcggtcacgaacagtaggcttaatttaaccatgtagatggtgctgtacaatgggcagatcaattttgttgtagatatctcctggagttttaaaagaacgaacagaagtgccaaggatgtttagagaatgaaaacggaaagtgaagttcttataatgaattaatgatgctcagtttctagttttctatcttcgtgctacgagaagctccaacatgatctattttgatgattggagagcacatagtcactcaaatttctttcatagttttcatttctagggctcttattattcgtttgtaagaaataattggtgatgtagtttgtaaggaataaggtgatgttcttcctcaagctttcatttttagagctcttgataatgataaggaccttgtacgtgttttatttgacctaacaagccattttacataggttggtgtactatcttcatttttttaaagattggtagcgtgattcctcaataaggtaatgtagtttgtacggctatatgcagtagattgtgtaaaat

SEQ ID NO: 79859 - DNA, 3659 bp, Zea Mays
cttaagaccggcctgattttatggcgctggaccaactaaatgggctttagatgctgtttagatctgataggtcgtggcggagacgaagaagagaaccgaagaaggttccctcacttcccttgcctcgacgcgcccaaccacgccacgaagccacgcgcccgccggcggctcacctttcccgtcccttcaccttccccttccccttctccgttcggtgaaactgcgggagaccctcgcggcttccccacctcgacctccaaactctaaccacagacgcatcgaaaaccctcggtgcccggccgatggggaggaggaaggagcgccgcctggctgccatggccgcggcgggccgcagggtcaagctggacctcttcctcgatctcccccccggggaggcatcacataatgatggaataggaggtgaaaaccgtgaccaacagactgtggttcccacttcatcttcagataaaaaggagaatcctctagcattgcttgggcaatatagtgatgatgaagaggaaaatgaggaaacaacagatcaacccactgatgaagctaagaggagtcctggagatgctagtgctaagttatctagtccgtgtgtggatacagctggtaataatggcgtggcaagaactgaaccatcggtttctgtcggtgatcaacaagaagcacctcaagctggtgatattaagaactatacccaaagtgttacagaaaacactattgctcccgagccaattctacaagacgagaatgtgaaatcaactgaatctgttcctgattcatctggcatgcaaattgttggtgaagtcggtggaaattggagagcaataatgcatgaacagagtaatcaatgttattactggaacactgttactggagaaacgtcttgggacataccaaatggattagcttcaggagctgcgactgcatctgttccttctgatgtgggctattcaatagaagctcaagcccatgttcttcctcacagcacacttgaagcgtacccaagtgacatgtctgtcgggaatggcacatcaacttttgctaattttggaatggcatgtggaagtgcacaggttactcaagatgcttacgcttatgctgctcctatcgccagtcatgagcctatggacattgatcccttgtatcttgcaaaatatggtgatgatttgctgcaaagattgaacctgttggaaaggctctgtggcttgaatgaaggtcttgaattgataaggagagaaatcgggatacggatatcagactgcaatgcactttcatcgtatgggtcttctttgctcccgttgtggatgcatgctgaggtgcaccttaagcaactagactcttccatttctaggatggaaatgagctaccatgcagatacagaacataggaattctaagacagaggttgttgaacacaatgcacctgatggagctgacctgacaacaccctccaatggattcacaaggtagggatattgcagcagttcctccaaaagttgaatctgacaatgaccaagatatggatgtggaaatggaagttgatgaagataacgtcgaagagcaggcacattgcagttctgtacctaaaaaggagcatcctccatcagaacagttgagttcaactaatttgccatcatttgaagatcctacacctgaggataattctgtccctccgcctccaccagaagaggaatggattccacctccaccacctgaaaatgaaccagctcctccagaccctccaaaagagccagctgcatcatatgttcaggtggatgccattcctcagccatatatcgctcaagaaaatgttgggtatacaatttcaggaatggagtactatggtattgtaggtacagaaggtacaaatgccaattactatatgcaagtgagtgagcctcatgtccttcaagcacaacagcattcttattatgcaccagtatctgggagtggcgtatctgtttctgttgatggcacatctattgccccagaatcttattatacccatccttcagtcactatggctgccagcgcagtagcagctgaacattctgtatactatgcttcatcaatctctgccatttctagcagcgcagcagatatcaaaacaagctcagcttctcttgtttctgcaaatagcaattcagatctcaaaggtcctgataaacttatatccaatgatgcgagtattgtacctttgacccaagctgtagtagcaacatcaggcgcaggaacgccatctgtcctgggaagttctacacagccttctagcagtactaaaaatctgaccaaagttactcgtaacaagaagcgggctgttggtattacctcgtctctgaggtctaataagaaagtttcaagtttggtggataagtggaaagctgcaaaagaggaacttcgcaacgaagaggaagaggagcctgaaagtgctctggaggcattagaaaggaagcggcaaaaggaaatagaggaatggcggaaacaacagatagctagtggagaagctcaggaaaatgccaattttattcctgttcgtggtgattggcgtgaccgtgtcaaacgcaaaagggctcaagcaaaaaatgagtcaaaagatgacattgttgctgcatctttaggtagttccgaacagcataaaggacctcctgatctagcagagctctccaaggatcttcctactggttggcaggcatacttggatgagtatactaagcaagtctattatgggaacaacctcacgtcagagacgtcctgggagcggccaacaaaatgaaaatctacagccttgtgcggtcacgaacagtaggataagggcatgtttgtttggaattctaatgtgttcggattatataatccaatatattttgaactacttaggctctgtttatttcccttctagattatataagctgaattatggtgaaaggttaagagggtaaaataacacattgggatcataaataaactaaaataagctactcaatactagcttatttcagcttatttatggtcctacagtgatattttatcctcctaccctttttattataatccaacttatataatcgagtaaacaaacgtacacttagttcaaaaatattgaattatataatctggccagattataatctcaaacaagcatgtcttaatttaaccatgtagatggtgctgtacaatgggcagatcaattttgttgtagatatctcctggagttttaaaagaacgaacagaagtgccaaggatgtttagagaatgaaaacggaaagtgaagttcttataatgaattaatgatgctcagtttctagttttctatcttcgtgctacgagaagctccaacatgatctattttgatgattggagagcacatagtcactcaaatttctttcatagttttcatttctagggctcttattattcgtttgtaagaaataattggtgatgtagtttgtaaggaataaggtgatgttcttcctcaagctttcatttttagagctcttgataatgataaggaccttgtacgtgttttatttgacctaacaagccattttacataggttggtgtactatcttcatttttttaaagattggtagcgtgattcctcaataaggtaatgtagtttgtacggctatatgcagtagattgtgtaaaat

SEQ ID NO: 79860 - DNA, 4158 bp, Zea Mays
cctgattttatggcgctggaccaactaaatgggctttagatgctgtttagatctgataggtcgtggcggagacgaagaagagaaccgaagaaggttccctcacttcccttgcctcgacgcgcccaaccacgccacgaagccacgcgcccgccggcggctcacctttcccgtcccttcaccttccccttccccttctccgttcggtgaaactgcgggagaccctcgcggcttccccacctcgacctccaaactctaaccacagacgcatcgaaaaccctcggtgcccggccgatggggaggaggaaggagcgccgcctggctgccatggccgcggcgggccgcagggtcaagctggacctcttcctcgatctcccccccggggaggcatcacataatgatggaataggaggtgaaaaccgtgaccaacagactgtggttcccacttcatcttcaggtgggtttcatcaatttccttccaagggatatgtaaagaagacatacctatggattattgaacataaatatggtggaaatttggatttgtgtacaagcttgtattcctccgcaaatctggttctgagatacatgtagggttgctggcctgcaaggaacattgagtaaattctactgagctgccactgtcaaaactgagtgaatgcctatgggcaatttctcatttggcagcatctaagcatggggatttctggatgtgattgttccctcctcggttcgtatgtctctttctttgtatgtagcttctaacctggtcttatttatggccagttttctgttaactttacgttaataattttaacaatacagtattctatttagtttttacaacaccattgatttcattatgtatgcttgagaaaagagcttcactgtattttgccacaccacaaaaccctttttatttctgaagatttcatgtaattttaatttcagataaaaaggagaatcctctagcattgcttgggcaatatagtgatgatgaagaggaaaatgaggaaacaacagatcaacccactgatgaagctaagaggagtcctggagatgctagtgctaagttatctagtccgtgtgtggatacagctggtaataatggcgtggcaagaactgaaccatcggtttctgtcggtgatcaacaagaagcacctcaagctggtgatattaagaactatacccaaagtgttacagaaaacactattgctcccgagccaattctacaagacgagaatgtgaaatcaactgaatctgttcctgattcatctggcatgcaaattgttggtgaagtcggtggaaattggagagcaataatgcatgaacagagtaatcaatgttattactggaacactgttactggagaaacgtcttgggacataccaaatggattagcttcaggagctgcgactgcatctgttccttctgatgtgggctattcaatagaagctcaagcccatgttcttcctcacagcacacttgaagcgtacccaagtgacatgtctgtcgggaatggcacatcaacttttgctaattttggaatggcatgtggaagtgcacaggttactcaagatgcttacgcttatgctgctcctatcgccagtcatgagcctatggacattgatcccttgtatcttgcaaaatatggtgatgatttgctgcaaagattgaacctgttggaaaggctctgtggcttgaatgaaggtcttgaattgataaggagagaaatcgggatacggatatcagactgcaatgcactttcatcgtatgggtcttctttgctcccgttgtggatgcatgctgaggtgcaccttaagcaactagactcttccatttctaggatggaaatgagctaccatgcagatacagaacataggaattctaagacagaggttgttgaacacaatgcacctgatggagctgacctgacaacaccctccaatggtgaggctttgaaatctgaggttagtcctgggattactatcgatgaaaatgtggagattgataagccaacttcgatattatctgctcaggattcacaaggtagggatattgcagcagttcctccaaaagttgaatctgacaatgaccaagatatggatgtggaaatggaagttgatgaagataacgtcgaagagcaggcacattgcagttctgtacctaaaaaggagcatcctccatcagaacagttgagttcaactaatttgccatcatttgaagatcctacacctgaggataattctgtccctccgcctccaccagaagaggaatggattccacctccaccacctgaaaatgaaccagctcctccagaccctccaaaagagccagctgcatcatatgttcaggtggatgccattcctcagccatatatcgctcaagaaaatgttgggtatacaatttcaggaatggagtactatggtattgtaggtacagaaggtacaaatgccaattactatatgcaagtgagtgagcctcatgtccttcaagcacaacagcattcttattatgcaccagtatctgggagtggcgtatctgtttctgttgatggcacatctattgccccagaatcttattatacccatccttcagtcactatggctgccagcgcagtagcagctgaacattctgtatactatgcttcatcaatctctgccatttctagcagcgcagcagatatcaaaacaagctcagcttctcttgtttctgcaaatagcaattcagatctcaaaggtcctgataaacttatatccaatgatgcgagtattgtacctttgacccaagctgtagtagcaacatcaggcgcaggaacgccatctgtcctgggaagttctacacagccttctagcagtactaaaaatctgaccaaagttactcgtaacaagaagcgggctgttggtattacctcgtctctgaggtctaataagaaagtttcaagtttggtggataagtggaaagctgcaaaagaggaacttcgcaacgaagaggaagaggagcctgaaagtgctctggaggcattagaaaggaagcggcaaaaggaaatagaggaatggcggaaacaacagatagctagtggagaagctcaggaaaatgccaattttattcctgttcgtggtgattggcgtgaccgtgtcaaacgcaaaagggctcaagcaaaaaatgagtcaaaagatgacattgttgctgcatctttaggtagttccgaacagcataaaggacctcctgatctagcagagctctccaaggatcttcctactggttggcaggtaagtattctagattgtagcatatcggatgctaacatactgagctgtgcttaaagttacatacatagaatcagaggtagcttcctcttcagcatccaagaattcgatatctattgcaactgatacaaagaagtgaaccacgaaacattggtcattagtgtatcctctattcctgtagagtgtactgtaaaaaccttgtttatctgccatgccattgttacaaagtccttagcactgcgtacttgcattattctatttgtgcaggcatacttggatgagtatactaagcaagtctattatgggaacaacctcacgtcagagacgtcctgggagcggccaacaaaatgaaaatctacagccttgtgcggtcacgaacagtaggcttaatttaaccatgtagatggtgctgtacaatgggcagatcaattttgttgtagatatctcctggagttttaaaagaacgaacagaagtgccaaggatgtttagagaatgaaaacggaaagtgaagttcttataatgaattaatgatgctcagtttctagttttctatcttcgtgctacgagaagctccaacatgatctattttgatgattggagagcacatagtcactcaaatttctttcatagttttcatttctagggctcttattattcgtttgtaagaaataattggtgatgtagtttgtaaggaataaggtgatgttcttcctcaagctttcatttttagagctcttgataatgataaggaccttgtacgtgttttatttgacctaacaagccattttacataggttggtgtactatcttcatttttttaaagattggtagcgtgattcctcaataaggtaatgtagtttgtacggctatatgcagtagattgtgtaaaat

SEQ ID NO: 79861 - DNA, 4060 bp, Zea Mays
cctgattttatggcgctggaccaactaaatgggctttagatgctgtttagatctgataggtcgtggcggagacgaagaagagaaccgaagaaggttccctcacttcccttgcctcgacgcgcccaaccacgccacgaagccacgcgcccgccggcggctcacctttcccgtcccttcaccttccccttccccttctccgttcggtgaaactgcgggagaccctcgcggcttccccacctcgacctccaaactctaaccacagacgcatcgaaaaccctcggtgcccggccgatggggaggaggaaggagcgccgcctggctgccatggccgcggcgggccgcagggtcaagctggacctcttcctcgatctcccccccggggaggcatcacataatgatggaataggaggtgaaaaccgtgaccaacagactgtggttcccacttcatcttcaggtgggtttcatcaatttccttccaagggatatgtaaagaagacatacctatggattattgaacataaatatggtggaaatttggatttgtgtacaagcttgtattcctccgcaaatctggttctgagatacatgtagggttgctggcctgcaaggaacattgagtaaattctactgagctgccactgtcaaaactgagtgaatgcctatgggcaatttctcatttggcagcatctaagcatggggatttctggatgtgattgttccctcctcggttcgtatgtctctttctttgtatgtagcttctaacctggtcttatttatggccagttttctgttaactttacgttaataattttaacaatacagtattctatttagtttttacaacaccattgatttcattatgtatgcttgagaaaagagcttcactgtattttgccacaccacaaaaccctttttatttctgaagatttcatgtaattttaatttcagataaaaaggagaatcctctagcattgcttgggcaatatagtgatgatgaagaggaaaatgaggaaacaacagatcaacccactgatgaagctaagaggagtcctggagatgctagtgctaagttatctagtccgtgtgtggatacagctggtaataatggcgtggcaagaactgaaccatcggtttctgtcggtgatcaacaagaagcacctcaagctggtgatattaagaactatacccaaagtgttacagaaaacactattgctcccgagccaattctacaagacgagaatgtgaaatcaactgaatctgttcctgattcatctggcatgcaaattgttggtgaagtcggtggaaattggagagcaataatgcatgaacagagtaatcaatgttattactggaacactgttactggagaaacgtcttgggacataccaaatggattagcttcaggagctgcgactgcatctgttccttctgatgtgggctattcaatagaagctcaagcccatgttcttcctcacagcacacttgaagcgtacccaagtgacatgtctgtcgggaatggcacatcaacttttgctaattttggaatggcatgtggaagtgcacaggttactcaagatgcttacgcttatgctgctcctatcgccagtcatgagcctatggacattgatcccttgtatcttgcaaaatatggtgatgatttgctgcaaagattgaacctgttggaaaggctctgtggcttgaatgaaggtcttgaattgataaggagagaaatcgggatacggatatcagactgcaatgcactttcatcgtatgggtcttctttgctcccgttgtggatgcatgctgaggtgcaccttaagcaactagactcttccatttctaggatggaaatgagctaccatgcagatacagaacataggaattctaagacagaggttgttgaacacaatgcacctgatggagctgacctgacaacaccctccaatggattcacaaggtagggatattgcagcagttcctccaaaagttgaatctgacaatgaccaagatatggatgtggaaatggaagttgatgaagataacgtcgaagagcaggcacattgcagttctgtacctaaaaaggagcatcctccatcagaacagttgagttcaactaatttgccatcatttgaagatcctacacctgaggataattctgtccctccgcctccaccagaagaggaatggattccacctccaccacctgaaaatgaaccagctcctccagaccctccaaaagagccagctgcatcatatgttcaggtacagaaggtacaaatgccaattactatatgcaagtgagtgagcctcatgtccttcaagcacaacagcattcttattatgcaccagtatctgggagtggcgtatctgtttctgttgatggcacatctattgccccagaatcttattatacccatccttcagtcactatggctgccagcgcagtagcagctgaacattctgtatactatgcttcatcaatctctgccatttctagcagcgcagcagatatcaaaacaagctcagcttctcttgtttctgcaaatagcaattcagatctcaaaggtcctgataaacttatatccaatgatgcgagtattgtacctttgacccaagctgtagtagcaacatcaggcgcaggaacgccatctgtcctgggaagttctacacagccttctagcagtactaaaaatctgaccaaagttactcgtaacaagaagcgggctgttggtattacctcgtctctgaggtctaataagaaagtttcaagtttggtggataagtggaaagctgcaaaagaggaacttcgcaacgaagaggaagaggagcctgaaagtgctctggaggcattagaaaggaagcggcaaaaggaaatagaggaatggcggaaacaacagatagctagtggagaagctcaggaaaatgccaattttattcctgttcgtggtgattggcgtgaccgtgtcaaacgcaaaagggctcaagcaaaaaatgagtcaaaagatgacattgttgctgcatctttaggtagttccgaacagcataaaggacctcctgatctagcagagctctccaaggatcttcctactggttggcaggcatacttggatgagtatactaagcaagtctattatgggaacaacctcacgtcagagacgtcctgggagcggccaacaaaatgaaaatctacagccttgtgcggtcacgaacagtaggataagggcatgtttgtttggaattctaatgtgttcggattatataatccaatatattttgaactacttaggctctgtttatttcccttctagattatataagctgaattatggtgaaaggttaagagggtaaaataacacattgggatcataaataaactaaaataagctactcaatactagcttatttcagcttatttatggtcctacagtgatattttatcctcctaccctttttattataatccaacttatataatcgagtaaacaaacgtacacttagttcaaaaatattgaattatataatctggccagattataatctcaaacaagcatgtcttaatttaaccatgtagatggtgctgtacaatgggcagatcaattttgttgtagatatctcctggagttttaaaagaacgaacagaagtgccaaggatgtttagagaatgaaaacggaaagtgaagttcttataatgaattaatgatgctcagtttctagttttctatcttcgtgctacgagaagctccaacatgatctattttgatgattggagagcacatagtcactcaaatttctttcatagttttcatttctagggctcttattattcgtttgtaagaaataattggtgatgtagtttgtaaggaataaggtgatgttcttcctcaagctttcatttttagagctcttgataatgataaggaccttgtacgtgttttatttgacctaacaagccattttacataggttggtgtactatcttcatttttttaaagattggtagcgtgattcctcaataaggtaatgtagtttgtacggctatatgcagtagattgtgtaaaat

SEQ ID NO: 79862 - DNA, 3145 bp, Zea Mays
attttatggcgctggaccaactaaatgggctttagatgctgtttagatctgataggtcgtggcggagacgaagaagagaaccgaagaaggttccctcacttcccttgcctcgacgcgcccaaccacgccacgaagccacgcgcccgccggcggctcacctttcccgtcccttcaccttccccttccccttctccgttcggtgaaactgcgggagaccctcgcggcttccccacctcgacctccaaactctaaccacagacgcatcgaaaaccctcggtgcccggccgatggggaggaggaaggagcgccgcctggctgccatggccgcggcgggccgcagggtcaagctggacctcttcctcgatctcccccccggggaggcatcacataatgatggaataggaggtgaaaaccgtgaccaacagactgtggttcccacttcatcttcagataaaaaggagaatcctctagcattgcttgggcaatatagtgatgatgaagaggaaaatgaggaaacaacagatcaacccactgatgaagctaagaggagtcctggagatgctagtgctaagttatctagtccgtgtgtggatacagctggtaataatggcgtggcaagaactgaaccatcggtttctgtcggtgatcaacaagaagcacctcaagctggtgatattaagaactatacccaaagtgttacagaaaacactattgctcccgagccaattctacaagacgagaatgtgaaatcaactgaatctgttcctgattcatctggcatgcaaattgttggtgaagtcggtggaaattggagagcaataatgcatgaacagagtaatcaatgttattactggaacactgttactggagaaacgtcttgggacataccaaatggattagcttcaggagctgcgactgcatctgttccttctgatgtgggctattcaatagaagctcaagcccatgttcttcctcacagcacacttgaagcgtacccaagtgacatgtctgtcgggaatggcacatcaacttttgctaattttggaatggcatgtggaagtgcacaggttactcaagatgcttacgcttatgctgctcctatcgccagtcatgagcctatggacattgatcccttgtatcttgcaaaatatggtgatgatttgctgcaaagattgaacctgttggaaaggctctgtggcttgaatgaaggtcttgaattgataaggagagaaatcgggatacggatatcagactgcaatgcactttcatcgtatgggtcttctttgctcccgttgtggatgcatgctgaggtgcaccttaagcaactagactcttccatttctaggatggaaatgagctaccatgcagatacagaacataggaattctaagacagaggttgttgaacacaatgcacctgatggagctgacctgacaacaccctccaatggtgaggctttgaaatctgaggttagtcctgggattactatcgatgaaaatgtggagattgataagccaacttcgatattatctgctcaggattcacaaggtagggatattgcagcagttcctccaaaagttgaatctgacaatgaccaagatatggatgtggaaatggaagttgatgaagataacgtcgaagagcaggcacattgcagttctgtacctaaaaaggagcatcctccatcagaacagttgagttcaactaatttgccatcatttgaagatcctacacctgaggataattctgtccctccgcctccaccagaagaggaatggattccacctccaccacctgaaaatgaaccagctcctccagaccctccaaaagagccagctgcatcatatgttcaggtggatgccattcctcagccatatatcgctcaagaaaatgttgggtatacaatttcaggaatggagtactatggtattgtaggtacagaaggtacaaatgccaattactatatgcaacaattcagatctcaaaggtcctgataaacttatatccaatgatgcgagtattgtacctttgacccaagctgtagtagcaacatcaggcgcaggaacgccatctgtcctgggaagttctacacagccttctagcagtactaaaaatctgaccaaagttactcgtaacaagaagcgggctgttggtattacctcgtctctgaggtctaataagaaagtttcaagtttggtggataagtggaaagctgcaaaagaggaacttcgcaacgaagaggaagaggagcctgaaagtgctctggaggcattagaaaggaagcggcaaaaggaaatagaggaatggcggaaacaacagatagctagtggagaagctcaggaaaatgccaattttattcctgttcgtggtgattggcgtgaccgtgtcaaacgcaaaagggctcaagcaaaaaatgagtcaaaagatgacattgttgctgcatctttaggtagttccgaacagcataaaggacctcctgatctagcagagctctccaaggatcttcctactggttggcaggcatacttggatgagtatactaagcaagtctattatgggaacaacctcacgtcagagacgtcctgggagcggccaacaaaatgaaaatctacagccttgtgcggtcacgaacagtaggcttaatttaaccatgtagatggtgctgtacaatgggcagatcaattttgttgtagatatctcctggagttttaaaagaacgaacagaagtgccaaggatgtttagagaatgaaaacggaaagtgaagttcttataatgaattaatgatgctcagtttctagttttctatcttcgtgctacgagaagctccaacatgatctattttgatgattggagagcacatagtcactcaaatttctttcatagttttcatttctagggctcttattattcgtttgtaagaaataattggtgatgtagtttgtaaggaataaggtgatgttcttcctcaagctttcatttttagagctcttgataatgataaggaccttgtacgtgttttatttgacctaacaagccattttacataggttggtgtactatcttcatttttttaaagattggtagcgtgattcctcaataaggtaatgtagtttgtacggctatatgcagtagattgtgtaaaat

SEQ ID NO: 79863 - DNA, 3795 bp, Zea Mays
gtttagatctgataggtcgtggcggagacgaagaagagaaccgaagaaggttccctcacttcccttgcctcgacgcgcccaaccacgccacgaagccacgcgcccgccggcggctcacctttcccgtcccttcaccttccccttccccttctccgttcggtgaaactgcgggagaccctcgcggcttccccacctcgacctccaaactctaaccacagacgcatcgaaaaccctcggtgcccggccgatggggaggaggaaggagcgccgcctggctgccatggccgcggcgggccgcagggtcaagctggacctcttcctcgatctcccccccggggaggcatcacataatgatggaataggaggtgaaaaccgtgaccaacagactgtggttcccacttcatcttcaggtgggtttcatcaatttccttccaagggatatgtaaagaagacatacctatggattattgaacataaatatggtggaaatttggatttgtgtacaagcttgtattcctccgcaaatctggttctgagatacatgtagggttgctggcctgcaaggaacattgagtaaattctactgagctgccactgtcaaaactgagtgaatgcctatgggcaatttctcatttggcagcatctaagcatggggatttctggatgtgattgttccctcctcgataaaaaggagaatcctctagcattgcttgggcaatatagtgatgatgaagaggaaaatgaggaaacaacagatcaacccactgatgaagctaagaggagtcctggagatgctagtgctaagttatctagtccgtgtgtggatacagctggtaataatggcgtggcaagaactgaaccatcggtttctgtcggtgatcaacaagaagcacctcaagctggtgatattaagaactatacccaaagtgttacagaaaacactattgctcccgagccaattctacaagacgagaatgtgaaatcaactgaatctgttcctgattcatctggcatgcaaattgttggtgaagtcggtggaaattggagagcaataatgcatgaacagagtaatcaatgttattactggaacactgttactggagaaacgtcttgggacataccaaatggattagcttcaggagctgcgactgcatctgttccttctgatgtgggctattcaatagaagctcaagcccatgttcttcctcacagcacacttgaagcgtacccaagtgacatgtctgtcgggaatggcacatcaacttttgctaattttggaatggcatgtggaagtgcacaggttactcaagatgcttacgcttatgctgctcctatcgccagtcatgagcctatggacattgatcccttgtatcttgcaaaatatggtgatgatttgctgcaaagattgaacctgttggaaaggctctgtggcttgaatgaaggtcttgaattgataaggagagaaatcgggatacggatatcagactgcaatgcactttcatcgtatgggtcttctttgctcccgttgtggatgcatgctgaggtgcaccttaagcaactagactcttccatttctaggatggaaatgagctaccatgcagatacagaacataggaattctaagacagaggttgttgaacacaatgcacctgatggagctgacctgacaacaccctccaatggattcacaaggtagggatattgcagcagttcctccaaaagttgaatctgacaatgaccaagatatggatgtggaaatggaagttgatgaagataacgtcgaagagcaggcacattgcagttctgtacctaaaaaggagcatcctccatcagaacagttgagttcaactaatttgccatcatttgaagatcctacacctgaggataattctgtccctccgcctccaccagaagaggaatggattccacctccaccacctgaaaatgaaccagctcctccagaccctccaaaagagccagctgcatcatatgttcaggtacagaaggtacaaatgccaattactatatgcaagtgagtgagcctcatgtccttcaagcacaacagcattcttattatgcaccagtatctgggagtggcgtatctgtttctgttgatggcacatctattgccccagaatcttattatacccatccttcagtcactatggctgccagcgcagtagcagctgaacattctgtatactatgcttcatcaatctctgccatttctagcagcgcagcagatatcaaaacaagctcagcttctcttgtttctgcaaatagcaattcagatctcaaaggtcctgataaacttatatccaatgatgcgagtattgtacctttgacccaagctgtagtagcaacatcaggcgcaggaacgccatctgtcctgggaagttctacacagccttctagcagtactaaaaatctgaccaaagttactcgtaacaagaagcgggctgttggtattacctcgtctctgaggtctaataagaaagtttcaagtttggtggataagtggaaagctgcaaaagaggaacttcgcaacgaagaggaagaggagcctgaaagtgctctggaggcattagaaaggaagcggcaaaaggaaatagaggaatggcggaaacaacagatagctagtggagaagctcaggaaaatgccaattttattcctgttcgtggtgattggcgtgaccgtgtcaaacgcaaaagggctcaagcaaaaaatgagtcaaaagatgacattgttgctgcatctttaggtagttccgaacagcataaaggacctcctgatctagcagagctctccaaggatcttcctactggttggcaggcatacttggatgagtatactaagcaagtctattatgggaacaacctcacgtcagagacgtcctgggagcggccaacaaaatgaaaatctacagccttgtgcggtcacgaacagtaggataagggcatgtttgtttggaattctaatgtgttcggattatataatccaatatattttgaactacttaggctctgtttatttcccttctagattatataagctgaattatggtgaaaggttaagagggtaaaataacacattgggatcataaataaactaaaataagctactcaatactagcttatttcagcttatttatggtcctacagtgatattttatcctcctaccctttttattataatccaacttatataatcgagtaaacaaacgtacacttagttcaaaaatattgaattatataatctggccagattataatctcaaacaagcatgtcttaatttaaccatgtagatggtgctgtacaatgggcagatcaattttgttgtagatatctcctggagttttaaaagaacgaacagaagtgccaaggatgtttagagaatgaaaacggaaagtgaagttcttataatgaattaatgatgctcagtttctagttttctatcttcgtgctacgagaagctccaacatgatctattttgatgattggagagcacatagtcactcaaatttctttcatagttttcatttctagggctcttattattcgtttgtaagaaataattggtgatgtagtttgtaaggaataaggtgatgttcttcctcaagctttcatttttagagctcttgataatgataaggaccttgtacgtgttttatttgacctaacaagccattttacataggttggtgtactatcttcatttttttaaagattggtagcgtgattcctcaataaggtaatgtagtttgtacggctatatgcagtagattgtgtaaaat

SEQ ID NO: 79864 - DNA, 3612 bp, Zea Mays
tttagatctgataggtcgtggcggagacgaagaagagaaccgaagaaggttccctcacttcccttgcctcgacgcgcccaaccacgccacgaagccacgcgcccgccggcggctcacctttcccgtcccttcaccttccccttccccttctccgttcggtgaaactgcgggagaccctcgcggcttccccacctcgacctccaaactctaaccacagacgcatcgaaaaccctcggtgcccggccgatggggaggaggaaggagcgccgcctggctgccatggccgcggcgggccgcagggtcaagctggacctcttcctcgatctcccccccggggaggcatcacataatgatggaataggaggtgaaaaccgtgaccaacagactgtggttcccacttcatcttcagataaaaaggagaatcctctagcattgcttgggcaatatagtgatgatgaagaggaaaatgaggaaacaacagatcaacccactgatgaagctaagaggagtcctggagatgctagtgctaagttatctagtccgtgtgtggatacagctggtaataatggcgtggcaagaactgaaccatcggtttctgtcggtgatcaacaagaagcacctcaagctggtgatattaagaactatacccaaagtgttacagaaaacactattgctcccgagccaattctacaagacgagaatgtgaaatcaactgaatctgttcctgattcatctggcatgcaaattgttggtgaagtcggtggaaattggagagcaataatgcatgaacagagtaatcaatgttattactggaacactgttactggagaaacgtcttgggacataccaaatggattagcttcaggagctgcgactgcatctgttccttctgatgtgggctattcaatagaagctcaagcccatgttcttcctcacagcacacttgaagcgtacccaagtgacatgtctgtcgggaatggcacatcaacttttgctaattttggaatggcatgtggaagtgcacaggttactcaagatgcttacgcttatgctgctcctatcgccagtcatgagcctatggacattgatcccttgtatcttgcaaaatatggtgatgatttgctgcaaagattgaacctgttggaaaggctctgtggcttgaatgaaggtcttgaattgataaggagagaaatcgggatacggatatcagactgcaatgcactttcatcgtatgggtcttctttgctcccgttgtggatgcatgctgaggtgcaccttaagcaactagactcttccatttctaggatggaaatgagctaccatgcagatacagaacataggaattctaagacagaggttgttgaacacaatgcacctgatggagctgacctgacaacaccctccaatggtgaggctttgaaatctgaggttagtcctgggattactatcgatgaaaatgtggagattgataagccaacttcgatattatctgctcaggattcacaaggtagggatattgcagcagttcctccaaaagttgaatctgacaatgaccaagatatggatgtggaaatggaagttgatgaagataacgtcgaagagcaggcacattgcagttctgtacctaaaaaggagcatcctccatcagaacagttgagttcaactaatttgccatcatttgaagatcctacacctgaggataattctgtccctccgcctccaccagaagaggaatggattccacctccaccacctgaaaatgaaccagctcctccagaccctccaaaagagccagctgcatcatatgttcaggtggatgccattcctcagccatatatcgctcaagaaaatgttgggtatacaatttcaggaatggagtactatggtattgtaggtacagaaggtacaaatgccaattactatatgcaagtgagtgagcctcatgtccttcaagcacaacagcattcttattatgcaccagtatctgggagtggcgtatctgtttctgttgatggcacatctattgccccagaatcttattatacccatccttcagtcactatggctgccagcgcagtagcagctgaacattctgtatactatgcttcatcaatctctgccatttctagcagcgcagcagatatcaaaacaagctcagcttctcttgtttctgcaaatagcaattcagatctcaaaggtcctgataaacttatatccaatgatgcgagtattgtacctttgacccaagctgtagtagcaacatcaggcgcaggaacgccatctgtcctgggaagttctacacagccttctagcagtactaaaaatctgaccaaagtggaaagctgcaaaagaggaacttcgcaacgaagaggaagaggagcctgaaagtgctctggaggcattagaaaggaagcggcaaaaggaaatagaggaatggcggaaacaacagatagctagtggagaagctcaggaaaatgccaattttattcctgttcgtggtgattggcgtgaccgtgtcaaacgcaaaagggctcaagcaaaaaatgagtcaaaagatgacattgttgctgcatctttaggtagttccgaacagcataaaggacctcctgatctagcagagctctccaaggatcttcctactggttggcaggcatacttggatgagtatactaagcaagtctattatgggaacaacctcacgtcagagacgtcctgggagcggccaacaaaatgaaaatctacagccttgtgcggtcacgaacagtaggataagggcatgtttgtttggaattctaatgtgttcggattatataatccaatatattttgaactacttaggctctgtttatttcccttctagattatataagctgaattatggtgaaaggttaagagggtaaaataacacattgggatcataaataaactaaaataagctactcaatactagcttatttcagcttatttatggtcctacagtgatattttatcctcctaccctttttattataatccaacttatataatcgagtaaacaaacgtacacttagttcaaaaatattgaattatataatctggccagattataatctcaaacaagcatgtcttaatttaaccatgtagatggtgctgtacaatgggcagatcaattttgttgtagatatctcctggagttttaaaagaacgaacagaagtgccaaggatgtttagagaatgaaaacggaaagtgaagttcttataatgaattaatgatgctcagtttctagttttctatcttcgtgctacgagaagctccaacatgatctattttgatgattggagagcacatagtcactcaaatttctttcatagttttcatttctagggctcttattattcgtttgtaagaaataattggtgatgtagtttgtaaggaataaggtgatgttcttcctcaagctttcatttttagagctcttgataatgataaggaccttgtacgtgttttatttgacctaacaagccattttacataggttggtgtactatcttcatttttttaaagattggtagcgtgattcctcaataaggtaatgtagtttgtacggctatatgcagtagattgtgtaaaat

SEQ ID NO: 79865 - DNA, 3889 bp, Zea Mays
tagatctgataggtcgtggcggagacgaagaagagaaccgaagaaggttccctcacttcccttgcctcgacgcgcccaaccacgccacgaagccacgcgcccgccggcggctcacctttcccgtcccttcaccttccccttccccttctccgttcggtgaaactgcgggagaccctcgcggcttccccacctcgacctccaaactctaaccacagacgcatcgaaaaccctcggtgcccggccgatggggaggaggaaggagcgccgcctggctgccatggccgcggcgggccgcagggtcaagctggacctcttcctcgatctcccccccggggaggcatcacataatgatggaataggaggtgaaaaccgtgaccaacagactgtggttcccacttcatcttcaggtgggtttcatcaatttccttccaagggatatgtaaagaagacatacctatggattattgaacataaatatggtggaaatttggatttgtgtacaagcttgtattcctccgcaaatctggttctgagatacatgtagggttgctggcctgcaaggaacattgagtaaattctactgagctgccactgtcaaaactgagtgaatgcctatgggcaatttctcatttggcagcatctaagcatggggatttctggatgtgattgttccctcctcgataaaaaggagaatcctctagcattgcttgggcaatatagtgatgatgaagaggaaaatgaggaaacaacagatcaacccactgatgaagctaagaggagtcctggagatgctagtgctaagttatctagtccgtgtgtggatacagctggtaataatggcgtggcaagaactgaaccatcggtttctgtcggtgatcaacaagaagcacctcaagctggtgatattaagaactatacccaaagtgttacagaaaacactattgctcccgagccaattctacaagacgagaatgtgaaatcaactgaatctgttcctgattcatctggcatgcaaattgttggtgaagtcggtggaaattggagagcaataatgcatgaacagagtaatcaatgttattactggaacactgttactggagaaacgtcttgggacataccaaatggattagcttcaggagctgcgactgcatctgttccttctgatgtgggctattcaatagaagctcaagcccatgttcttcctcacagcacacttgaagcgtacccaagtgacatgtctgtcgggaatggcacatcaacttttgctaattttggaatggcatgtggaagtgcacaggttactcaagatgcttacgcttatgctgctcctatcgccagtcatgagcctatggacattgatcccttgtatcttgcaaaatatggtgatgatttgctgcaaagattgaacctgttggaaaggctctgtggcttgaatgaaggtcttgaattgataaggagagaaatcgggatacggatatcagactgcaatgcactttcatcgtatgggtcttctttgctcccgttgtggatgcatgctgaggtgcaccttaagcaactagactcttccatttctaggatggaaatgagctaccatgcagatacagaacataggaattctaagacagaggttgttgaacacaatgcacctgatggagctgacctgacaacaccctccaatggtgaggctttgaaatctgaggttagtcctgggattactatcgatgaaaatgtggagattgataagccaacttcgatattatctgctcaggattcacaaggtagggatattgcagcagttcctccaaaagttgaatctgacaatgaccaagatatggatgtggaaatggaagttgatgaagataacgtcgaagagcaggcacattgcagttctgtacctaaaaaggagcatcctccatcagaacagttgagttcaactaatttgccatcatttgaagatcctacacctgaggataattctgtccctccgcctccaccagaagaggaatggattccacctccaccacctgaaaatgaaccagctcctccagaccctccaaaagagccagctgcatcatatgttcaggtggatgccattcctcagccatatatcgctcaagaaaatgttgggtatacaatttcaggaatggagtactatggtattgtaggtacagaaggtacaaatgccaattactatatgcaagtgagtgagcctcatgtccttcaagcacaacagcattcttattatgcaccagtatctgggagtggcgtatctgtttctgttgatggcacatctattgccccagaatcttattatacccatccttcagtcactatggctgccagcgcagtagcagctgaacattctgtatactatgcttcatcaatctctgccatttctagcagcgcagcagatatcaaaacaagctcagcttctcttgtttctgcaaatagcaattcagatctcaaaggtcctgataaacttatatccaatgatgcgagtattgtacctttgacccaagctgtagtagcaacatcaggcgcaggaacgccatctgtcctgggaagttctacacagccttctagcagtactaaaaatctgaccaaagttactcgtaacaagaagcgggctgttggtattacctcgtctctgaggtctaataagaaagtttcaagtttggtggataagtggaaagctgcaaaagaggaacttcgcaacgaagaggaagaggagcctgaaagtgctctggaggcattagaaaggaagcggcaaaaggaaatagaggaatggcggaaacaacagatagctagtggagaagctcaggaaaatgccaattttattcctgttcgtggtgattggtagttccgaacagcataaaggacctcctgatctagcagagctctccaaggatcttcctactggttggcaggcatacttggatgagtatactaagcaagtctattatgggaacaacctcacgtcagagacgtcctgggagcggccaacaaaatgaaaatctacagccttgtgcggtcacgaacagtaggataagggcatgtttgtttggaattctaatgtgttcggattatataatccaatatattttgaactacttaggctctgtttatttcccttctagattatataagctgaattatggtgaaaggttaagagggtaaaataacacattgggatcataaataaactaaaataagctactcaatactagcttatttcagcttatttatggtcctacagtgatattttatcctcctaccctttttattataatccaacttatataatcgagtaaacaaacgtacacttagttcaaaaatattgaattatataatctggccagattataatctcaaacaagcatgtcttaatttaaccatgtagatggtgctgtacaatgggcagatcaattttgttgtagatatctcctggagttttaaaagaacgaacagaagtgccaaggatgtttagagaatgaaaacggaaagtgaagttcttataatgaattaatgatgctcagtttctagttttctatcttcgtgctacgagaagctccaacatgatctattttgatgattggagagcacatagtcactcaaatttctttcatagttttcatttctagggctcttattattcgtttgtaagaaataattggtgatgtagtttgtaaggaataaggtgatgttcttcctcaagctttcatttttagagctcttgataatgataaggaccttgtacgtgttttatttgacctaacaagccattttacataggttggtgtactatcttcatttttttaaagattggtagcgtgattcctcaataaggtaatgtagtttgtacggctatatgcagtagattgtgtaaaat

SEQ ID NO: 79866 - DNA, 3793 bp, Zea Mays
atctgataggtcgtggcggagacgaagaagagaaccgaagaaggttccctcacttcccttgcctcgacgcgcccaaccacgccacgaagccacgcgcccgccggcggctcacctttcccgtcccttcaccttccccttccccttctccgttcggtgaaactgcgggagaccctcgcggcttccccacctcgacctccaaactctaaccacagacgcatcgaaaaccctcggtgcccggccgatggggaggaggaaggagcgccgcctggctgccatggccgcggcgggccgcagggtcaagctggacctcttcctcgatctcccccccggggaggcatcacataatgatggaataggaggtgaaaaccgtgaccaacagactgtggttcccacttcatcttcaggtgggtttcatcaatttccttccaagggatatgtaaagaagacatacctatggattattgaacataaatatggtggaaatttggatttgtgtacaagcttgtattcctccgcaaatctggttctgagatacatgtagggttgctggcctgcaaggaacattgagtaaattctactgagctgccactgtcaaaactgagtgaatgcctatgggcaatttctcatttggcagcatctaagcatggggatttctggatgtgattgttccctcctcggttcgtatgtctctttctttgtatgtagcttctaacctggtcttatttatggccagttttctgttaactttacgttaataattttaacaatacagtattctatttagtttttacaacaccattgatttcattatgtatgcttgagaaaagagcttcactgtattttgccacaccacaaaaccctttttatttctgaagatttcatgtaattttaatttcagataaaaaggagaatcctctagcattgcttgggcaatatagtgatgatgaagaggaaaatgaggaaacaacagatcaacccactgatgaagctaagaggagtcctggagatgctagtgctaagttatctagtccgtgtgtggatacagctggtaataatggcgtggcaagaactgaaccatcggtttctgtcggtgatcaacaagaagcacctcaagctggtgatattaagaactatacccaaagtgttacagaaaacactattgctcccgagccaattctacaagacgagaatgtgaaatcaactgaatctgttcctgattcatctggcatgcaaattgttggtgaagtcggtggaaattggagagcaataatgcatgaacagagtaatcaatgttattactggaacactgttactggagaaacgtcttgggacataccaaatggattagcttcaggagctgcgactgcatctgttccttctgatgtgggctattcaatagaagctcaagcccatgttcttcctcacagcacacttgaagcgtacccaagtgacatgtctgtcgggaatggcacatcaacttttgctaattttggaatggcatgtggaagtgcacaggttactcaagatgcttacgcttatgctgctcctatcgccagtcatgagcctatggacattgatcccttgtatcttgcaaaatatggtgatgatttgctgcaaagattgaacctgttggaaaggctctgtggcttgaatgaaggtcttgaattgataaggagagaaatcgggatacggatatcagactgcaatgcactttcatcgtatgggtcttctttgctcccgttgtggatgcatgctgaggtgcaccttaagcaactagactcttccatttctaggatggaaatgagctaccatgcagatacagaacataggaattctaagacagaggttgttgaacacaatgcacctgatggagctgacctgacaacaccctccaatggattcacaaggtagggatattgcagcagttcctccaaaagttgaatctgacaatgaccaagatatggatgtggaaatggaagttgatgaagataacgtcgaagagcaggcacattgcagttctgtacctaaaaaggagcatcctccatcagaacagttgagttcaactaatttgccatcatttgaagatcctacacctgaggataattctgtccctccgcctccaccagaagaggaatggattccacctccaccacctgaaaatgaaccagctcctccagaccctccaaaagagccagctgcatcatatgttcaggtggatgccattcctcagccatatatcgctcaagaaaatgttgggtatacaatttcaggaatggagtactatggtattgtaggtacagaaggtacaaatgccaattactatatgcaatattgtacctttgacccaagctgtagtagcaacatcaggcgcaggaacgccatctgtcctgggaagttctacacagccttctagcagtactaaaaatctgaccaaagttactcgtaacaagaagcgggctgttggtattacctcgtctctgaggtctaataagaaagtttcaagtttggtggataagtggaaagctgcaaaagaggaacttcgcaacgaagaggaagaggagcctgaaagtgctctggaggcattagaaaggaagcggcaaaaggaaatagaggaatggcggaaacaacagatagctagtggagaagctcaggaaaatgccaattttattcctgttcgtggtgattggcgtgaccgtgtcaaacgcaaaagggctcaagcaaaaaatgagtcaaaagatgacattgttgctgcatctttaggtagttccgaacagcataaaggacctcctgatctagcagagctctccaaggatcttcctactggttggcaggcatacttggatgagtatactaagcaagtctattatgggaacaacctcacgtcagagacgtcctgggagcggccaacaaaatgaaaatctacagccttgtgcggtcacgaacagtaggataagggcatgtttgtttggaattctaatgtgttcggattatataatccaatatattttgaactacttaggctctgtttatttcccttctagattatataagctgaattatggtgaaaggttaagagggtaaaataacacattgggatcataaataaactaaaataagctactcaatactagcttatttcagcttatttatggtcctacagtgatattttatcctcctaccctttttattataatccaacttatataatcgagtaaacaaacgtacacttagttcaaaaatattgaattatataatctggccagattataatctcaaacaagcatgtcttaatttaaccatgtagatggtgctgtacaatgggcagatcaattttgttgtagatatctcctggagttttaaaagaacgaacagaagtgccaaggatgtttagagaatgaaaacggaaagtgaagttcttataatgaattaatgatgctcagtttctagttttctatcttcgtgctacgagaagctccaacatgatctattttgatgattggagagcacatagtcactcaaatttctttcatagttttcatttctagggctcttattattcgtttgtaagaaataattggtgatgtagtttgtaaggaataaggtgatgttcttcctcaagctttcatttttagagctcttgataatgataaggaccttgtacgtgttttatttgacctaacaagccattttacataggttggtgtactatcttcatttttttaaagattggtagcgtgattcctcaataaggtaatgtagtttgtacggctatatgcagtagattgtgtaaaat

SEQ ID NO: 79867 - DNA, 3679 bp, Zea Mays
atctgataggtcgtggcggagacgaagaagagaaccgaagaaggttccctcacttcccttgcctcgacgcgcccaaccacgccacgaagccacgcgcccgccggcggctcacctttcccgtcccttcaccttccccttccccttctccgttcggtgaaactgcgggagaccctcgcggcttccccacctcgacctccaaactctaaccacagacgcatcgaaaaccctcggtgcccggccgatggggaggaggaaggagcgccgcctggctgccatggccgcggcgggccgcagggtcaagctggacctcttcctcgatctcccccccggggaggcatcacataatgatggaataggaggtgaaaaccgtgaccaacagactgtggttcccacttcatcttcagataaaaaggagaatcctctagcattgcttgggcaatatagtgatgatgaagaggaaaatgaggaaacaacagatcaacccactgatgaagctaagaggagtcctggagatgctagtgctaagtccgtgtgtggatacagctggtaataatggcgtggcaagaactgaaccatcggtttctgtcggtgatcaacaagaagcacctcaagctggtgatattaagaactatacccaaagtgttacagaaaacactattgctcccgagccaattctacaagacgagaatgtgaaatcaactgaatctgttcctgattcatctggcatgcaaattgttggtgaagtcggtggaaattggagagcaataatgcatgaacagagtaatcaatgttattactggaacactgttactggagaaacgtcttgggacataccaaatggattagcttcaggagctgcgactgcatctgttccttctgatgtgggctattcaatagaagctcaagcccatgttcttcctcacagcacacttgaagcgtacccaagtgacatgtctgtcgggaatggcacatcaacttttgctaattttggaatggcatgtggaagtgcacaggttactcaagatgcttacgcttatgctgctcctatcgccagtcatgagcctatggacattgatcccttgtatcttgcaaaatatggtgatgatttgctgcaaagattgaacctgttggaaaggctctgtggcttgaatgaaggtcttgaattgataaggagagaaatcgggatacggatatcagactgcaatgcactttcatcgtatgggtcttctttgctcccgttgtggatgcatgctgaggtgcaccttaagcaactagactcttccatttctaggatggaaatgagctaccatgcagatacagaacataggaattctaagacagaggttgttgaacacaatgcacctgatggagctgacctgacaacaccctccaatggtgaggctttgaaatctgaggttagtcctgggattactatcgatgaaaatgtggagattgataagccaacttcgatattatctgctcaggattcacaaggtagggatattgcagcagttcctccaaaagttgaatctgacaatgaccaagatatggatgtggaaatggaagttgatgaagataacgtcgaagagcaggcacattgcagttctgtacctaaaaaggagcatcctccatcagaacagttgagttcaactaatttgccatcatttgaagatcctacacctgaggataattctgtccctccgcctccaccagaagaggaatggattccacctccaccacctgaaaatgaaccagctcctccagaccctccaaaagagccagctgcatcatatgttcaggtggatgccattcctcagccatatatcgctcaagaaaatgttgggtatacaatttcaggaatggagtactatggtattgtaggtacagaaggtacaaatgccaattactatatgcaagtgagtgagcctcatgtccttcaagcacaacagcattcttattatgcaccagtatctgggagtggcgtatctgtttctgttgatggcacatctattgccccagaatcttattatacccatccttcagtcactatggctgccagcgcagtagcagctgaacattctgtatactatgcttcatcaatctctgccatttctagcagcgcagcagatatcaaaacaagctcagcttctcttgtttctgcaaatagcaattcagatctcaaaggtcctgataaacttatatccaatgatgcgagtattgtacctttgacccaagctgtagtagcaacatcaggcgcaggaacgccatctgtcctgggaagttctacacagccttctagcagtactaaaaatctgaccaaagttactcgtaacaagaagcgggctgttggtattacctcgtctctgaggtctaataagaaagtttcaagtttggtggataagtggaaagctgcaaaagaggaacttcgcaacgaagaggaagaggagcctgaaagtgctctggaggcattagaaaggaagcggcaaaaggaaatagaggaatggcggaaacaacagatagctagtggagaagctcaggaaaatgccaattttattcctgttcgtggtgattggcgtgaccgtgtcaaacgcaaaagggctcaagcaaaaaatgagtcaaaagatgacattgttgctgcatctttaggtagttccgaacagcataaaggacctcctgatctagcagagctctccaaggatcttcctactggttggcaggcatacttggatgagtatactaagcaagtctattatgggaacaacctcacgtcagagacgtcctgggagcggccaacaaaatgaaaatctacagccttgtgcggtcacgaacagtaggataagggcatgtttgtttggaattctaatgtgttcggattatataatccaatatattttgaactacttaggctctgtttatttcccttctagattatataagctgaattatggtgaaaggttaagagggtaaaataacacattgggatcataaataaactaaaataagctactcaatactagcttatttcagcttatttatggtcctacagtgatattttatcctcctaccctttttattataatccaacttatataatcgagtaaacaaacgtacacttagttcaaaaatattgaattatataatctggccagattataatctcaaacaagcatgtcttaatttaaccatgtagatggtgctgtacaatgggcagatcaattttgttgtagatatctcctggagttttaaaagaacgaacagaagtgccaaggatgtttagagaatgaaaacggaaagtgaagttcttataatgaattaatgatgctcagtttctagttttctatcttcgtgctacgagaagctccaacatgatctattttgatgattggagagcacatagtcactcaaatttctttcatagttttcatttctagggctcttattattcgtttgtaagaaataattggtgatgtagtttgtaaggaataaggtgatgttcttcctcaagctttcatttttagagctcttgataatgataaggaccttgtacgtgttttatttgacctaacaagccattttacataggttggtgtactatcttcatttttttaaagattggtagcgtgattcctcaataaggtaatgtagtttgtacggctatatgcagtagattgtgtaaaat

SEQ ID NO: 79868 - DNA, 2568 bp, Zea Mays
ataggtcgtggcggagacgaagaagagaaccgaagaaggttccctcacttcccttgcctcgacgcgcccaaccacgccacgaagccacgcgcccgccggcggctcacctttcccgtcccttcaccttccccttccccttctccgttcggtgaaactgcgggagaccctcgcggcttccccacctcgacctccaaactctaaccacagacgcatcgaaaaccctcggtgcccggccgatggggaggaggaaggagcgccgcctggctgccatggccgcggcgggccgcagggtcaagctggacctcttcctcgatctcccccccggggaggcatcacataatgatggaataggaggtgaaaaccgtgaccaacagactgtggttcccacttcatcttcaggtgggtttcatcaatttccttccaagggatatgtaaagaagacatacctatggattattgaacataaatatggtggaaatttggatttgtgtacaagcttgtattcctccgcaaatctggttctgagatacatgtagggttgctggcctgcaaggaacattgagtaaattctactgagctgccactgtcaaaactgagtgaatgcctatgggcaatttctcatttggcagcatctaagcatggggatttctggatgtgattgttccctcctcgataaaaaggagaatcctctagcattgcttgggcaatatagtgatgatgaagaggaaaatgaggaaacaacagatcaacccactgatgaagctaagaggagtcctggagatgctagtgctaagttatctagtccgtgtgtggatacagctggtaataatggcgtggcaagaactgaaccatcggtttctgtcggtgatcaacaagaagcacctcaagctggtgatattaagaactatacccaaagtgttacagaaaacactattgctcccgagccaattctacaagacgagaatgtgaaatcaactgaatctgttcctgattcatctggcatgcaaattgttggtgaagtcggtggaaattggagagcaataatgcatgaacagagtaatcaatgttattactggaacactgttactggagaaacgtcttgggacataccaaatggattagcttcaggagctgcgactgcatctgttccttctgatgtgggctattcaatagaagctcaagcccatgttcttcctcacagcacacttgaagcgtacccaagtgacatgtctgtcgggaatggcacatcaacttttgctaattttggaatggcatgtggaagtgcacaggttactcaagatgcttacgcttatgctgctcctatcgccagtcatgagcctatggacattgatcccttgtatcttgcaaaatatggtgatgatttgctgcaaagattgaacctgttggaaaggctctgtggcttgaatgaaggtcttgaattgataaggagagaaatcgggatacggatatcagactgcaatgcactttcatcgtatgggtcttctttgctcccgttgtggatgcatgctgaggtgcaccttaagcaactagactcttccatttctaggatggaaatgagctaccatgcagatacagaacataggaattctaagacagaggttgttgaacacaatgcacctgatggagctgacctgacaacaccctccaatggattcacaaggtagggatattgcagcagttcctccaaaagttgaatctgacaatgaccaagatatggatgtggaaatggaagttgatgaagataacgtcgaagagcaggcacattgcagttctgtacctaaaaaggagcatcctccatcagaacagttgagttcaactaatttgccatcatttgaagatcctacacctgaggataattctgtccctccgcctccaccagaagaggaatggattccacctccaccacctgaaaatgaaccagctcctccagaccctccaaaagagccagctgcatcatatgttcaggtacagaaggtacaaatgccaattactatatgcaagtgagtgagcctcatgtccttcaagcacaacagcattcttattatgcaccagtatctgggagtggcgtatctgtttctgttgatggcacatctattgccccagaatcttattatacccatccttcagtcactatggctgccagcgcagtagcagctgaacattctgtatactatgcttcatcaatctctgccatttctagcagcgcagcagatatcaaaacaagctcagcttctcttgtttctgcaaatagcaattcagatctcaaaggtcctgataaacttatatccaatgatgcgagtattgtacctttgacccaagctgtagtagcaacatcaggcgcaggaacgccatctgtcctgggaagttctacacagccttctagcagtactaaaaatctgaccaaagttactcgtaacaagaagcgggctgttggtattacctcgtctctgaggtctaataagaaagtttcaagtttggtggataagattccctatgtatcatgtcaagaagaaatagtggactctgcgtcttaaccgtctgtttcct

SEQ ID NO: 79869 - DNA, 3793 bp, Zea Mays
ataggtcgtggcggagacgaagaagagaaccgaagaaggttccctcacttcccttgcctcgacgcgcccaaccacgccacgaagccacgcgcccgccggcggctcacctttcccgtcccttcaccttccccttccccttctccgttcggtgaaactgcgggagaccctcgcggcttccccacctcgacctccaaactctaaccacagacgcatcgaaaaccctcggtgcccggccgatggggaggaggaaggagcgccgcctggctgccatggccgcggcgggccgcagggtcaagctggacctcttcctcgatctcccccccggggaggcatcacataatgatggaataggaggtgaaaaccgtgaccaacagactgtggttcccacttcatcttcaggtgggtttcatcaatttccttccaagggatatgtaaagaagacatacctatggattattgaacataaatatggtggaaatttggatttgtgtacaagcttgtattcctccgcaaatctggttctgagatacatgtagggttgctggcctgcaaggaacattgagtaaattctactgagctgccactgtcaaaactgagtgaatgcctatgggcaatttctcatttggcagcatctaagcatggggatttctggatgtgattgttccctcctcgataaaaaggagaatcctctagcattgcttgggcaatatagtgatgatgaagaggaaaatgaggaaacaacagatcaacccactgatgaagctaagaggagtcctggagatgctagtgctaagttatctagtccgtgtgtggatacagctggtaataatggcgtggcaagaactgaaccatcggtttctgtcggtgatcaacaagaagcacctcaagctggtgatattaagaactatacccaaagtgttacagaaaacactattgctcccgagccaattctacaagacgagaatgtgaaatcaactgaatctgttcctgattcatctggcatgcaaattgttggtgaagtcggtggaaattggagagcaataatgcatgaacagagtaatcaatgttattactggaacactgttactggagaaacgtcttgggacataccaaatggattagcttcaggagctgcgactgcatctgttccttctgatgtgggctattcaatagaagctcaagcccatgttcttcctcacagcacacttgaagcgtacccaagtgacatgtctgtcgggaatggcacatcaacttttgctaattttggaatggcatgtggaagtgcacaggttactcaagatgcttacgcttatgctgctcctatcgccagtcatgagcctatggacattgatcccttgtatcttgcaaaatatggtgatgatttgctgcaaagattgaacctgttggaaaggctctgtggcttgaatgaaggtcttgaattgataaggagagaaatcgggatacggatatcagactgcaatgcactttcatcgtatgggtcttctttgctcccgttgtggatgcatgctgaggtgcaccttaagcaactagactcttccatttctaggatggaaatgagctaccatgcagatacagaacataggaattctaagacagaggttgttgaacacaatgcacctgatggagctgacctgacaacaccctccaatggattcacaaggtagggatattgcagcagttcctccaaaagttgaatctgacaatgaccaagatatggatgtggaaatggaagttgatgaagataacgtcgaagagcaggcacattgcagttctgtacctaaaaaggagcatcctccatcagaacagttgagttcaactaatttgccatcatttgaagatcctacacctgaggataattctgtccctccgcctccaccagaagaggaatggattccacctccaccacctgaaaatgaaccagctcctccagaccctccaaaagagccagctgcatcatatgttcaggtggatgccattcctcagccatatatcgctcaagaaaatgttgggtatacaatttcaggaatggagtactatggtattgtaggtacagaaggtacaaatgccaattactatatgcaagtgagtgagcctcatgtccttcaagcacaacagcattcttattatgcaccagtatctgggagtggcgtatctgtttctgttgatggcacatctattgccccagaatcttattatacccatccttcagtcactatggctgccagcgcagtagcagctgaacattctgtatactatgcttcatcaatctctgccatttctagcagcgcagcagatatcaaaacaagctcagcttctcttgtttctgcaaatagcaattcagatctcaaaggtcctgataaacttatatccaatgatgcgagtattgtacctttgacccaagctgtagtagcaacatcaggcgcaggaacgccatctgtcctgggaagttctacacagccttctagcagtactaaaaatctgaccaaagttactcgtaacaagaagcgggctgttggtattacctcgtctctgaggtctaataagaaagtttcaagtttggtggataagtggaaagctgcaaaagaggaacttcgcaacgaagaggaagaggagcctgaaagtgctctggaggcattagaaaggaagcggcaaaaggaaatagaggaatggcggaaacaacagatagctagtggagaagctcaggaaaatgccaattttattcctgttcgtggtgattggcgtgaccgtgtcaaacgcaaaagggctcaagcaaaaaatgagtcaaaagatgacattgttgctgcatctttaggtagttccgaacagcataaaggacctcctgatctagcagagctctccaaggatcttcctactggttggcaggtaagtattctagattgtagcatatcggatgctaacatactgagctgtgcttaaagttacatacatagaatcagaggtagcttcctcttcagcatccaagaattcgatatctattgcaactgatacaaagaagtgaaccacgaaacattggtcattagtgtatcctctattcctgtagagtgtactgtaaaaaccttgtttatctgccatgccattgttacaaagtccttagcactgcgtacttgcattattctatttgtgcaggcatacttggatgagtatactaagcaagtctattatgggaacaacctcacgtcagagacgtcctgggagcggccaacaaaatgaaaatctacagccttgtgcggtcacgaacagtaggcttaatttaaccatgtagatggtgctgtacaatgggcagatcaattttgttgtagatatctcctggagttttaaaagaacgaacagaagtgccaaggatgtttagagaatgaaaacggaaagtgaagttcttataatgaattaatgatgctcagtttctagttttctatcttcgtgctacgagaagctccaacatgatctattttgatgattggagagcacatagtcactcaaatttctttcatagttttcatttctagggctcttattattcgtttgtaagaaataattggtgatgtagtttgtaaggaataaggtgatgttcttcctcaagctttcatttttagagctcttgataatgataaggaccttgtacgtgttttatttgacctaacaagccattttacataggttggtgtactatcttcatttttttaaagattggtagcgtgattcctcaataaggtaatgtagtttgtacggctatatgcagtagattgtgtaaaat

SEQ ID NO: 79870 - DNA, 3971 bp, Zea Mays
gtcgtggcggagacgaagaagagaaccgaagaaggttccctcacttcccttgcctcgacgcgcccaaccacgccacgaagccacgcgcccgccggcggctcacctttcccgtcccttcaccttccccttccccttctccgttcggtgaaactgcgggagaccctcgcggcttccccacctcgacctccaaactctaaccacagacgcatcgaaaaccctcggtgcccggccgatggggaggaggaaggagcgccgcctggctgccatggccgcggcgggccgcagggtcaagctggacctcttcctcgatctcccccccggggaggcatcacataatgatggaataggaggtgaaaaccgtgaccaacagactgtggttcccacttcatcttcaggtgggtttcatcaatttccttccaagggatatgtaaagaagacatacctatggattattgaacataaatatggtggaaatttggatttgtgtacaagcttgtattcctccgcaaatctggttctgagatacatgtagggttgctggcctgcaaggaacattgagtaaattctactgagctgccactgtcaaaactgagtgaatgcctatgggcaatttctcatttggcagcatctaagcatggggatttctggatgtgattgttccctcctcggttcgtatgtctctttctttataaaaaggagaatcctctagcattgcttgggcaatatagtgatgatgaagaggaaaatgaggaaacaacagatcaacccactgatgaagctaagaggagtcctggagatgctagtgctaagttatctagtccgtgtgtggatacagctggtaataatggcgtggcaagaactgaaccatcggtttctgtcggtgatcaacaagaagcacctcaagctggtgatattaagaactatacccaaagtgttacagaaaacactattgctcccgagccaattctacaagacgagaatgtgaaatcaactgaatctgttcctgattcatctggcatgcaaattgttggtgaagtcggtggaaattggagagcaataatgcatgaacagagtaatcaatgttattactggaacactgttactggagaaacgtcttgggacataccaaatggattagcttcaggagctgcgactgcatctgttccttctgatgtgggctattcaatagaagctcaagcccatgttcttcctcacagcacacttgaagcgtacccaagtgacatgtctgtcgggaatggcacatcaacttttgctaattttggaatggcatgtggaagtgcacaggttactcaagatgcttacgcttatgctgctcctatcgccagtcatgagcctatggacattgatcccttgtatcttgcaaaatatggtgatgatttgctgcaaagattgaacctgttggaaaggctctgtggcttgaatgaaggtcttgaattgataaggagagaaatcgggatacggatatcagactgcaatgcactttcatcgtatgggtcttctttgctcccgttgtggatgcatgctgaggtgcaccttaagcaactagactcttccatttctaggatggaaatgagctaccatgcagatacagaacataggaattctaagacagaggttgttgaacacaatgcacctgatggagctgacctgacaacaccctccaatggtgaggctttgaaatctgaggttagtcctgggattactatcgatgaaaatgtggagattgataagccaacttcgatattatctgctcaggattcacaaggtagggatattgcagcagttcctccaaaagttgaatctgacaatgaccaagatatggatgtggaaatggaagttgatgaagataacgtcgaagagcaggcacattgcagttctgtacctaaaaaggagcatcctccatcagaacagttgagttcaactaatttgccatcatttgaagatcctacacctgaggataattctgtccctccgcctccaccagaagaggaatggattccacctccaccacctgaaaatgaaccagctcctccagaccctccaaaagagccagctgcatcatatgttcaggtggatgccattcctcagccatatatcgctcaagaaaatgttgggtatacaatttcaggaatggagtactatggtattgtaggtacagaaggtacaaatgccaattactatatgcaagtgagtgagcctcatgtccttcaagcacaacagcattcttattatgcaccagtatctgggagtggcgtatctgtttctgttgatggcacatctattgccccagaatcttattatacccatccttcagtcactatggctgccagcgcagtagcagctgaacattctgtatactatgcttcatcaatctctgccatttctagcagcgcagcagatatcaaaacaagctcagcttctcttgtttctgcaaatagcaattcagatctcaaaggtcctgataaacttatatccaatgatgcgagtattgtacctttgacccaagctgtagtagcaacatcaggcgcaggaacgccatctgtcctgggaagttctacacagccttctagcagtactaaaaatctgaccaaagttactcgtaacaagaagcgggctgttggtattacctcgtctctgaggtctaataagaaagtttcaagtttggtggataagtggaaagctgcaaaagaggaacttcgcaacgaagaggaagaggagcctgaaagtgctctggaggcattagaaaggaagcggcaaaaggaaatagaggaatggcggaaacaacagatagctagtggagaagctcaggaaaatgccaattttattcctgttcgtggtgattggcgtgaccgtgtcaaacgcaaaagggctcaagcaaaaaatgagtcaaaagatgacattgttgctgcatctttaggtagttccgaacagcataaaggacctcctgatctagcagagctctccaaggatcttcctactggttggcaggcatacttggatgagtatactaagcaagtctattatgggaacaacctcacgtcagagacgtcctgggagcggccaacaaaatgaaaatctacagccttgtgcggtcacgaacagtaggataagggcatgtttgtttggaattctaatgtgttcggattatataatccaatatattttgaactacttaggctctgtttatttcccttctagattatataagctgaattatggtgaaaggttaagagggtaaaataacacattgggatcataaataaactaaaataagctactcaatactagcttatttcagcttatttatggtcctacagtgatattttatcctcctaccctttttattataatccaacttatataatcgagtaaacaaacgtacacttagttcaaaaatattgaattatataatctggccagattataatctcaaacaagcatgtcttaatttaaccatgtagatggtgctgtacaatgggcagatcaattttgttgtagatatctcctggagttttaaaagaacgaacagaagtgccaaggatgtttagagaatgaaaacggaaagtgaagttcttataatgaattaatgatgctcagtttctagttttctatcttcgtgctacgagaagctccaacatgatctattttgatgattggagagcacatagtcactcaaatttctttcatagttttcatttctagggctcttattattcgtttgtaagaaataattggtgatgtagtttgtaaggaataaggtgatgttcttcctcaagctttcatttttagagctcttgataatgataaggaccttgtacgtgttttatttgacctaacaagccattttacataggttggtgtactatcttcatttttttaaagattggtagcgtgattcctcaataaggtaatgtagtttgtacggctatatgcagtagattgtgtaaaat
